United States Patent Application Publication US 2008/0114160 A1 - sequence listing, part 70

SEQ ID NO: 25611 - DNA, 46825 bp, Oryza sativa
caaacatgcatgttgttaagctgacacgcggtgacaaagaatgacgattttgtgaccggtctggcactgctcatgttgtaagcgcacggccacgtcccacgacgcgcctgcccccgtcaagagtgaaggtaggtgtgggctgtcccatcagaagggctcccggatggaaaccgtactgatctccgcccattaaagagaaaaagaacagtccagtttggaaagagaaaggtgcatgtggtatccccttgagatataaaaggaggaccttgcccatttagagaggagacttcttcccttttgaaaggctgagaggggaaaggaagttaatcttttgtaacttgtccatacacaaatccacaaaaacacaggagtagggtattacgcttggcagcggcccgaacctgtatacatcgccgtgtctcgtgtgtcttgcggacgggtgatctttccacatacagagagagagagagcttgggattgcaccctaagcccctggtcgaaccggcaaaggggggcttgcgcagtctcccggtgaggggccacgagctccgtcatctggcgcgccaggtaggggactcagtgtgtgttttctgagctctcagactcttccgtgggcgccaagtttttcttgttcagcctaatggccgagcaaggaaaagcgcacgacctctctccgagtgtgagcggcgacgacggggagccgaatccacgccgtcgagctcgtactcccccacctcctccgcgccaaagccctaagcagggggaggcgcttgagagggtcgacaaatccgtggcatcaccggtcgcgggtgatgtaggagaacggcgagatggggagcgtcgcctcctcgtctacggcgacggcagcacgcctcagggcgcgcttcaggctgctagcgcgctcctacgtcacccacccgtcgtccatgaccctgagtctccagctcagcgatggctggacgacgtggccaacttggtcgtgacggcccagcagcgcctgggtgctggtggacggtccgccaccaccaagacttccggcgccgccaccaccggttccgtgtcatcaaggcggagggcgcggcgagcggcggcggctgcacggcattcggctgccactccctcgtcgacaccttcgactcgggaggatcagcatggggagccagatgcccgcctcaacatcgagcgccggcgtaatagccggcgtactccccgtgcaacggagggcgcctcctcgtccagagtgtcacctcgacatggacgtgaggatcagccctccgtgcccccggccggtggtgttggctgtagagcctttgtggcgagtcttcggaatgtccgttggcccccaaggttccggcccaccatcaccgagaagtacgatgggagcgtcaaccccaccgagtttctccaggtctatacgaccgggatcgaggccgctgggggtgacgacagggtcatggcgaacttctttcccatggccctaaaaggacaggcgcggggttggctaatgaacctgccacccgcgtcggtccactcctgggaagatttgtgccaacagttcaccatgaacttccaaggcacatatccgcgcccaggcgaagaagcggacttgcatgcagtacagcgaggcgatgatgagtcgcttcgctcgtacattcagcggttttgccaagtccgcaatactataccatgcatccctgcacacgcggtgatctacgcgttcagggggggcgtgcggcacaaccgcatgctcgaaaagatcgcttccaaagagccccagactaccgcggagctttttcagctcgcggaccgagtggctcgtaaggaggaagcgtggacatggaactcctccggttccggagtggcagcttcggccgcccccggatccgccgctcagacagggcggcgtgacaggaggaggaagaaaaggtcggtccattccggcgacgagggtcacgtcctcgccatcgagggcgctccgcgggccactcgaaaggggaggcctgcgagcgacaaaaagaaagaggctggtactcccagcagggagcgcccagccagcaagtggtgctccgtccacaacacctccctccacgatctcgcggactgtcgtgcagtcaaaaacctggctgagcgaacgaggaagtgggaggaggacaggaggcaggaacgccgtgagggcaagtcccggcggttccttccagcaaacggcgaagtgaggccaagcagaaggcccccgctgttgacatcgatgatggtgatgatgacctaggtttccaagaacctggggccaccattgccaccgtcgatggaggagcgtgtgctcacgtctctcgccggagcttcaaggctatgaagcgagagcttctggccatggcccctactcatgagccaatgcgtcgggccggtggtcgaaggttgctctcactttcgaccagaccgaccacccaccgtgcattgcccggggagggcaggttgcgatggtggtttcccccaccatctgcaacgtgaagttggggcgtgtcctcatagatggaggagcggctctcaacatcctttcccccgcggcttttgatgccatcaaggccccggggatggtgctccgaccgtcccagccgattatcggcgtgacgccggggcacacgtggccattaggtcacatcgacctaccggtcaccttcggtggacccgccaacttccgcacggagcgggtaagcttcgatgtggcggacctcagtctgccctacaacgcggtcctggggaggcccgcgttggtgaagtttatggcggcggtccactacgcctacctccagatgaagatgccgggcgccggtggccccatctctgtccgtggcgaccttaaagtcgcgctcgcttgcatggagcagcgcgcggaccacctcgctgctgcgactaagcccgagggtggtgacgagaggcttggcacctccgcccccaccgccccgaggcagcggattgccacatgcgacgaggtcccggtcaaggaggttgccttgggcgacggcccatccaagaccacacggatcggtggtcttctggatggcaaataggaagacgcgctcgtctccttcctgcgggcaaacgctgacgtcttcgcatggagaccagcggacatgcccggggtccccagggaggtgattgagcaccgtctcgccgtgcggccgggcgcaagaccggtccggcagaaagtgcggcggcaggccccggaacgtcaagccttcatccgcgaggaggtggcaaggcttctggaggccggattcatccgtgaagtcatccatccggagtggctggcgaacccggtggtcgttcccaaggcgaacggcaagcttcggatgtgcatcgactacaccgaccttaacaaggcatgtcctaaggatccttaccccctgcctcgcatagatcagatcgttgactccactgcggggtgcgaccttttgtgttttctagatgcatactctggttaccatcagattcgcatggctagggaggatgaggagaaaactgcgtttattacccctgtaggaacctattgttatacatcaatgcccttcgggttaaagaatgcaggtcctacttttcaacgtactactcgaatttctttgggtagccaaataggacgtaatgttgaggcttatatcgatgacttggttgtaaaaacgcgcaaccaagaaactttactttcagatctagcggaaacttttgagaacctccgctccgcccgcataaaactgaaccccgataagtgcgtgtttggtgtacctgcgggcaagcctctcgggttcttggtctctgcccgaggcattgaggccaactccgagaagattcgagctatcgagcggatgcgcccccccagcaaacttagggatgtgcaatgcgtcaccggttgcatggccgccctaagtcgtttcatatcaaggctgggagagaaggcgctacccttgtttaagctcctcaagcgctcggggccgtttacttggacggaggaagctgaacatgccctcactcagttaaaggcatatctcagttcccccccggttctagtcgccccggagccaaatgagcccctgctactttacttagcggcgaccccccaagtagttagtgcagcgttggttgtggagcgcgatgaggacaatcctcattctgcgcacccccactctgtgccgacttggcccgggagcaggcagggaggagaggcccccgagtcgaacggtggcctaaggcccccgacgaccggagtcggccctctgcccgcttgtcagacggtgccgggtgcccccgaccctcaggaaggccccgaggccactgcgggaaggccgcacctaccaccctttgaccccgaggctaaccctgtgctgattcgacccgggagagagcagggagaagaggcccccgagccgaacggaggcctgaggcccctgacgaccggagctggccctttgcccgcttgtctgacgacaccaggagcccccgacccccgggacggccccgaggccactgtgggaaggccgcacctgtcatcttcggaccccgaggtcatcagcgcaggagacgagtgtgccccgagaggccacttggacgaagagcaccccggggatacggcccctagcgaagaggatcggccccgccgaaaggtgcagcggcctgtctactttgttagtgaggccctccgggacgccaagacccgatacccacaggcccagaagatgctttacgctattctgatggcctcgaggaaactgcgccattattttcaggcgcatcgggtcactgtggttacgtcttaccccctcggtcaaatcttgcataatcgagagggtacaggacgagtggtaaaatgggcaatcgagctttctgagttcgatctgcactttgaaccacgccacgctatcaagagccaggccctcgccgattttgtggcagagtggaccccggctccagagaccgtctcaattcccgaggccagcacggacccctcacagctgcctcaaaccgcccattgggtgatgcagttcgacggttctctgtctctccagggcgccggtgcaggggtcacgttgacctctccaaacggagacgtcctcaaatacttggtccgtctcgactttcgagcgactaacaatatggcagagtacgagggactccttgccggactcagagtggcagctggactggggatccgccgcctcttggtgttaggcgactcccagctggtcgttaaccaggtctgtaaggaataccggtgctctgacccacagatgaacgcttatgtacgccaagtgcggcgtatggagcgccattttgacgggatagagcttcggcatgtacccagacgggataacatggttgccgacgaactctcacggctcgcgtcctcgcgagcccagaccccaccgggcgcctttgaagaaaggcttacccagccgtcggcgcgacccgatcccttaggggagacggatgcgcctgaccggcccccgaggcccgtcggagtccaggcctcgggacccgaagggagcgctacaagctcccttagattgattgcttggatctctgagatccaaacatacctcacagataagactctacctgaggaccgcgaagggagtgaacgcgtacaacgcatttccaaacgctatgtgttggtagaagggaccctctatcggcgcgcggctaacggaatcctcctgaagtgcattcctcaggaacaaggcgttgagcttcttgctgacatccatgagggcgagtgcggagcccattccgcctcgcgtaccctggttggcaaggcctttcgtcaaggattttattggccgacagctctcaatgacgcagtcgatctggtccggcgatgcagagcgtgtcagttccacgccaagcaaatccatcagccggcccaggccctgcagatcataccactgtcatggccatttgctgtctgggggcttgatatcctgggaccgttcaaacgggccccgggcgggtttgagtatctgtatgtagcgatcgacaagttcactaagtggcccgaggcttatccggttgtcaagatcgataagcactctgctcttaaattcattaagggcatcacggcccgttttggagtgcctaaccgtattattacggataatggcacccaattcactagtgaactctttggcgactactgcgaagacatgggcatcaagctctgcttcgcctcacctgcccaccccagaagcaatggccaagtggagcgcgccaatgcagaaatcctcaaaggccttaaaaccaagaccttcaatattctcaagaagcacggcgattcatggatcgaggagttgccagcggtgctctgggcaaaccgaaccacaccaagccgagcgaccggggaaacgcctttcttcctcgtctacggcgcagaagcggttctcccatccgagctcaccctgaggtctcctcgggccaccatgtactgcgaggctgatcaagatcagcttcgcagagatgacctcgactacttagaagagcgaagacggcgcgcggccctccgagccgcgcgctaccagcagagcttgcggcgctaccatcagcgccacgtccgggcccgatcactctgcgtcgacgacctcgtcctacgccgcgtccaaacgcgtgctggattgagcaagctctcaccaatgtgggagggtccgtatcgagtgatcggtgtcccccggccgggctcggtacggctggccacgggcgacggcacggagctgccaaaaccgtggaacatcgaacaccttcgtcgcttctacccctgaggaggggggggtcgggtgtcaggttttggctcaggccaaccccgcacccccctcgggtgtgcagggttggccgggggctaccacacgtgcattacattcttatttctcttttttcaacatttcaatagaagcagtttcaatttcctaaaggttgtgtctgtgctgttctttccttttgaagaatcttgacttaaaataaggtcactcgtactcaaccttgccctcgggggttcggttcggtcagctaaaatcgtcaaacggggcccagaaccgagccgtgccccggggcgtggtgaactccgggggggaatcggcaaaaacccacaatcgggtcacccatacccctcggtcaccacgttcccggcctggccagtctcgacatgtggatctccccaggcactagccccgacccgagccattcgaggactgggacttgggcacgagcccttatttcaagctaaggcgcaaaaggaccatgacacagatacatcctcatcgcgtatgtatagcaaaataaaactaacacaaaaattttttcatcatttctgattgcagattaagttaatttgtacaaaaaagaggcatgaaggccttagaagaaagaaaaagaaaaaagttaagattggcgggggcctgggcgctcattccaatgcgcccgggtcgccggcctcgtcgccaccgtcgtcctcgccgctggcatcgccctcctcgtcggagctgggggcgaacgcgagccgaggggccgagccctcgaagccgttgacgatgtggtcggcggcatcccggacgcgcgcgcgcgcgtcgttctcggtcccgggagggaactcctccagcgccatccagggagagaaattggggtcccgggcctggtaactcgctagcacgagttcgaccgccccccgggcgaggtccctcgaggatgacttgatggtcttctcgagctcctcggggagtcgttcaaggacccaggccattctgttaaggtgcggagcgaggccttccagattggtggggcgcatcctcgtctggcctttccagaggcccgcttgccgaccagcgcgatccatgcgggagaccgagtcccaaagcatgtcgggccccatctcgcccgccaagcggagggcctcggcctccccgatggaggaatctagtgcgcgctgcatgtcagcgacggtgtgttcggcagccgcgaggcgagcggctaagtcgctttcgcccgcaaccgccccaccgacgcgcacccttgcgtccagctctttctcccgcgcctcgaggtcggcagcccgctgctccagtgcggctctctcggcgcggacgcattccagattgcggcgcgcctgctcctcctgcgctgcctcgcggagggacaggctgtccgccagccgttgcgtcgtggcctcggccacctcgagagctcgctcccgctcagcgagtgcatcctcgcggaggcggagcgcggactcctcctcggcgcaggcggcctcatgcgccgccagcgtcgcctctcggagaccagcggcggcctcgcggtccgccaagcccctctccacggcgccggcgtgttcttccagcgccatggcacgggcctcaagggcctcctcgcgccgccgagacgccgcttcagtcttcgttacccgccgctctcgggcagcggcggagtcaaggaccccttgggcggcgtcgagctttttcttcagctccgcctcccagcttgcgtgctgaaggcggagggtgtcttgcgcctcgaccattgcggtggtagagatgagggcggccgcccgctcctcctccacctcacgggcgacctccgccagcgccgctttccgggcttcaagctccgagacatgacggcggtgagccttacggcccacctccaccatggcgtccaccgagcgccgcccctcctcaacacgcgtccatgcggcctcgagctccgctcgttccgcacgcagggcctccacttgggcgttgaacccatccagcactgcggtgtttgcggcggccagggcttgcagaaggggctcggcgctcagcggggcgacagaagatgaggagaagagccgccttggagaaaatgcgacgcggcttggccccccggaggatgcgctgggctcggggatgtcccccgggcccgtttggtcctgggcgtcgcccggtgaggtaggcccaggcgatgcgcccgcggcctcgtcgcgagccgcctcggaggacgtcgcctgagggccgcccgagggagtgggcccaagtgacgcgccagcagcagctgtcgcctcagcctggcgagcccggtcggcctcctccttagcagcttcctcagcctggcgagcccgggcggcctcctcccgagcagcttcctccgcttggcgaacccgggcggcctcccgggcggcctcttcagcttcccgaaggcgatctgcggcttcacgccggtcagattctcgcctccgctcctctgcggccgctggatcttcggcctcggactggccggacttggggtggcgggaggaatgtgacggggcatcgctgaagcagaataaaaaaccagaagacaaacaaaatgagtaagaaaaaacttctttttgggagaaagatggttgcaatgagagtgagacgaacctgcgagggggtcggttgaatgaccaccttggaggggaaatcaggtttccccggcatggttccgtctcccccgtcttgcggagccgtttcttcttgcgctccccctcgggctgcgacgtcggcgcggccccctccgggcgccgactgctggcacgcgccgccccgccccctcggagaggagatgggggaggtgttcctcccagcttcctcttcccctgggcgtcggcagggcggctgctccccgagcccccgacgcggggcccagaagcacgaccccctcctggggcagattgttccccccggcggcgctcgcccgcgccgtcgtggcccttaggggctctctcctctgaggccccgacccccatcataatggttagaatggaggcgcggtcgggatcgctgcagagggggaggatctcctgaggaatgcgagacgcctccgcggagctaagattcagcaccctttggaccacgatcttgaagtcctcgggagcccaatcccatctggctccctggtgggtccgcatgtagtcttcaggcccagtgtactcccaggcgctccgggcgcgccgttggagcggcgcaatccggcgacggaggtaatcgccgtacaccatggccccggtgagcccctgggatcgcaggcccgccaggcggtcgaggacggcgtcgtagtcctcccccagatctaccggcgcccgccagctggagaccagcgccgggggctggcttggaagtcggaggcgcgcttcgttggcgaggggggtgtagaaccagtcgctcttccagtcgtcccacttcttgcggaggacgcaggggatgtagcggttcagcaccggcccccgcggctggaagtagcagccgccgaccaccgacggcggtgacaccgactgcacggtgaagaaccaccggaacagctgaagagaggggcgcaccccaatgaacatctcgcacaggtgcgcgaagatggccaatgtcatcaccgcattgggggtgaggtgcgccatctggagatcgtagaactccaggacatccatgaagaaagaagaaaatggcgggaccagcccagccattgcgaaggggaggaagaagatggaccgccccgggtagtctggtgccgggcgtccctcgcccagcatcactatctcccgaccggtggcggactccggcatgaagcggcgcggcagtccggcgtgcctctcgctcacgatgcgggaaggcggtagtacactgccgtcgagcagagcagagccccgtgccatggcggtggaggaagagatgattgagaacgagcgcgtgtggcgaaagttgggcgtagcagagaaagagtttgagctcaggcggcgaaggcaagaggaacaatggcgaaaggaaggaagcaaatccttttctcgatgcttttatacccttgccatcgctgggcctggctcctcgtttctcgcgcccactacctcgctccctcgtatctcgctatctcgctccctcgtttcccgtgcccacgcttccactaatcccattcgcccgcttacggcgcatgaagtggatatgcggttgtggcaatcgaaatggattgtatcgtgcgcgcgttaattacgctcgccgaccgaagcggcgttaccgtatctccgggcgagacaaatctgctcacccagattcgcgcgctgctcaagtggtgtggcagtcttgaatagaccgcccattatggacaaccaaagttaccaataccaatgtgcatggattgagaccgttgggtattttgcccaactacggagaccggtcccacctgtcaccaggctttaggggtggcgtcacacctgaccgcttccctggggaagggaaattgctctggcgtaacgccgggggctactgtcggtgatatgggaccgggagtatcatgaccagaggcttgaggcagacacaatcgcccacgtggcctggcaccttcggggacgtcgggcccgagggtgaggtgtccgccctcctcctgatttcccccgagggggggtcgggttgcgcttgccccggccccgagggccgaggcaccccgaccccttaaggaagtctgcgccatatatatgggataagtgagcacagctgtgctcacctaaccgcatttattgcggtctggtcaagcgtgtcacgctgcatgcagcgcaatgcagcgcgctcttttatccggtctgtgaccagtcacagaccggtcagatcaacggttaggtggcgactggcggtctgacgcacgcctcgccccatcccgtcaagacgagaacctctaggcactcgtccccagctggagctagcgtgttacatcccggagatggcacgttagccccgatcgatatatgccaggcttcatcctaaccattacaggcaagatgttgtgtgaagaagggcaaacatgcatgttgctaagctgacacgcggtggacaagaatgaccgatttgtgaccggtctggcactgctcatgttgtcagcgcacggccacgttcccacgacgcgcctgcccccggcaggagtggaggtaggtgtgggctgtcccatcagaagggctcccggatggaaaccgtactgatctccgcccattaaagagaaaaagaacagtccagtttggaaagagaaaggtgcatgtggtatccccttgagatataaaaggaggaccttgcccatttagagaggagacttcttcccttttgaaaggctgagaggggaaaggaagttaatcttttgtaacttgtccatacacaaatccacaaaaacacaggagtagggtattacgcttggcagcggcccgaacctgtatacatcgccgtgtctcgtgtgtcttgcggacgggtgatctttccacatacagagagagagagagagagcttgggattgcaccctaagcccctggtcgaaccggcaaaggggggcttgcgcagtctcccggtgaggggccacgagctccgtcatagtgagatgcatgcaatgaaagatgctagtcagttgggtcccacaagaaaaagaaatacatctcgggattaactgctagcttactctagttaatatggacatggatggagccggcagccagcaatactattgaacctgcttaagagcaagtgcaatagtaggctatataccagctataaacatactttaaagagataaaggaagagagagaggaacaacagattacatatctgtagtcagctgcagcacggattacaagacgtaatatgtgtataacatgtgagaccagatattaatagtatagtaagcaactattgtatgaactaggaaggaagcccgcgcagatgcgcaggcatctaatttattgttttatgatttatgaaataatgctaaaagatgtcatgtctcatcttttttatgctgtgagataaactgactttaatatacttagtaaatgataagaatgtctccaagattaaaagaaaatcagtctgtcccgattacttataaattctcctattgtcaccacaacttattattattgttttaaaagttatgatctataaatagataaaactggatatgtaccaataaaataagcctaatacatcattgatacactaaaatattcactacttatctaagtgttcatgtttcacttatttccgaatcaatatataaatattttaaaaataccacttataccaattaatgaaataacaccgttaaagataaacatgaatgcccctctaacgggtgaagcccatcgtagccaccaagactttctttctctgttgagttttctaaaaaaaacgaaaataaaatttttgataaattaatccaaaaaattaaaactaaattggatttacttaaaaaatagactaaattgttttttatcattttttacatttgtagatttaaattagtgttgtatatttatcaagtgatattagaaatcctaaaatataatgtgaaactatttgaaaattaccacaacattaattattatatgttggtcccatgtgtcatgatgtatttaggaccataatataccttttataagacataagtatttcatttaattaaagcatgaaactaatcacaaattgaatataattgttgcttactatactattaatatatggtcccacctgtcatacgcatattgcgtcttgtagtccgtgctgcagctggctacaaatctgtagcccgctgctcttctctctcatcgtttatctcattaaaatatatttgtagctggctaatagcttgctattttacttgctctaagataacagtcctaccaatttaaataaaaattaatgatgagattagacaaagtcacagggtggcctacaagagttggtagaaatggcacataagataaaatatgatatagtagtaaaaatatagctaatatagctcaggaattggtgatttaattaaaaaaacctacagctgctaaagtgtatgcgtagatcgtctataaaaataattgtttatttacaacaccagatcacttctattgtaaattcctagcgtttgcgcattcacactaagattactctctatgaaaaaactgatctaataatttatgataataaattatgatgtacatgtatcatgtaatttgaaaaaagaagaaaaaaaggagaattaggatctggatggcatcaatcgagctcgccgaggcagatcagtctccatggaaatgataacaaattatgatgcacatgtattgtgtaattagaaaaaaaaggagagagggagaatccagatatggatggcatcaagctaacagaagcataagtatgtacgtacgtacttatgggcggaaaatctaatgggcgatcaatcgctaccgcgatctggtagcgatcgcatcccctcccccctccctccttccacgtttccttttctggcaccgcattacttttctattttagtaaaatttatgcacctaaagtttatacacctaaagtttatagacccaaagtttagagacccaaagtttataaatcaaaagtttatatatccgattcaaatttaaatttgaattcaaatattttttatatatagtatttatatacatctaaagtttatacacctaaagtttatagacccaaagtttataaatcaaaagtttatataccctattcaaatttgaatttgaaatatattcgattcaaaatttgaatttgaattcaaatattttttatatatagtatttagatacatctaaagtttatacacctaaagtttatagacccaaagtttagagacccaaagtttacatacccaattcaaatttgaatttgaattgtatccgattcaaatttaaatttgaattcaaatatttttatatatagtatttctatacatctaaagtttatacacctaaagtttatagaccgaaagtttttagtaaaaagtttatatacccgattcaaatttgaatttgaattcaaatattagtttatagatccaaagtttataagtcaaaaatttacataaccgtttcaattctgaatttaaatttaaatatttatggtgtagtaggaagagaaaaaggaaaggaggaaggggggagaggagggagcgactggataggaggggcgggtgatcgcctgaggggcgggagctatcacccgcccatcaggcgtacccacttatgggtccggagagaaagggtgagaaagatttagttttgatccaacggttaatattattgggtccaccactttaaataaaaacttacggtcagatatttttctttttctcagaatattatttaaattattagagcgccatgtggcgacttaggagcgtttatatataggagtctcacgtggtagcttgagagcgtacgtagaaagtttaatgaacttttagtatataaataatagatagatagatttaggattttctctaatttgctagaacgccacgtggtggcctaggatcgttattggtccaaataatatgtaattacttatttatataaataatatgtaatttagaagtatacttattcaatatgtattgttgcagaacatagtaaagagaggaaggggaggaaaagaaacggagaggaggtactcatacatgacgcacggcaggattccttctttgttttttagaaagtaagagaataaaccaatctaatctaacggcttggagtaacgggcccactaattttaatgaaaattaatggctagatgttttgctttttttatagaatttctagtacacgtggcgtcgtaggagcgtttgtaggaagtttaatggacttttagtatataatagaagatagataatagatagatagatagatagatagatagatagatagatagatagttacatactacactattaatatctagccccacctgtcatagacacactgcgtcttggagtccgtgctacagctgtctacaaatctgtagcccgctgctcttctttctcctgatttatctccttaaaatatgtttgcagctggcttgtagtctgctattgtacctgctcttatacaggcaataatcactgccactaaatacagacaactatatttcttcatttataactgtatactgctttctaataataaaaatatattacattgccgacctctgcctgccacacgattaggcttgcaggccctacgtcatgttatttgtaattgatacagtttttgtatttatcaatccgtctcaacaagattgatcgattaggtggacattaattgatttattcaacgactaatcgatcttgctttgcagcagcatttcacttgctcattgcagtaggcgcctttccagtctaccaaattaccatagtatttgaggcagtaggctccacacattctcacttggcatgcccggagacccgtatagaaacacacatctgtactctctacaaaataaacaacaaactctgtataaaatgccatgattttttttgtaagtggtacccacaagttaagcgcatctacaatcattaatttctagtgatgccatgcttacagtaggtactaaagaaaaacaaatttgtagtaactaccacaacttcaaaaatcttcgcttataaaatcttcaatctgtttggcacaactctgtatattggccttgttcggcacaactctaatttattttttttaagctaggtatttctaaatgtagaaattctgtgcttatgttggtaatatttaaataaatcattttatttatattttagaggaaattaaatattttaaacaattgtagtttaacatatatacaaactttaaatttgacatggatctaagatttggagcaatgtttaaatttgtagcaaacattgtagagaggaaattaaatctaaccgtccgctttgcaggatgagagagcgacagccaagatcacaaaagccaccaagcagccgagggccattgtgttatttttcttggaaatgattgccatcacaagatcaggctacagtgttttgttctcccgatgatttgataagctacttctacgaccttcactgttgccggtgttcatataggggtacaataacccaccataaatgacatatattaatgcaaacattatcttactcatatcccttgcatttatgctgagcaatttattagctgtttattttataagatttgatgttttgggccgacacgtacaccttaccggctgggctcaaattggtccaaataattcggcccacggttagattgtaggtgtgaacatttgacattttttttttgcggggaaacatttgacatatttatcagagctgtcagtgcttccgtgactaatacttgctaatcgagcttatcaacaaataatataaagtcctggttcgttctcctgatttattgttcactcttaattactttctctagctatgagtgagttaaattttataaaacatgtaatccataggtttacactttgatcgttaatacatatttgaatagttcgcttcatgaaaatggtaataaaagacatcttttaaaatatatagatttgaaatattattacgtactttgctatcttttcttatatattttctattaaaagtcaataatgaagtcgctaccgacttatggaggaagagagaaggggtggagagtgggaggagggcctagtcatctctcggccagccagcgaggtcagacggtggtgcactaaggcgggggacttgatcgcgcgaagaaaacaactagttactgtggggataaggagttgggggaagaataaaaggataagcgggttgcaggaatcttgaaggcatcctcgccgtccaaatttgattgtttttatttatttatttttttcatttctatggaactaaaaagagaagacacagtccctatcaggttttatcgtacttgaacaggctagagatcgatcaaataagagtttatttgtgtacatggccagtgccaactccatggccaaggcgagttccacagcagcattgatcagaatcgctgtcgcaattgcctccttcattatgattggcttgacagagactcgtggtgcagcctcgtaggtatgtgcatgtatcctttactccctccgtttcgaaatatttgacaccgttgactttttagcacatgtttgaccgtttgtcttattcaaaaacttttgtgaaatatgtaaaattatatacctacataaaaatatatttaacaatgaatcaaatgataggaaaagaattaataattacttaaattttttgaataagacgaacggtcaaacatgtttaaaaaagtcaacggcgtcaaatatttcgaaacagagggagtatttcgtatgcacctgtgtacagaatggttagacccatgatcagatgcttgattttgattcatccattggccattgcaaaacgaagaaaattaattaagctgttatattcagcatggtgatggagaaattgaagatgtatatatatgtgtgtaccttgggctgcatgagaggatgagaaagcaatagccatcaccataagagctgccaagaacaccacagccttactattatccttgccaagaagtgccatgatagggagatcttttcagaagggaagggcgcagctgtattattgttgtttacctagctatccccttggtttgataggtgtttatatagccacaaaggcaaatcttggatgatacatcattagtttcctccattattatgcgacgcgacatcgacatttcttgatcgacgtggagacggaggagtgggagcaggtcgacgacaagagccttccgagggccgggccatgcatcccatcggtgagaagagaacaacctgatatcttcgtctcccactgcatcaacaagtcaagtcgtcgtcggcacagggcaatgtcagcatcgatcgaggagctgtctgttgtcctcaagatgccaacggtataaattctcggccggggtcttggggatatggcaccttctgcagagatgcttcctccggttgacagccaggaaaaatccgtcgtaaatatctgcacacccttacagcagcaccgcacggttttcttttacgaatttatattagtatactatataagtataatattactactcgatctgattggtccatttaaacaagctagtacatataatggagataaatttttcggtactacctcgaattcaggtacttaatgtagctgctagtatctggtagtatcaaactttacactacaaaatttcacacctccccatactttctcaaagataataaaattacactatcaggaaaccttgggagctttctttgccactcgatcaataaaacacaagcaatgcgtgattgttcttccttgaatatatataagtttttagatgtagtgcaatgcgatagactcaattttatgtgtgtacaagcaaactgcccgtagactcgtacgttttaacaagattttaattaatgaaaattatgaatatgctattaccattatttcttattcattatctcctaatcatatatatttgttattgatatgttggccgtttggcccacatatatcctttcttaattcgttccaaaatgttacttagcaagttgatgccttggtggtgggagtggtgacaaattcacccctcaccactgccactacttatctctttttaagtgtagacagctggtttcgtattttgggtgggtcggccatgcacggcactcgattataacagatggaatgtccagatgtggaagactaggacatgtgcaaatgggacatcagatgctcccaggtgagtttctgtcagaggaaccaatatattgtgtccattccttccactgtccttacatgttagtccctggaaatttgaagtctttgattacgcaggctgtgtagcactagttccggctttaaaaacatcctatttaaaacatgttttgaatcaaattttaaaaacctaaaaccctgatactcttcattccaaatctttctgcatgccacacccgatcccattcacagattcaagcaaatcaagcgagagagagagagagagagagagatgcacaaattcatacacacaacagattccattcacagattcaaaaagagagcaacaacatcgatcaaggcactgctcaagctgccattgtggcgttgtcgctgtcgccgagccaccgaggcacccctccctagttccaagcaccgccaccagatctggatctagagtggtgggccagcaccaccaccaccttagggctttctctcctctgccgtcaccagccctaccatttgccaccattggtagatctaagagcatatccaacagactctccaggctaaaatttagccaatttgacaaaaaaaaaagctctccaacagccttgccaaccgaatggccaaactagggcatcctgcctggctgaccaaaccaggttgccaaccatgggtcccacgctgctagacacccctcttcccctttatctcttcgcacctatcctaaacccaaacagaggagtgccaccactatctttgtcgtcaaggtcgccatcgccattcgccgctgctgccaaggtagtcattgccggatgccgctgtcatcgtctgcgccgtcactagctgccaccgccgtcgccatctgctactgtgccgaggtcgccatctgctactatgccgaattcgatggggtgcgcgacgcccgccctgtggatttggccatgtgttcggcaccgtctcctcgtgtttgtctccgttccccctgctctgcgtccgttgtcttccctgtcaataccgtccctagcgccaccggctgccgttagtaggatcgaatcacaagaactaagccaaccagagggagggtgaatggttggtatacccaaaaaccgaaaacttttagcggaaataaaagttaccctcgaaatcgatggaaaccggtctgaccgagattgatctgtcagtctgaccgagtggatgccgccggtctgacatgtgttgaatctccggtctaaccgccgaagtcgcctgccgcgcctgttgccgccgccggtctgaccgccgcaatgccgtcggtctgaccgccggtgagttgccggttagaccgccgaaacccggtgaaacacaaatcgaagaactcttaaagtgaatgacgactttattacttctctctgtgtttacaaagtgcaccaacaacactccttacaaaaatttcgactaaactcgaaaccctaactcaaaaaactcaactcaattgctctctaaagcgataccgggaagcctcatgctccccctctatttatacccgaggtaggcagcctaaagccacgaaccaaactcatattaggagtcctaaacaccttaggaaaccctctagtacaagaaagaaactttacatcaccaatcgtaccaaatttggactctttccaaattcgactccgcatcccatacgcacacaataactccatcgtatgccatatggaaactccatcaatccacgtgcatcaactctagccatagtatctcgcatgatctctgaccaccacgaatgtcatcttatccccaagccgactcccggtccatcaccgcaaatactctcccagacatcgagtcacctacacatggaacaaacaaagaaaccatattccgagaccaagctatctccaacttgactcattagcagcaaacaatagtattacatatgtatagtatccatctagaagtcataatcatgaaataaactcggatatccaaacaaacaacccgaaaccgaaaccgacacagtgtcggccggtcagaccgcgggctggccggtccgaccgctcgatcactgccggtctgaccggcatgcacagcccggtctgaccggtcacataaaataatgaatcctgcgatcacctatgaaaccaatcatctccaaaaccacttcgtgaataaattccaaataacaaaaccaataatctccaatgcccaattgtacatcacagaataataatcaaaaacacctttgattttacaatctcccccttgatgaacacattggcaaaccctttaaaaatgttttggtgtttggaaaaataaaaacaaaagtggtaaaaagcacacttcgtacaaatgtacacatcgtgctcaaaaattcaaaagaaaacttctccccctttttaaaagaaagaaattcccaattgaaccaaaaacatgctcttctcaacaactctccaaaaattcatcttgcttctccaaaatatccaaaaaagttcacattacttccccttttgacaatgatttcatcaagcgcttaatattcaagagcttagcatacatatagcataccaagtcatgtgttgcaataaaaagaagatgaacccatctataacagaacaagcatgcattagagtataaccatgaaccaaagattttacaattaagcttgaatcaacaatcaaaattcatgatttcatacgatttataatgcaacatcttaacaagcacataggttgaagaataaacactaaacacatatacctatggcatttatcactctttctcaaataaacctttagcccaaaataaccaagaaaatttttttaactttttcttttcttgagcctttttgctcataatttttctcttttattccgagtacgtccctgtcgtcaagactgtttccagggattcggcacccattattttgctcacatcgaatacgtccttgtcttcaagactgtttccaaggattcggtattcatttttttcatatttttattctctttttcacaatgagcaattaaagctatttgaggaataacatgtcaataaagcatatatatagggcatttaaaaatcaaaccatatgctagcatcaacattgcatatttgcttaattcaagtagaatttaagtgtcatgcatcatctcccttaaaagcaaaatctaaatctcatgaaaagactagaatacatacaagctatgctagagacaaataaaccttcaaagtattgcgagcatgcacaagaaaataccatatgcataaacaaaactctcttttctcaatttttctcattgtcatattgttgcttgataaaaccatgaggtacaaactccccctcaaaccatgccaaaaggatgaattatgcccaattcaccacgaagaaaagcaaagcgattagaatccaaaggtttagtgaaaatatcagcaatttgcaaatttgtgtccaaaaactgcaattcaacatctcccttctcaacatgatccctcaaaaagtgaaaacgaatatcaatgtgctttgtgcgtgagtgttgtacaggattcttagcaatattgatagcactagtattatcacaaaagagatgtactttctcaaaagtaagaccataatcattcaaagtagataaaagccaaagcatctgtgacagcgacgatcagcagccacatatgtagatccagcagttgcttgagcaccctgagattgtttcctagaagaccatgcaatcaatgatgtaccaagaaaatgacatgttccactagtacttttcctatcaattctacaaccaccaaaatcagcatcggaatatccactcaagcatatagaagatgaagtagaataccaaattccaaactcaagtgtatgattcaaatacctcattattcgcttgaccgcttgacgatgtgaagcacgaggagaagcttgaaagcgtgcacgcaaacacacagcaaactgtatgtctggcctagaagcagttagatacaacaaagatccaatcatacttctatattccttttgatcaacagctttaccatcttcatcaggatccaacacagctgtagaaccaattggtgttgaaattggcttgcaattctccatcttgaaccgtctcaaaagatccttggtatacttcgtttgatgcacaaaagtaccttgaggtgtttgcttaatttgcaatcccaaaaagtacgataactcacccatcatgctcatttcaaattccctgcgcatagtctcagcaaaatctacaaccaaagcgtgaattgaacaaccaaagatgatatcatccacataaatctgaacgaacagttgattatcaccatgcttaagaacaaaaagcgttttgtcaaactttcccattgtaaaacctttcgcaagcaaaaagttcttaagtctatcataccatgccctaggagcttgtttcaaaccataaaaagctttagacaatttaaaaacatggttgggaaaatcaggattttcaaaacctggtggttgtttgatataaacttcctcctgtataaaaccatttagaaaagcacttttcacatccatttgatacaatttaaaaccttttgaagcagcaaaagccaacaaatgtctaattgcctcaattctagcaacaggagcaaaagtttcatcaaaatccaaaccctcaacttgagtaaaaccttgagcaacaagtctagctttatttctcacaatcaaaccatcctcattttgtttatttttgaaaacccacttggttccaataatattatgtccaaactttgtttcaactaaagtccaaactttgtttctctcaaaattttcaagttcttcatgcatggcgttaatccacgattcatcagttaatgcatgtgacacatctttggattcaaaagaagcaacaaatgcagaatttgcacaaacatcatgagtcgttaccttagatcttgtagtccgctcacctatattaccaataatttgttccggtggatgtcgtcgttgaatgtgcaaaggagtagtgacgtctgaagttgatccacgttctgtaccagtactggttgaagttgaagtctttggaggtccatctcgatcagcatcaacagtaccagaactcgacgaacctggccggtctgaccgctcctcctgaaccggtctgaccggaggtgtgccagcggtctgaccggcctggcgcccggtctgaccagccgagccgacctcatcatcgtcgtcgtagtatctcttgtcttcaaaaatacgaccatcctccccctgaacctgtgacagtgtacctgcaatatcgggtctagtacctggactagcctcattaaaagaaacttcgcaagtcgcaagtctcgatcactgccggtctgaccagcatgcacagcccggtctgaccggtcacataaaataataaatcctgcgatcacctgtgaaaccaatcatctccaaaaccactttgtgaataaatttcaaataacaaaaccaataatctccaatgcccaattgttcatcacagaataataatcaaaaacacctttgattttacaccgttgtgtcgtcctgcgtccctaccgccgcctcccgtcgccggctagtccatagccctagtgggaaatgagaagaggtgtaagggaagaaagagaaggtgctagtagaggctgacatgtggctccctttgttattttggagatggtaatagagattgttggagtgagaatctagtttgactacccaaatcagttggcaagttggctatatgggtatttggagagtctaatttggataagttgttggagatgctctaaggtgatagagggcaggataggtgagggacgttcttagaaagagaacttactcaccgccctctcatcccatcatcacccccaaatccatccacctcctccaccgccactgcctctagagagagggaggcctcccatggcccctcccaataggggtgggcacaaaaaaacaagaccgaagaccgataccgaaaaaaccgagaccgagaccaaagaaaccgatctatcggtcatcggtctcctgatcggtcatgtgttccaaaagaccgatcttttttttcaggcttctgtattattcctcggttacccgatcagaccgatcttggtcttgggccaatactatcagcccacctactcaacgagaggttgagcccaacaagtctaccacaatagtccatttatcttcttttgcatgtattatatctaataatatatattatttatttattgtgagtagttaaacgtgcacgcaaacaaatatagaacaattcaactctgtactgcacggaattatcaaaatcctagaaataacaaaatcgtgtaagtaggtaaaagtagcaactatattttacccaatcaactcaaattgaaatataaaagttatagccaacatgcatgacataattgtgcatgacataattgtcgaaacatgaattcggcaataataaaagggggtaacgcacgagacctaaaagtggatggatgcggagacaaaggatttagacaggttcaggccctctcaatgagaggtaataccctactcctgtttgacgatcaggttgtctcatgccccctagagggcctcctgcccaccttatatagggtggggggcaggattacaagatagaaaccttaaccaatacggtatcggtttcctaaatctactttacaatattatcaaaccaggactttaggccggtccgtaacatacaaggaaacgtaatacccaagtcatgatctgttacatattccatagatataagttatcccctatagccagtcggataactatgccatgtgggtatggggtacccataatctgcacagtagcccctgagaccttcacagtcgaaaagataatcttctctcgaactagattactccaaagctgagtgcttcaatcatcttcgccatggtctccgaagtacttttaccaaatatgaagactgtggagggctgaaaaataaagtcaggtgcatcgactagatgcacctaataggtgtagcccccgactatgtggttaattgaacaaaccaagcatatagtcaaggaataaataatccaaccaaccgagtggttttaataattatagtcaaccaagcgacctgatattaatatgtagcatatgcggtgtgaatccctgaataacatgatccgagtgatataccgaccgctttgtaaaatatgatgagtgtaacctaaagttggttacatcattgaaaattcacatagcaaaacagctataaagaagcttgtatgttgtgaataaataaatttccaaagtattgggcatacgctatgcgcacactgctttaacagacgtgctttagtccctaaaagacacatggtttcaccacagctggaaatatatggcatatgtggtgtaaaatccgagtgaataaactcataaaggatttaccaaccgcctagaaaatgaccacaatatataatcagcctaagccataatattggtcaataaaaatgcacacttacgtggcgaaaagcaatgatattgtatccaatcaattgcttaaaaacccaaacagcaccttgacttatatataaaaaagtcagcgggacagctatataaagctttactgtttgacaccttttaagatgcattgtaccaactcctaaaaagttaagtaactgcggtataaaaggattttaaggtattggacacttgatcacgcgcactttggcctaagcaaaaagtgcctaagtccctaaaagaacgtgacaggccacacctgaaaatatgggctgcagacatattaggcctaggccaaaaaatatgccttcgacaccctttaaaggatgacgcatgtaacatgcttccgagtaataaatcttccgggtaatatagaccaagtgtagctcatatgaatagcttctgatctgaatgattatcccttatgggatactccaaagtaggtgtaacaattgaatcccgactggcgcaagtattcggttgatagcccttacggggaataataattggtccagtctttgagcatagaaaatagactcatgactatgaatccatgtggaatgtatccggaacaagtccaaattggagatataatcctcacgcttgagttgatgagcccctgagcatatagcttgtccttctgtcgtagtcacaatcgtccattgatggtagctgacgcagttggcatatagacaagacgaccaatatagagataatattgcccaccagaggtggcaacaatactggtggtagtgaagatagtgataccaatctaaagtaatgaagtcgcatagccatggaggcgaagaaaccagtcggcggcagacagatcaactaacaatgaagatgaaggaacccagcgataaaattgtgtagccatggcagcaaaataatcagtcggtgacagacgaggtagatcaaaggtgatgacaaaatccaccaatcatgaagatgaagaaaataattgacgacgacaaacgcaaccgacatgatgaagaagacgatgtcggtgatccagccaatagcagtgtagcaaccaatgataatgacaaagacgctcatcagcatttgcatagtaggtcaaccgtgaaggtgaaataataagtcggcgaaaacataatcatccattagcaacagcggagatgtcagggtcgatgaagcagaggtgctggtgatgatgtcagtgacaataatccatcaaattaatgttatagctgttgtagatgcttcacttggaggagagttgatgttgttgtccaactcgttcaaaccgaaatatttgaagttgttgaagtagaatgtctgttccgaagcaaagatgaagataatgactcctggagttgactcattggcttatataaaatttgtcaaattttgagccttatatttgtgtagcccccgactctttggttagttgggaaacaactgaacatagagtcgagaattatagcttcttgtcgtcgagtagtcattgcttgattgaagatatgtgttgaagatgtccaagtagaaatcctgaatattggagagccacttgttgtagtaaaataacacggcatcgcatgccgagatgtcgagattcacaacaacgtcatggttggtgatgtagcaaaacttgtgaagtagcagcaatagagtttgctggttccgaagataataaagatgaagtcgctccaccatgatgacaaagttgtgttgccatgatgaagtgaaccggtagtgaagacgcgcagttgtgaagataaaagcaccagtcggcggcggcataacacgagtcggcggcggaagacgatgatgtccatcagtagtggtagctgtataaaccagatgtagaggcgagggcactagtcagcagcagacgagacgaccggcgatgaagatggtaaggccaatcaacactggcagaatcatgcagccatggaagtgaagaaaccagtcggcagccatggcaaacgtaggcagcttgtgttgaagatactgatgcctattagtagtgacagcgatgtagccagccgtgaagaagatagcatcagttggcgttataacaggccagccgtgcaggcggtgacaccagtcagcggcggatgcggcggccggtcggtgaacacgtagacgcccaacaacggcggcataaaggccagccgtgcaggcggaaacaccagtcggcggcggcgaaggcaagccggtcggtgaagacgtagacgcccaacaacggcggcataataggccagccgtgcaggcggaaacaccagtcggcggcggcgaaggcaagccggtcggtgaagacgtagacgcccaacaacggcagcataataggccagccgtgcaggcggaaacaccaatcggcggcggtcgaggcggctggtcggtgaagacgtagacgcccaacaacggcggcataataggccagccgtgcaagcggaaaacaccaatcggcggcggtcgaggcggctggtcggtgaagacgtagacgcccaacaacggcggcataataggccagccgtgcaagcggaaacaccaatcggcggcggtcgaggcggccggtcggtgaagacgtagacgcccaacaacggcggcataaaggccagccgtgcaggcggaaacaccagtcggcagcggcgaagacaagccggtcggtgaagacgtagacgcccaacaacggcggcataaaggccagccgtgcaggcggaaacaccagtcggcggcggcgaaggcaagccggtcggtgaagacgtagacgcccaacaacggcggcataataggccagccgtgcaggcggaaacaccagtcggcggcggcgaaggcaagccggtcggtgaagacgtagacgcccaacaacggcggcataataggccagccgtgcaggcggaaacactagtcggcggcggtcgaggtaagccggtggtgatgttctgactgatccattcctggagcgtaagagataagcttaaagccatgaatcccttttatgcatatctggatctggattctgcagaacaaacatataggatgagtagtatctgatataaatataatactcgagaaaaaatcaagtattttaaaatatttataaatatgtatttctcctcttgtcaattttgatttccccgagcagataattcattacgtttaaacgctctgtccgactagtcatagcccccaagcaccgggagtcggcctaggcacttcccagacatgcatatgagtgacatgagttcgccattaatggaacaaagtttcacgaatcagaatttactactcgggtacttttgcaattattaagagcagaaaataaatttatctcatctctatgcttttgatttattccgaataatacttagcaccttgcgttactcggtccatccaacgagcccccgggtgctaggaatcggcccaaaggcaaccatccattggcaaaccaaacggaaagcataggaagatagaactccataactcgataggtacttttgtactcagattatgtcgcaagcaatcaagataaatattatgaaaattgtttaaaaaatacgatataacatctatagcccccgactcactagtcaacgacgaaccagttgatgtagtgaggcaaaggaaaagacaaaatatcatataaagaataaaataaatgatgacttagctttgtcgtattccctcgatgacagcagaagtagccgatgtgggaataaagcagtccatcaatggtgacaaaaacaccagtcggcgccagtgaaaccaagccagtggtgtagatgatgaagcccattaacggcggcgaagtccaccaaccgtataggcgaaaacaccagtcagtggcggcagaggcaggccggcggtgaagtcgtagacgcccaacagcggcggcataataggccagccgtgtaggcggaggcaccactcggcggcgacggaggcaggccggcggtgaagtcgtagacgcccaacagcagcggcataataggccagccgtgtaggcggaggcaccactcggcggcgacggaggcaggccggcggtgaagtcgtagacgcccaacagcagcggcataataggccagccgtgtaggcggaggcaccactcggcggcgacggaggcaggccggcggtgaagtcgtagacgcccaacagcggcggcataataggccagccgtgtaggcggaggcaccactcggcggcgacggaggcaggccggcggtgaagtcgtagacgcccaacagcggcggcataataggccagccgtgtaggcggaggcaccactcggcggcgacggaggcaggccggcggtgaagtcgtagacgcccaacagcggcggcataataggccagccgtgtaggcggaggcaccactcggcggcgacggaggcaggccggcggtgaagtcgtagacgcccaacagcggcggcataataggccagccgtgtagacggaggatccactcggcggcgacggagacaggccggcggtgaagacgtagacgcccaacagcagcggaataataggccagccgtgtaggcggaggcaccagtcggcggcgacggaggcaggccggtggtgaagacgtagacgcccaacaacggtggtgtgaccaaccaaccatataggcggaggcaccagtcggcggcgaagtcgtagacgcccaacagcagcggcataataggccagccgtgtaggcggaggcaccagtcggcggcgacggaggcaggccggtggtgaagacgtagacgcccaaaaacggtggtgtgaccaaccaaccatataggccagccgtgtagacggaggcaccaatcggcggcgacggaggcaggccggcggtgaagacgtagacgcccaacagcagcggcataataggccagccgtgtaggcggaggcaccactcggcggcgacggaggcaagccggcggtgaagtcgtagacgcccaacagcagcggcataataggccagccgtgtaggcggaggcaccactcggcggcgacggaggcaggccggcggtgtagatgacgatgcccatcaacggtggtgtgaccaaccgaccgtgtaggcggggacaccagtcggcggcgacggaggcaggccggcggtgtagatgacgatgcccatcaacggtggtgtgaccaaccgaccgtgtaggcggggacaccagtcggcggcgacggaggcaggccggcggtgtagatgacgatgcccatcaacggtggtgtgaccaaccgaccgtgtaggcggggacaccagtcggcggcgacggaggcaggccggcggtgtagatgacgatgcccatcaacggtggtgtgaccaaccgaccgtgtaggcggggacaccagtcggcggcgacggaggcaggccggcggtgtagatgacgatgcccatcaacggtggtgtgaccaaccgaccgtataggcgaggacaccagtcggcggtgacggaggcaggccggtggtgaagtcgtagacgcccaacagcggcggcataatagaccagccgtgcaggcggaaacaccagtcggcggcggcgaaggccagccggtcggtgaagacatggacgcccatgaacggtggtgtgaccgaccaaccgtataggcgatgacaccagtcggcggcgacggaggcaggccggtggtgaagtcgttgttgctatcagcaatggcggtggcgaggacaagccggcggagtggactcgcggccgatcgaccggaaagctgagacgcctcgagtccatgaccagcatcaatcgcctcaatagtgccgcgtagttatatgcgaacaacaacaaaaaatagcaagaaattaatctgagattaaaaatcaatatgataaataatgataaaaatcagattgagtttccccctgactgatttggatcaagtcagagaagaggagcttgaagaagtggtcgacggaaaggaagcgaaaactcccaaagcgaaagcgaagtcggcgactcatgaaattgattccatcgcgctcgttgataggaaactcgacgcaatccctacctggcgcgccaactgtcgaaacatgaattcggcaataataaaagggggtaacgcacgagacctaaaagtggatggatgcggagacaaaggatttagacaggttcaggccctctcaatgagaggtaataccctactcctgtttggggatttgaatccgccgagtgtgtattgatctgacgatcaggttgtctcataccccctagagggcctcctgcccaccttatatagggtggggggcaggattacaagatagaaaccttaaccaatacggtatcggtttcctaaatctactttacaatattatcaaaccaggactttaggccgttccgtaacatacaaggaaacgtaatacccaagtcatgatctgttacatattccatagatataagttatcccctatagccagtcggataactatgccatgtgggtatggggtacccataatctccacaataatataaatggttcacacattataatcagggtttagatggagaaaacaaacagatagagtaatgggccggtctttttgttcgttccttcctgttgtttccttttcttttcctttatttttttcttttctttttttttatatggtaaggctataatggtcatttcatttgtattgttgcatgcaagaataacttggcatgctcatgtggcattttttgtgggtccaaggactatattaacccaaatgattaatttggaggacttatttggacgttttgaaaccttaaggactaaattaagcccgaagcgaaactttagataccgtattagctattctcccaaaaataaaagggggaagttgtgctctcaatgctacatcacgaacacactgtatgtagtgcctaacatggcctggctacttcttccaccattcaacagcattcgtcttctcatgcttgtactgccacttaccataccatatgcttctggttccatcccgcgtgacggtggtagcagcagcaatggcaccggcgacgacctgtccgcgctgctggctttcaaagcgcggctgtccgatcctctcggagtccttgccggcaactggacaaccaaggtgtccatgtgccgctgggtcggcgtgtcgtgcagccggcggcggccgcgggtcgtcgggttgaagctgtgggacgttcctctgcaaggagagctcacgcctcacctcggtaacctctctttcctccgtgtcctcaacctcggtggcataaacctcactggccccatcccagctgatcttgggaggctgcatcgtcttaggattctccgtcttgcccacaatactatgtcagatactattccctctgcactagggaaccttacaaagcttgagattctaaatctctatggcaaccacatctcagggcacataccagccgagctgcaaaatctacatagccttaggcaaatggttctcacgagcaattacctgagtggtccggtaccagagtatctattcaacgccacacaccttgggtaaccgagatacacctcgggctgaatagtttgtcaggttccataccagactgtgttggctccttgcccatgcttcgtgttcttgcgttgccagacaatcagctctctggtccagtgcctcctgccattttcaacatgtctagccttgaagccatacttatatggaagaacaatctgactggccctatacctactaaccggagctttaatctccctatgttgcaagacatagaactagacacgaataaattcacaggactaatcccgtcagggcttgcttcatgccagaatcttgagacaatttctctgtcagaaaatcttttttcaggtgtcgtgccgccatggctggctaagatgtcacgtctcactttactctttttggatggcaatgagctcgttggtacaatcccgagtctgttgggaaatctccccatgctcagtgagcttgacctctcagactccaacctaagcggccacattccggtggagctgggaacactgacaaaacttacgtatctcgatctttcatttaaccagctcaacggcgcctttccagcttttgttggaaacttctctgaattgacattcttgggattgggatataaccagctgacagggcctgtaccatcaacgtttggaaacatcaggcctctcgttgaaattaaaattggaggcaatcacctccaaggggatctcagcttcctgtctagcctttgtaactgtcgccaacttcagtacctcttgatatcacataactctttcaccgggtctctcccaaactatgttggaaacctctcaactgaactcttaggattcgaaggagacgacaaccacttaactggtggccttccagctacactgtcaaaccttactaatctgcgagcgctaaatttgtcatacaaccaactcagtgattccataccagcttccctcatgaagttggagaatttgcagggacttgatcttacctcgaatggaatatctggtcctatcactgaagagattggtacggcaagatttgtatggttgtacctgaccgataataagctctcaggttccatacctgatagcattggtaatctcaccatgctacaatacatttctctatctgataacaagttgtcatcgactatcccaacaagtttattttatcttggtatcgtgcagctctttctctccaataataacctcaatggtacattaccatctgatctcagccacatccaagatatgtttgccctagatacttcagacaatttattagttggtcagctcccaaattcatttggataccatcagatgttagcctacctaaacctgtctcacaactcattcacagattcaatcccgaactctattagccatctgaccagcttagaagtattggacctttcttataacaatctttcaggcactatacctaagtacttagcaaactttacctacctcactactctgaacctctcttctaacaacctaaaaggcgaaataccaaatggtggtgttttctcaaatataaccttgatatctttgatgggcaatgctgccttgtgtggtcttcctcgtctaggatttttaccatgcctagacaagtcacactcaactaatggtagccactacctgaagtttatactccctgccatcacaatagcagttggcgcacttgctctttgtttgtaccaaatgactagaaagaagattaaaaggaagctagatactactacacctacttcttataggttagtatcatatcaagagattgttcgtgccacggaaagtttcaatgaggataatatgttgggagctggaagttttggcaaggtttacaagggtcatttggatgatggaatggtggttgcggttaaagttctaaacatgcaggtagaacaagctatgagaagctttgatgttgagtgccaggttctacgcatggttcagcatcgcaacttgataaggatactaaacatatgctccaacacagacttcagagcactgctgcttcagtacatgcccaatggcagcttggagacatacctgcacaagcaagggcaccctccactaggattcctaaagagacttgacattatgctggacgtatcaatggcaatggagcaccttcactatcatcattctgaagttgttttgcactgtgacctcaagcctagcaatgtgctgtttgatgaggaaatcacggcacatgtggcggactttggcattgcaaaattactgttaggtgatgacaactctgcagtttcagccagcatgcccgggacaataggatacatggctccaggtacttgcacttactattcatgagaattttgctttaccatttgagttatgtaagagacttaatttagtttatctctttctttcttttaaaaatcattcattgaacagaatatgcatttatgggaaaagcatcacgaaagagcgatgtgttcagctatgggatcatgttgctcgaagtcttcaccgggaagaggcctacggatgccatgtttgttggtgacatgagccttaggaagtgggtttctgaagcatttccagccaggctcgcagatattgtggatggtaggcttctacaggctgaaacattaatagaacaaggtgttcgtcagaacaatgctacctccttgccgcgttctgctacctggccaaatgaaggccttcttttgccaattttcgagcttggcttgatgtgttgcagtagctcacctgcagaacggatgggaataagtgatgtggtcgtgaagctcaagagcatcaggaaggattatttctcttttacaggagcaatataaaattagcatttgagtgcattttgtttatctattatatgtggacactatctcactagctactagccacaattattctcaagtaagactcattcgagcctaaagtactgtatcgacatataaatgaagagaatttttaccgtccagcaggtggaggcggtaccaaatgcgtccaatgggacagatctaatggctgaaaatcgtcggtatcgtgaggtaccgtaaatcctgtgcgatggtacctcttctctgtctgcatgaattgagcaggtggaagggtagaaccggattttcaacttaaatttggagttgattttgagggtttttttatcgtagtttatttttcagtctttgcttttacatcgctatgacacacatataaataaaagttttatttataaattatttttcgtttgcaaatatatcgtttcgcttattcgaaacgatggtcctgagtttttttcgaatgtgaaactagattactttctactacaaataaagagcatcttagttttttttcgaaaactatactttgatctaatttctttgtaatgttatcaataactacaaaattagtataacatgaaagtatataatgatatgatatgcatgacagtaagcatataaaataaactagaagtagaataaaaaaaccgtttgttcgtcccacttgcatcagtacttctcgtagtaatattgatttgttaccttaacttaggtggtgtttggatccagggagtaaactttaatccctgtcacattgaatgtttgaacactaatttgaagtattaaacatagactacttacaaaactaattacacagatagaggctaatttgcgagacgaatctattaagcctaattatgccatgatttgacaatatagtggtacaataaatgtgtgctaatcatggattaattagtcttaatagattcatctcgcaaattagtctctatctgtgtaattaatttttttaaataatctatgtttaatacttcaaattagtgttcaaacatccgatgtgatagggactaaattttagtctctagatccaaacaccacctaaggtacagagcatgtcgttttaaacacgcatgttttaagtcaaaccccgactgattgctaccttttcatatgtacatggaccaacactagaggagccaaggcatgccaacctcatcatcattaattaatttttgctactgagtgaatcggtacaattaagcatcaactgcaagagtttactatcgaatctctgcttcatcaatcaataataagattgccgttgattatacaaccgtcgttgttgatttggacaagagaaatctattatttgtgcgggcctcatcagtacagcagcagtggtcgttcgactcgccgtcgcacaggcctccgttgaaccccttgatttggcagtcactcatgcacttgttcatatcgcaatttacaaggaccatgcacgaatccatttctccatatccacctatatatatatatgcacatgtaaaatacatatttttagaggaaaaatcattatattgttaatgaccccgacttttacagagagccgaaatagttcatacagaaaatgtaaaatgcatatatacttgtcaggctatatatcagattattccagcatcattgatcactaatcatttcatgcaaaagagaacaaattaaactgtttttgcatttggatgtgatcaatcgagaggtgtatatatatatatatgtataccttgtgtagtatgaccggatgagaaatttacggtggccatcaccataagagatgtgaagaagaacactgctgcagccttcttgttgagaatttgcgccatgatgagatgagatgagaggagatccttttgacaaggaagctactgcatatgctggctactacctggcccctagcttcattttgcagctgtttatatagagtcacaagagcaaatcttggatgattcattagtaaattacctccattattatgcattaatgacgtgtgtgaggtttcattaatgaccgtttctcaaatttattgcatgagcatatcgtttcaattaattttgtttctatatcattttacctatgtcgtcgtttagtgtccacctctacaaaatattccattgttcaaacaggcctaaatgtacgttgagtcattcgaatgaaacaaaagcccattacaaacataggcccatgggctataaagcatgtcaggctaccagagaagtccacgacaaaggcccaatgtttacaagcaaaccacattcctttttcaggtcagaatattcctttttttttttgtttcagccagaaataagaaaatacaaggagcacatcatctactttcattttcatgatggaaatttattgaccagcagttcaatcacatttttacaccaactataaattgttgcagaacctgaagcaccatagatatattcaattcaaccgtaaacacatagaagcaaagggtaattgatcactgggtatacactgatgctacctaatacagaagaagaaatggatgcaaaggatatatatatttcattctctcatataccacgagagagcgatgaatcactgcgagaaatccccaggtccagatggctacaccgcccttttctaccaaaaatgttggggagtgatcaaagaggatcttcttgcagcactaaagaaattttgtgaagggaacacccaaaacctagaaatgctgaactcggcaataatcactctcatccccaaaaaagaggcccccacgttgttgaaggacttcaggccaatcagtctaatccacagtttctcaaagcttgcaaccaaaattatggcgcaaaggttggctccaaggatggaggagctagtgccacacacgcaaacggccttcataaaggggagatgcattcatgagaattttatttttgttaaaggtctatcgcaacaattccaccgccagcgcaaagagatgattttgttcaagttggatatttcaaaagcatttgatactgtctcctggtgctttcttctcgacatgttgaaattcagaggatttggccccctttggagatcttggctcgctgcgcttttcctgacagctgagacaagaattctaatcaatgggagtgaatctgacccaataaagcctgcaagaggtttgaggcaaggagacccgctatcgcctcttctcttcgtcttagttatggacacgcttcaggcaatgatggcgaaagcaagggcaagaaatctgttatctgagctgaatgctagaaaaagattgcccaacatatctgtatatgcagatgatgctgtcctcttcttccgtccaattcaacaggaagcacaggtgatcagcagaatcctagaagtgttcggggcgacaacagggttgaaaacaaatctcgctaaatgcacaatcacacccatccaatgtaacgtacagcagctggaggtagtaacagaaatcctgcaatgtagagttgagcacttccccataacatacttgggcctgcccctcgccatgaggaagccaaccaaggcagaaatccaaccaatccttgacagattggcgaagaagattgctggctggaaaccccggttgctatcacctgacggccggctttgcctcatcaaatccactctaatggccctccctgtgcatctcatgtcagtgttacagctacctaaatgggcgatcaaagatattgagcgcaagtgtagaggttttctctggaaagggcaggaggatgtaagtggaggccattgtctagttgcttggaaaaatgtatgtatgccggttcaaaatggtggtcttgggataaaaaatctggattactttggccaggcccttcggctgaagtggcatgctattaaacttgaacagaaaaacaggccgtggacaatggttgattaccaactaggaaaggaggtggatactctgtttcaatctgcagcagagttcattgttggtaatgggaagaacaccaggttctggacagcaaattggctgggtggggggagcatcgcctggagatggcctattctagcaacttatgtaggcagatcacatctcacagttgctcaagctctatcgaatcacagatgggtcagagatttgcaaggctccctttccaacgaagctatggcccaatatttccagctctgggatgaaattcagagatttcacctaagtcacgaagaagacacaatccgatggaaattatccaccaatggtcatttcagctgctcctcagcctacagtgtattcttcttggcaaaagaactctgcccaatcagcgaattaatctggcaagcgaaggcaccggcaagaatacgtttcttcatgtagctggccgtaaaaggacgttgtctgacagctgataatcttgaaaaaaggggatggcctcacgctgattgctgtactttgtgccaacgagaacctgaaaactgcttacatctgtttatcaactgcgactataccatcacagtgtggagacagatgcggcaatggatcagtgcttacttccccatccctgggagcgaaaacacatgcctgacagagtggtggttgcaggccagaacatgttttcggaagtgctacaggacaaacttcgacagcgcttgtatgctgatttgctggcagatttggaaggaaagaaatgcgcgtgttttcgaccaaagatcgagaagccctaaccagttagcagaggctatcaaagaagagatcttagtgtggaaagaagcaggctatttcgcgaattgcagttcttagttttctttctgttgtgttgacgtttccagttctttagtttgccgggctgtggttcctgccacagtctaattcgacagcctcctgtcgttgcaagcgagaactacttgtatttgattttttttccctcccaatcttaatgaaatttggtcgccggttccttcggccgacccggcaaaaaatcactgctgcacaacgctcactgtggttgccatcaatttgacatagtccttcctaatcttcttcagtgtcacgaccacatcactcatcgccatcctttgctctggggagtgagccgaacagagcaaacccagctcgaacactggcacaaggaagccatgcatgttacttgaagaagaagaagaaccattctgtagaagttggcagtccaccacatggacaagctctgcaggaaacgcctgttgaacccactgcctgatgttcagttctcccacaaacatagcatctgtgggtcttttcgcagtgaacacttcaagcagcatgatgccgtaactgaacacatcactcttccgtgacgcttttcctagagtcccatactctgctcaagaaaaattagataccaaaaattagttgcaccctatctactcaataataataaaagatcgggcaaagtttgagaaagacaagaaaaactattaagtacctggtgccatgtacccaactgttcctggcatgctagctgagatcatggagttgtcatcacctaacaacaaccttgcaataccaaagtctgccacatgtgccgtcatatcatcgtcaaatagtacgttgctaggcttcaaatcgcagtgtaagaccacctcatagtgctcatgatgcaggtattccattgccattgacacatctagcataatatccaacctctcgagaaagcctaattgcttcccttgttctgagtgcaggagtgcttctaagctacccttgggcatgtactgaagtaccagtgctttaaagtccaggttggaacaagtgttcagaatctttatcaggttgcgatgtcgagccattcggagcacgtgacacttggtgtcaaagcttctcatggcatgttccagatgctggtgtataacttttatggcaaccaccataccgttgctcaattgtcccctaaaaacttttccaaagcttccgaagcccaacatgttatcatcactgaaatcatcggttgcacgaagctcatgataggagagcaattgatggctgataaggtcaggcttaccagcagaagtattttgatggttagctttctttctaatcattacatacaggcaacaagctacaactccaactacaatgattatagtaggtagcaagtattttagcatatgaccattatttctgttgggggaggtggtttggcatggtgggaatcctaaacgggcagcaccacatagccctgagttccccaccaagtattgtaaagtgatgtttgcaaagacacctccttccggtatttgaccatgtagtttgttgaaagataggttcaagctaacaagggtcgtaaaattagccaagtagtttgggatggtaccagaaatactgttatgggatatgtccaaagtttgcaagccagttaaattaccaaaagagtctggaacagaatcatagaatccgttagctgatagattcaggtgtgttaacatctgaagttgtcctgtcgaatatgggattctaccagaaaagtggttgtcagagagatccatgatggtaatttgcttcaaataccctacatcaaccggcagtgcaccactcaagaagtttcgagaaagatctagcctgacgattttatcaagatgaaataagcttggtggtatagttgacgttaatttgttatcagacaatagaaggtgctctagattagtgaggttcctcatgtcctttggtatggagccagaaatttcgttgctttcaaggaacagttttacaatgttccttagaagtgcagtactcgatgggatgaagccagacaagctatttccacttaggtcaagccattggagattctcaatcgtcatgattgattctggaattgcattgcgcagttggttatgtgaaagatctatcacctcaagagcagttaaatttgaaatggtagctggaagcgtgccagttaacttgttgttagataacgtgaaccatttcagctgtgacgacaggttcccaacatagtctgggaggattccggtgatataattcaggtccatttgaagggtagaaagctttctacaattggaaacagtagaaaggaagttgagatcgccgtgtagattgtttttagtaacatcaactgccgttagtgagttcatgctatcaactgtcgatagtaatgatccatccagcaagtttcctttcagtagcaggattgccaacgatgaaaggttgccaagagaagcaggaataggtcctgttagttgattcatcgcaagatgcaaccatgaaagttggcctaggtgcccaatatctgtagggatgtttcctgttaggttgcacgtcgtcaaatctaagactgtcagcatggtgaggttgctaagtttagttgggatggggccagcatcaaagttattcccacccaaggagatggcatcaagattggtcaacctgcccagccatggtggcaaaacaccctcgaataaattataaggcatggcaataacttggaggtatggacacgctgtgagccccagtggaatctgaccaaagaaattgtttttactgatggcgaaccatcgtagaactgggaggctgaaacttgtattaccagggatagggccagttaaaccattcgatataagagaaatggtacttaatttagacatgttgaagatggctggtggcaccgccccagttaagttattggcctgcaagttaaggtgttggaggattggcatggaaccgatgcaacccggtatcagtcctgacaggctattgttaccaacgttgagataagttagcaaaggcgtgttgttgaacagatcgtccggaatcgatccagtgagttaattgtgacagagattcatgctgtcaagactgtacagcccctgcagctctgccgggattggaccgtatagctggttaaactgtagattaagtagctaaagcctcgtgaggttccctatggcgattgggatgccacctgacatggcattgtggccgagatcaaggagctcgaggcgacgcagccttcctatttcgttgggcaccgagccagtgaggctggtgttggtgaggttgaggatgaagagaaaagaaatgttaccaaggtgagagctgagctctccttggagaggaacgtttggcagttccagggcggtgacgcgctgccggcgccggcggtggctactgcacgagacacgcacccaccggcagaacggcgttccggtggtccaattgccggcaaggatgttgttagaatcggagagctgggctttgaaggccagcaatgcagcgaggtcggtttcgctgccgttactcttgctcgcgatcggacctggagaggaagcacaaggcacagtactggacgaagcgatcaacaacgccgcaacgaaaatccatactggcaatcgaacaagcgccatgtctggttgtgtgtgatgcattggcagcaagagtatgcatcatacttcacagtgacgatcaagttgagctttgtttagcacagtagtgctagtttgctttcgacatgtaggacgaccttgactgttgctctcagaaagcgaaagaaacttaaatgatactccttccggtcataaatatttgacagcactactaggtaaacgctgaaaaataaagacatcacaaaatatatattcagcagatcgcggtgtgcacgacacgctagatatgatagctgtgtcgctccgtcatcagccatacgctcactgattttttttttctgtcaaacaatttgacggcaacggccttacgtactcttttgttgattgggtggttagatcggcaacgattgtatagttttagcaagtttaatagtatagcccgctactagctccaaatcatctatagctaacgtaatagataatctatctatctatctatctatctatctatcttctatctatctatctattatatactaaaagtccattaaacttcctacaaacactcctacgacgctacgtggcgttctaataaattagaaaaaatactagaaattctataaaaaaaagcaaaacatctagccattgattttcattaaaattagtgggcccgttactccaagccgttagattagattggtttattctcttactttctaaaaaacaaagaaggaatcctgccgtgcgtcatgtatgagtacctcctctccgtttcttttcctccccttcctctctttactatgttctgcaacaatacatattgaataagtatacttctaaattacatattatttatataaataagtaattacatattatttggaccaataacgatcctaggccaccacgtggcgttctagcaaattagagaaaatcctaaatctatctatctattatttatatactaaaagttcattaaactttctacgtacgctctcaagctaccacgtgagactcctatatataaacgctcctaagtcgccacatggcgctctaataatttaaataatattctgagaaaaagaaaaatatctgaccgtaaagtttatttaaagtggtgacccaatatattaaccg

SEQ ID NO: 25612 - DNA, 7732 bp, Oryza sativa
ctcgatgtggtcaggggacgcagatttgacttcccccgtgtaccgggtggcgccgcagccttcttcccccgaccacacgagatcatcaacaacaaaacaacagaaatatacaatattttttaatgcaatagggatgcatagttctttggatatccaaactgcatgtctgggctctaacgcattgccaagaagatggtaacattatttttgcagacaatcggtttgagatttagcgctggttcagtttgttgccaaaactagcattaccaaaatttggtattgtccaattctggcacaatttagagttaccaaattttattaacgttggatatgttcaatttgtagccatgttaaaatttagtagctagtgcttgtatgagaaggaacttccggaaataccaaattgtggtgaagtgacaacggcaaaatttgtttagtttgttatcttactaaaatttgataacataaaaaattaataaagttaaaattgacggcgaagtgaataagcccttatttagctttccattccgctaggcatgcgtgctgcgtaatcatttgacgcttcaacatccaagaccttgactctcagtcaacctagaaggaaaaaccagtggcagtacgatccttatcttcccatccaaaagtgggtttgagcgacaattattaggcggctttccactctacttaggcattgtgtagttctaaatttttttttctaaaaatatcacatcgaatttattagccgcctgccacagtcgctcctggtgtcgcctgtccgccgacgctcgttcggtgagggagagagagaggagagaagaaagagggagaggagagtaggagacagaaagagaaagagggagagttaaaataattatgagaggaggagagagaggggaaaaaattgaagcagtgggagggaaaagagagtggagggaaaaaatgaatggagggaaattatgagaggagagagggcaaaaataaattttgaattgaattttatgatactaaatgaactcatatgaaaaagttgtcaaaaaaagtttatatatctcatcaagatttataacttttattttggcatttttctatataacattttttgaacagtttgaatttgaatttaaaaatatgacaactccaaacaatattttcaaatattaaatgattttaacttaaaaaattcatcaacaacaaagttgtatacctcatcaagatctattacttttatttgggtatttttctatataacaattttttgaacaatttgaatttgaatatgaaaatatgacaacttcaaacaatattttcaaataataaatgattttaactgaaaaagtcatcaacaacaaagttgtataattcatcaagatctataacttttattttggtcatttcttcatccgacaaagtgatagtaacattgttcacaaaattcacatatctctcatttggttttataaactataacatagatatgtaaattttgtgaacaatattactaacattttatcggatgaagaaatgataaaaataaaagttatagatcttgatgagttatacaactttgttgttgatgacttttttagttgaaattatttagtatttgaaaatattgtttgaagttatcgtattttcaaattcaaattcaaattcaaactattcaaaaaaatttatataagaaatgaccaaaataaaagttatatatcttgatgagttatataactttgtcgttgatgacttttttagttgaaattatttagtatttgaaaatgttgttttgaagttgtcatattttcaaattcaaattcaaactgttcaaaaaaagttgtatagaaaaatgaccaaaataaaagttgtaaatcttgataagttatacaactttgttgttgataattttttcattttaaataatttattacacgaaaaattattttgactaataaaacgaattattatactgcagttaattattttgctacaggtcaactcacaaatataaacatttcatatgaaaaatggaaaaaatgtcatcaataacggccattagttaaagtccgacagaggttaagtcatctcaatcgggcattaatatagagcccgtcacggatgagtcatatgcgacgggcctagttgttatatcacacggatgtgtcatatgcgacgggcctagttgttattttaatcgggccccaagttggtgcccgtcacagatgatggtcatctgtgacggacgccaacttgaagcccgattgtgatatggaatgttatctcaatcgagcctaaattatggcccgtcacggatatgtgtcatccgtgacgggtctgagttttatatccatctaatatgtctgttcgaccatatctcaatagggctttttttggcccgattgagatgactttcttgtgacgacccgttaattataggcatattagaggccgtcacatatggaagattctgtactcatggtggtttttctttttttttccactcaccctcaaataaataatctttactgcgtgaaacactacgcacgatatgtaatatttatatgcaaattgaacgttgaaaagtggtcaattcataacccttcgtcacgccgcagaaggaaaattaatagcatacaggcatgcatttacgtacttgaaataattttatgtcgattgggtggtgagtggcaatgcctgtctacccctaccgttacgcacatacctcatgttcattaatttatgccgtttccatttaacatatctctacttcctaaggaaactgactgactgacaaataggacatgcgatttttttttaatcttcagcatatgactttgacaataaatcaataaaatttaataagttctttctatggaaaatctcgacataacagttttatgattttatattaagcgttttatttttttttacgatcaataatttaaagttttgactaaaaaaagttcaaagttgatcacaagagaatcttattaccagtcgtactcgtgttctctctctctctatatatatatggccaaacaacgaaaacacagacagagacacgagcaagctaacgagtgagtgcaaattaagctagtgatcgatagtggtcatgggtgttggtcctcattgtactactagtctgctaataatactggccgtcgtcatcacgtcgtctttgctcacgacgacgatcaaggcagatgagccgagcaatgataccgacatcgccgcgctgcttgccttcaaggcacagttctctgaccctctgggtttcctccgtgacggctggagggaggacaatgcatcctgcttctgccagtggatcggcgtgtcgtgcagccgccgccggcagcgcgtcaccgccctggagctgccgggcattcccctgcaagggtcgatcacccctcacctcggtaacctctctttcctctacgtcctcaacctcgccaacaccagcctcacggggacactcccgggtgttataggaaggctgcatcgcctggagctccttgatcttggctacaatgccctgtcaggtaacatcccagccaccataggaaacctcaccaaacttgagcttcttaatctcgagtttaaccagctatctggtccaatcccagcagagctgcagggcctgcgaagccttggcagtatgaatctccgtaggaactatctcagtggcttgattcccaacagtctattcaacaacaccccattgttaggttatctcagcattggcaacaacagcttgtcagggccaataccgcacgtgatattctcgttgcacgtgctgcaggtccttgttctagagcacaatcaattgtccggctcactgcccccagccatcttcaacatgtccagacttgaaaagctgtatgccactcgaaacaatctcactggacctatcccatacccagctgaaaaccagaccttgatgaacatccccatgattcgggtgatgtgtctctctttcaacggattcataggccgaattccacctgggcttgcggcatgccggaaactccagatgcttgagttaggtgggaatctcttgacggatcatgtgccggaatggttagcgggcttgtccctgctaagcaccttggttataggtcagaatgagcttgtcggttcgatcccagttgtgctaagcaatctcaccaagctcaccgtgcttgatctgtcatcttgcaagctaagtggaatcattccattggaactaggaaagatgacacaactcaacatcttgcacctctcatttaatcgcctaactggtccttttcctacctcccttggtaacttgacaaaattatcttttctaggattagaatctaacctgctgaccggacaagtacctgagacccttgggaacctcaggtctctatactcccttggtattggaaagaatcatctacaagggaaacttcacttctttgcccttctctccaattgtagggaactccaattcctcgacataggaatgaattctttctcagggagcatttctgcgagtttactagcaaacctctctaacaacttacaatatttttatgcaaatgataacaacttaactggcagtattcctgctaccatatcaaatctgtctaacctgaatgtaataggcctttttgacaaccaaataagcggcacaattccagattctataatgctaatggataatctacaggcattggacctctctataaacaatttgtttggaccaatcccaggacaaattggtaccccaaaaggaatggtcgcattatctctcagtggcaacaatctttctagttacatccctaacggtgttggcaatctaagcacgttgcagtactgatttctgtcatataataggttgtcatcagttatacccgcaagcttagttaatcttagtaatcttctccaactagatatttctaataataacttaactggttcattgccttctgatctcagttccttcaaagtaataggcctaatggacatctcagcaaataatttggtcggtagcctcccaacttcgttgggatagctccaactgtcaagctacctgaatttatctcaaaacacattcaatgattcaattccagactctttcaaaggtctaattaatttagaaacattggatctgtctcataacaatctttcaggaggcataccaaaatacttttccaacttaacctatcttacttctttgaacctctcctttaacaatctacaaggtcagataccaagtggaggtattttttcaaacatcactatgcaatctttaatgggaaatgctggactctgtggtgctccacgtctgggatttcctgcatgtctggagaagtccgactcgactagaacaaaacacttgctgaagattgtgctccctactgtcattgtggcgtttggtgccattgttgtgttcctatacctaatgattgcaaagaaaatgaaaaatccagatattacggcttcttttggcatagcagatgcgatttgccacaggctagtgtcctaccaagaaatcgttcgcgctaccgaaaatttcaatgaggacaacctacttggagttggaagttttggcaaagttttcaagggtcggctggatgacggtttggtggttgcaatcaaaatcctcaacatgcaggttgaacgagctattaggagttttgatgcagagtgccatgtcttgcggatggccagacatcgcaacctgataaagatactaaatacatgttccaacttggatttcagagcactgtttcttcagttcatgcccaatggaaacttggagtcatacttgcactctgaaagcaggccttgtgtgggatcattcctcaaaaggatggagattatgctagatgtgtcaatggctatggaatatctgcatcatgaacaccatgaggttgtcctgcattgtgatttgaaacctagcaacgtgctatttgatgaagagatgactgcacatgtagcagactttggcatagcaaagatgttgttaggggatgacaattcagcagtttcagcaagcatgctaggcacaattgggtacatggcaccaggtacttacactagccaatctaaagccacatacattttttgttggagttgttacaaattcacttcaagatattggccgggcttctgacgaagcggagcggaggcccgtcgccggaggcttgggccggagccagtgggttggtgtatcgtgtagccgccgcaggtaacatgcatggcttccttgtgccagtgttcgagctgggcttgctctgttcggctgactcccccgagcaaaggacggcgatgagcgatgtggtcgtgacactgaagaagattagaaaggactatgtcaaattgatggcaaccacccgacccggcaaaaaattgatggcaaccacagtaagcgttgtgcagcagtgattcatcgctctatcgttgtatatgagcgaatgaaatacatatcatttgcatcattttcttcttctgcattaggaatagcatcagtgatcgattaccctttgtttgtatttgtgtatggttgaattgaatatatatatatatatatatatatatatataacaatttcgttggtgtaaatatgtgattgaaccgctggtcaataaatttgcatcacgaaaatgggagtagatgatgtgctacttatgttttcttatttctggccaaaataaataaataaaaaaggaatattatcggcacagcatcacaactccggctcgttcagccttaaacaaccacaattaacagtcctaagcagagaaacttaacaagcttttcaggctaacagaacatcaaaaggtccacaagacaacagggtcttcagagagcacatcttcaggctgtcatgcacgcaaaaaagatcagacagccagatgagagcgggtacaataaccggtagccatctcagtaaaactaacgaggctgtaggacagagaagaaaaaaggtagtaggaacgggcgacaatagtcggccagctctacatgagctccaaggtgaaaaagcctacaagataggaattttcaatttttaaaaatggccatgggcccacaagtagtgagatgcatgcaatgaaagatgctagtcagttgggtcccacaagaaaaagaaatacatctcgggattaactgctagcttactctagttaatatggacatggatggagccggcagccagcaatactattgaacctgcttaagagcaagtgcaatagtaggctatataccagctataaacatactttaaagagataaaggaagagagagaggaatagcagattacagcacggattacaagacgtaatatgtgtataacatgtgagaccagatattaatagtatagtaagcaactattgtatgaactaggaaggaagcccgcgcagatgcgcaggcatctaatttattgttttatgatttatgaaataatgctaaaagatgtcatgtctcatcttttttatgctgtgagataaactgactttaatatacttagtaaatgataagaatgtctccaagattaaaagaaaatcagtctgttccgattacttataaattctcctattgtcaccacaacttattattattgttttaaaagttatgatctataaatagattaaactggatatgtaccaataaaataagcctaatacatcattgatacactaaaatattcactacttatctaagtgttcatgtttcacttatttccgaatcaatatataaatattttaaaaatcccctt

SEQ ID NO: 25613 - DNA, 967 bp, Oryza sativa
  unsure (1)..(967): unsure at all n locations
tgttgggcgtctaagacttcaccgccggcctgcctccgtcgccgccgactggtgcctccgcctacacggctggcctattatgccgctgctgttgggcgtctacgtcttcaccgccggcctgcctccgtcgccgccgactggtgcctccgcctacacggctggcctattatgccgctgctgttgggcgtctacgacttcaccgccggcttgcctccgtcgccgccgagtggtgcctcggcctacacggctggcctattatgccgctgctgttgggcgtctacgacttcaccgccggcttgcctccgtcgccgccgagtggtgcctccgcctacacggctggcctattatgccgctgctgttgggcgtctacgtcttcaccgccggcctgcctccgtcgccgccgattggtgcctccgtctacacggctggcctatatggttggttggtcacaccaccgtttttgggcgtctacgtcttcaccaccggcctgcctccgtcgccgccgactggtgcctccgcctacacggctggcctattatgccgctgctgttgggcgtctacgacttcgccgccgactggtgcctccgcctatatggttggttggtcacaccaccgttgttgggcgtctacgtcttcaccaccggcctgcctccgtcgccgccgactggtgcctccgcctacacggctggcctattattccgctgctgttgggcgtctacgtcttcaccgccggcctgcctccgtcgccgccgagtggatcctccgcctacacggctggcctacgacttcaccgccggcctgcctccgtnccgccgagtggtgcctccgcctacacggctggcctattatgccgctgctgttgggcgtctacgtcttcaccgccggcctgcctccgtcgccgccgagtggatcctccgcctacacggctggcctattatgccgccgctgttgggcgtctacgacttca

SEQ ID NO: 25614 - DNA, 14392 bp, Oryza sativa
ttgactgagaactatcaaaatgatgaaatttactccattctgaagtcagaatatctttcagatgtagagaatctataagactgaaaaaaggacataaatatgggctagtgttgttgttgttgttagtcaggcagcataaaaagggtgtgaattatagatacttatgtaccactgacgtagactgatcaacattttgggttacaaggaaattaatgattaaagtgcccttagcatagataattatgcaccactacgatagaccgatcaatcttttggttaggaaattaatgacctatagagctataggaatggcataatactcagagaaacaatacttgtaatggtaggtacaattgagttcatttttgtcaagaaaggtaaaccagcatgtttctttgtcacttggaccgttagtgaaatgcaggtacctttgcagctttgctgaagcaatgaacttgcagaaaacaaaaatgtcaaaatcatcgaatgcgactatttacttgaggaaacatgtaggtgaaccattattggtagggaatacatagagagttccgaaaatggcaataacatacgcttagtaaaaagaactttaatgaatgatatggtacgctgcatttaacccacttaggtatacacaatgatgaaattgtaaatcacaatgaatcaagaagactaaacacctagatagaaaccaaaaatcaacatgcatatgaagttctgaacatttcagtgtaattcattctcacccatgacgcgaatgtcttgtcatcctgctccctgtgggctggggctgagagacccttgttgaacctttgcacacatcttgaaataagaatcaatcaaaaaatgaagattggagtaacaagcagcagacgcgctgagtaaatagtgacaaggtaaataatgattgattggctacaccggagtaggagcaccaagcggacggcaatgccatgaggagtaggaggatgcggcagcccaacagatgaggaggatgtgccgacaacctcaccgctggcagcaatgccagctgctggagtcggagcaccaagcggacaacggtcagcggacagcggcgctgagatctgaccgaacttgatctcatggccccattgacaccaccattggctcgggcgggctcaccagacacgacgtcgcctatctctactaccgcgccgcgggaagccacggtggggcgccacctcgcgcagcaccgggcggggatcgaggcgcgcgcgcgacgtcttcgccatgtcgggggactttaacctcacgctattcaacgagctcgaggtcgagctcgtcgggggagagcctagtcgtaggtgcttgctgcaaggagctcaacgccgcggatggagggatcggcgatttctctagaatactcgattattttgccacaccttttcttcgggagagggcagggccgtgaggctgtggaagggcgaaggcgaggcttgattcttgaccctgaaatcgtatatagagatatctataatcaatctgtaaaccgaaattactgtttactggccacgcacggcattttaactcaaacttttgtaaccgaaagcacaaatacgtacgttaccgcgcatcaagcgtggtgatattgtctacaatctactatacagtgcggttatgaaaatgtcaaaaaaaacacaagactaaaactgaattatttgaatttagttcaaaaaagaaaaggaaaatcttagcccaagctttgcgaggtacaggtatccaagcaggctgcaaccgaacaatgggccgacccatgcggtccaaccgtccagtttttgggcgcatactgtcgaaccgggcaaggcccacgagtggcctaaacatttttttaactttacgctaaacgccgtctgatcgagttgattagcccttagcgtagcacaaaacttaaccaaaaaatgaaaaaaaaaattaatagcgccgttgccggggatcgaacccgggtcacccgcgtgacaggcgggaatactcaccactatactacaacgacctcagtgactaaaaacagtagtttactactcaaattcaaaaaagcttaccatgttttttttagaggaaataaaactactgtttttctttttttttttttaccttgtttaccttcgatcataataacaggaataatcataccttcatagaaaattggcctcgcttggcaatgctttttctgaaatgctaacatttttaaatgtgattattgagaataagtttaggtagaattgttttttttaaaaaaaaaacatggtaaccatgttgatgctgtaataaaggggagattcccctatacctgccattgtgcccgttcaaatacagagtagaatgactgaattttttttttaacaattgcttgtctcatcatgttttaatatctaactatcaatttgactctaattttttagtttacatatttgaccttgcttttcaaaactgaaggtcagaattaaccatattcgatgaatgctagagaacagtgttaattaaggagtaaattgtccttttacccttgctcaattaaccatattatatcatagctttttttatccggatctttttgaaataattataatgaatttggtatagctttgacagatttaaaacaagtttaacagatttgtcttcaagttgaaaagtttgattctatttgacagattttttacataaaattgacagcatattgtccaatagcaaattcagatccaaacccaacaataaatacatatccaacagcaaattcatatccaaacgcaaacaacaaaagcatataccaacaaatccaacagaagagagctcggtctagtcggcacaaccagaaatgagcagtcgaatgagcaaccaagagagctcgccgttcccttctccttccacacggcggcgccacccctccctccctccattcgcatgcagcaattgccgtcgtccctcacttctcacgccttacgcttctgcgctcctccgtgcaccatagccaccaccgctcctttctcccaccacatgccgtgccacccctccatctctccctctgcgtagcaacaaccgccgccgctccacctccctctgcgtgtcgatgccatctctcccctccttccctccctccacatagcaacagccatcgacatccctaccttcgtgcgtcggcgcctccgcccctccttcctctgcgtgccggcaccgccgcctctccctccctccctgcgtagaatccaccgtcgccgtccctcccttcacttgctggtgcacgctactccttcgcgcgcatcagttgtcactgctcctcctccctccatgcatcagccagccgtgccgctgagatgttgcatgaagactctcgatttgtaagtggcctcatggtcaagccagaaaggaaacacaaagtctatatcttccgtcctctctattactcgcttggaatgtggttatttataatcatgggtattttggtcaggtcatactggcatttttttttctttttcctaactacaaatctaacgattttgaaaagcgaaatcaaatgagcaaacttgaaaaattagggtcaatttgatagttaggcttgaaaataggataaataagcaattgtcccttgtttttttatggtgcaatgcagcaatgggcgatgtctaaacatggcattgccttaattttgtttcatgatatcccgtagacaaggaattatgttatctgtattccatctatatcaagaacctgttggggagcttttgacagatacaacttctcccataagtaaaaattctctaaacaatctaattttcatccaaattctaagaatatgtagttgtataattcaaaaatgaactagaagttttcccaacttgtaaagattgttcgagccatggctgataaacataaacaaaaataaacaaaaaataatgagtaaaatgtttatatatgggtgtttgtagcaatttaaaaggaaatgctaaaaagttaaacttcaatgaaaaaaccaaataaactttttgaactttactatttttaactgcggcaaataagttaacgaccaccgcttatgttgctcatataatagttcctgcactaccgtaggcaggagtcacagtacagctcagttcaggtgctgctgcatatggaagcaagtataatactgtagcccacggtttcgttttcttcagaacagggagaagctatgggtgcagtgcagtgcccacggtttgaaacctaaaatttgtattcccatggagattagagaggcactgtcacaacgtgccatgcttcattgcttcccctttggtaactagcaacttgacatcttctgacgctgcctgcctcgtgtatcaccagataattaaccggcccccaaatcctatttaggagtagtacatatcgtactcacactgcaccgtacgacagtcttgaacccgtgagccggcagtgcatatgttcattttttttttgtttttttacaaagatttttcttttcatgttcgctgattgtttgtagcatatttggaagacatgtacaatattcattgaaagatatgatatgttgaatgacacggacgtggaagtgcattagcggatcagatcatagttatagagaaccagaatttgggaacctttggtcagcatttcccctttggatgctctctgtccaagaacatgaaattgaaaaagaaaagaatcttgcagtactagagcagaagtcctcaaggaaaaggagcaagggcaagtggaccctgattattccaagattgatcttgaagctctcgagacatgtctggagatattttcgcctctaggagctatagaataatgagaatctttgtaaccccaagagcatcaacaaggatgctttgatcataacaacaaatcaggctttaattcccgcaaaattccttcattccaggactaaaatgatacaagggtatatataggttctgagcgtatggtatgagatattgcaatttgatttcagaaaatagaataatgcacctttgcaagtagcatctattgtcatgttactgaaacaagacaaaccataagctgacaacaaaaacaaattctattgctaggttgaacttgtgggtattaacccacagcattgagggtagcagaaggggaagtagaccatggtaggtatagaggatttgcaaaaatccaataagaattactcgtggagtcaaatctcaaaggaacacaatctatttccattcatgatgagctttcgctttcaaggctgtttaacaatttcccccatattttttaaataatggaaagccatttacattttcatcatggagtacgagttgcacaaagagaagaaaagaacatcgtctttcgcacgcttcccaaactaagtatttttcgaaaaaactttatgtagaaaagttgtttttaaaaatcatattaatctatttctcaagtttaaaataattaatacttaattaatcacccactaatagcttaccttgttttgcgtatattctcctcttctcaaacactcaccaatgtttactgccatccaatcagagaatattttccatatcttagtttcatgttaatcgccttgttgttaactgggttgttttgaaataaactttgaaggagatacatcgtgttgtgcatccaagtaaaaatttctggacatcacatatgtgcatgtcaggcaagaaactattttagcaagagacaaccaggcatggaaccaggtttacatactagagaactatttttgttatgcaagaagacagaaggcatgcgtatgcaaaggacatctcacatgtgatgcaagctataaaccaccagtggcgcgaatcacgttggacaggccatggtccaagatccagaaagccaggggagccatcttaagaatcggacaaaaacaccaaagaaatggctgtattttgtacagcaacgcaaagctggtcagggcacaaaacaagtggtgcaggaaaaagaatataaaagtttctttgcaatggtagatatgtagatcaggttgttatcatgattttctttttctcagggaagccccataacagtaactgcaaataaagacagatggaagattaacagaaccaaatgatcacaaaatctaattgggagccagtaacttttgaaggttagtgtaggttaatcaaatgaaaggtttcaaatctgatagcttgactcattcaaacaatcaacgacccttgagaacttgaagcaacagggacaagtactatgtgacatactatccaatatttgagccagcaatttcagagacatgcattggcaaattaaagatttcaacgcttctgacgatgaaaattagatgttggagcatgtagtgcataaatatgcactagaatgatttaatattaataatcattccaatagataggaggttcccgattagcaaatccaatcagctctagcaatagaaaaaaaaatacaggagtaccagaaaacattaccaaccatttattaagcttacaatttcatcaacttcaaccatccacaatctgggcatgcaagcaaaatgaaatggattttactgaagccacaagttcataatataatgcaagtactatagatatagttaccgtgataatgcgaagaatcggacaatctaatacatgaagaacaggtagacaattgaagcataaacccactcttcagctgcaaagacaagacacttgccaacacgaaaaatccgatccaactccaacgggtaaaggtaaaaagatcaatctccctacacaattaagaagcattgaggtgattgcatgcacacaagcagttgcctcaggctccaattcatccatgagtgttcacagcttcccaaaccaaattctttggcgcagcaccactagtggctttcctggcctgcaatgcagcagccctcaatgtcttccatgtcaacacattagcctgccagaacgaggcggcggcataaggcagcccatgcttcttgcaaaggtcacgaacaaatggcgaaaccttcctaaggtggcaccgcgggaggcgaggaaacagatggtgctcgatttggaactgcaggccaccgtggaaccaatccatccatggcgagcactgaatgtcgagcgtgcccgccgtctgcttctcgaaccagtcattcccctttggcggcccgacatacacctccgaggagaagtggttcaggcagaactgaacatgctgaatcccggtaatcacgaagctcgcgaccacgaacgccaccctctcccaccaattgggcaagcaggacaccaccattgggtaccaaacccagaacgcggcgacgcccgcgatctccagccccctctgtggcaccttcctgctcgacagcaagaagacggccgactgaataaggaggtttatcctggcgaagcacatgaccgggtagaatgtccagtgctggtagctgatcaagaacttggacgcggcgtcgaacaccagggtgcgctggtagaagtaggaccagaggccgaacagcttggaggagacggcgaagagcggcatgtgctggaggtccgggtcgtggtcgaggctgttgcaggcaatgtggtgggtgttgtggttgcacttccaccacgcgatgctgaggccggtgaggcagttgccggagagcacctggaggaggcggtcgagcgcggcgtgccccgtgatccggtggtgccccgagtcgtgccccatccacccggactggatccagatgaacccgatgagcccgccggcgaggaggtgcgcccacgcgctcgcgcaggcgaggacgcagtatagcgcggcgcataggaggagcagcatcccggcgacctgcaccttcgggggtgggccccacccgctcgaacagccccccgaaggagagctgcgcgaggaggcggcggaagtcggcggacgccggcgagaccgtgtagtcctctagccggcccacgaggaaccttcccaggagcgggcgcccccacggcgggtggtagcggcagaacgcgtcggtggcgtcctgccccgccagcgtcaggagcgggatgtccccgcccgggtggtggggcacccacgccgtgacgtcgtacacgtccccggagatggagatccacaggtcgtccctcgacgcgtgcgcgcggagctcctccgaggagatcatgcggacgccggcgccggcgcggctctgcgcctccttgggggaggccggcattgtggccgtcgggatcgccggaggcatggtcggcggcggcggcggcggcggcgggattcggagatgggggaacgtgaggaggaggaggagtaggaggggaggagatcggatcttaaagaggagggtggtgcctcgctggtttctcgccttcgttgagaggggaggtggttcggtttttttcttttcttttctttttctttttcttttttttttgtttgggttggtgggtttaataaagttttttttctctcttatcttttattactctccaaaagtttaggagagagagaccatacggagttgtgctatgacaggctgacactgacagcagggttaacgtactactccctccgtcccaaaaaaaaagacaaactctaatttccgtgcccaacgtttgaccgtccgtcttatttaaaaaaattatgaaaaaaattaaaaagacaagtcacgtataaaatattaatcatgttttatcatctagcaacaatgaaaatacgaattataaaaaaatttatataagacagacatttaaagttggacacagaaactcatggtttatcttttttttttgaaacggagggagtacggattagcagtaataaagtgactaaagcaaactgcttgttgtgagtactgtgcttatttgtttaggatcggtttaatatttgaatcgtagtttgaaatcgattgtagttcgtttctagaaataagagttggatgactatacaaggtatattatcgtttattactatccgacttatatttccctgttttttttccccagcacagcactgtttgtttatcttgtttggttatctatgccaatatacattgtaatcgaaatattgccctatacgaacacagcacggatccgttcagaacgttaggtgtttttgtttagttaaatttcttccggtttgattaagtttataaaagaatatttttaatacgaaataaaagtatcatagaaacatccataatcgatgatggacttaacgaaattaatttggtgttgtacatatttctatttttttatataaacttggttagacatagggaagtttaacttacaacaaaaccaaaacaccattattatataaaaggaagtagtttacattttttcaagagtagattatatttgatatatgactcttgcttcacagttttttataaatacaattgtactgcgtatacatttagcgagtaatctaggatatgttataatatgattctaatttgatcaaagtgacacatatgctatttttgtataaacgtggtaatttcaatgttcttagagcaaatgtaattttatgaaaatgacaatggatttatgcatggagcttttagatgctaaaatgaatgttatgtatcttttagaaaaacaaaatagcagactcaaagaatgtaatgattaaattaattttagaaaaaaaaaacaactatgctccaattatgttttctttataacacatctcaggtcttttttttcgcgaaaacacagattggtttcaatctttctaccttgagagatattgtggtacttattcttgcgttttgtttttggcagaataaatgaagaatggtatactctgcatgtccagataaacaagaaagtgatgtgcgtgggatgtagcggtgtagctagggggcaaaatatctaacgtactgattttgatgctcaagaatatatccttttggatcatttaataaaaatccttagggtgaggaatacatatatttttattttctcaaggacattcaataaaaatggagaatgagacaacgagaactcgcacgcacgatgcctgataaggcaagaaaaccattatctttaacatacaacaattctcgtcaactcgatctcgtggtgtttttttctctttaacttcatttcacataaaggcttaatttccttctcttttagaggattttcaatgaaatttttatcctataattcaaacgagccctcctaaaaaagaggtacattgaaagtcagttttgctcaaatgtgcatgttaacctattttgagtttactacaaccaattcagctcgttgtgttagagcgagtacaataacaagttacaagtcagctgtacgacacgtggaggagattagagaagagagaggagagcggactacagatttgtagtcagctataacacaggctccaatacgttatgtgtgtatgagatgtgagactatatattaacggtgtagtatatgattataagtaactattgtatgaataagctattagattggctgcagaagttggctatactattaaacttgcatagtacaatatcatcttcaattcataggagtgagtgtctgtgttttactatgtaatcctaaaaaacagaatcatccttctaacttacttttctgccttaaattcagagggaaaatgacgatgctgacgtgtaaccagcatcttaacggcatctcttttgggcaaacccagcgtgatgcctttcatcatctcttcttcctaactctctctctctcccctcgcgatacacatgcatacgcatggtccacagttgtacacgtgatgcccatcacttatcagcaaaacacagcgatcgttcagtgaggccgtgcctgtagatggcttctcatgtggttcgcaaaatcacaattggcacgtttgcccgcagaaacgtcgtcacttgcgtcgacgcgtacgtggtgcatgcccatacattcgtactgcggctttgtcaaggggaaactgtgtgcagaacgtgcaagagatttgcaatgcaaccagtggagtagaaactgccgtgaactagtgatgttattttaggggaacacgctacctaggtggcagataactctaaaacatgtactccctccatcctataatataaaacgtgcacacattcgaagattcaacatttaaaacatttgaccaaccttagtataatatgaaataaattttatttgttaaaaaatatatcattagattgagatttaaatttattttcatatgattataattttgatgctataaaatttatagtatatgagaaaatataagctaaagattagttttgaagaccgtgccaactttgaccgcgccttatattatgggatagagggagtaagggtattcacaatgcgtcaatgtggtgtaaccctaaccagccagcgaggagaatcccctccacacgagcgacattcatgctcccatgcatggaactccttatgtccactctccaacctatcccatcctatgaagatgcatgactcccattaggctttgttagggtggggtcacgtcacacacgcgtggaacaatgggtcaaagctgcgatgaggaggtcgtgcccctgcgacgtggtgtggtccccataccccatgcccacacccacaccctagtgtctcctcaaactctgatggccagagaacaagagcagagaggaaagaagagcgacctacctttccaacgtcgacatcaccgttagggtagacagagaagacatcgacgatgacctcgaccactccacatctaaagcccctaggagctctccttctcgttgcccccttaatccagctcactgagcttgtcaacaagccaccaagtccaccatcactgcccatcaccatcgagctcaatctcgatttgacgctcatcacctcaatgccattatatctattggtgcaaacatggcgagaaaggcatccagagcgacgagaggaaaataatcgaggatagggaagggaaggagaaaaaagataggagagaagttgatatgtagattcggtagaagagttaaggatattttatatcctttttattgttgtatgctgtaaactataaaagttttaattagtttaataatagaaattattataggggctgatatagaaataattagggactgaaaaaaggggaaaaggtctattttacaccctcgacctcttatgcttgtctaatacaccatcgaaccacaaaaccgggtataatacaccctcgaactgtcgataccggacacttaatcccccccaacccccacaggtgtttttacggtggtttttttgacacgttggatgccacgtcaacccataagaatatatgggccaagccctttttctctctccatgccctgttcatgcttatcaccctcacgagcattggcggcggcggtgacgtgaagttgcgagggcagcgatgttgccagggttgcggaggcttgctatggacaacggtgtgggaaagaagcatctctgacaggttgcgcgcggtcgccggcggaagctctaggtgtcgtcgccgcacgcgcctgtagagatggctcaacagggaagaaacagcttgatgcgggggggggggggggagcaacgacgagcttgagcttgtggagtgttcagccgacagaacaagcagatggaggagcacgagcagctctagaaatggcgccagatccaatctagacagaagcaatccacttccgattcaatacagagagggtccatttgattattctccagctactctatgcgagtgtcgtaggaaggcagcaagatgaatttcttggaatgtggataatccatctcggaagcatctgacataagtgagagctcgggtgagttggtaaaatattagtgtaatacatttgttgtttaaatagaagtaatattgtgcaaaagtttcttatgtattgagcaggatggtgacggctctttctggagttggtatgagctggaaacaacaccttatttaaggcaggtgttaaataatttgcacaatgaaagagaagtcagggatgagagcatatattgtgagtgcgagagcacaaatcgatgagctaacggctgcgtgcaatggagatgtggctgattggacaagaaaactaaaggagaaagatgattcagcttgtaaacttaaagctagagctattgaattagaggagggaaggaaatttcagcttgtaaaccctcaaagctgctgccgccgccaacgctcgtgtgggagagaagcactaacaggctcatataatcttgtggattgacgtggcatccgacgtgtcaaaaatcacgataataacagccgggtgagggggggtgttaagtgttcagtattgatagttcgagagtttattatatccggttttgtagtttgagggtgtacttagactacgagttcaagagcgtaaaatggacttttcccaaaccaaaaaaagtacgcctctatcgtgggtcagggtacacaaaagcatcgtacactgaatggcctaatgcacttatatatggatctcacgagtttgagggccattttgatttgaagtcaattatgctaccaaaatatagttgccactttaaataacacttaactagtgtttggtttgtaccaaaacatgccaacatcacatataagttgccaaaaggttcgcaataccaaaacatgactaggtttcggcatgagagcaaaccaaaaccaaccaaagagagcaacataatgtcaacattgctagaaaaccaaaataacagataacctggtgtgttgaaattataatgtgagcaccaaaatatatagtaacagcattatgccagtaactccaattagtatcttaaagggtttcaggcaacacagtaaccactcaagcattcttatttcgtgttggggtattctagctagagaacaaggtgctaacctagcagaaaacattagttgccagcctgagagctggcaacttggcaagtgaacagatgtacaatactagctgattgtcttgacagaactatcacatggttcatagaaatgtcttcaccaacaccagacaggcctgaaaaaattcaatcgcacaccaaattagatatcatatatgccattcgctgttttttctagtgtaaatttgtttacagtaaattttgattggttaactaaattatctttgtactatatataatatgatctgtagcatttaagagaattgaacaacaaaaataggatttctggagcatcctatgtaaggaacgtgtcaggaaataagaattaaatattgagtgaactgcaccggcggtccctaaacttgtgcaggtgtgtcacttaggtccctaaattctcaaaatgtatttttgggtccctcaacttgtctcgggtgtcatataggtccaaacgagctctaacctgtttcgtgggatgatgtagcatgccacggtgacgcttacgtgtcagtgagatacacatgtcagtcacatagaaaaaaaat

SEQ ID NO: 25615 - DNA, 16946 bp, Oryza sativa
agacaagttgagggacccaaaaatgcattttgagagttcatggacctaggtgacacacccgcacaagtttatgaactgcccgtgcactttgctcttaaatatttatctgggcctttaaaagatcatgaattaaactgcaaaaaaaatcgaatgacttcaacaaacccagtgaaaaatcagttgacaggtagatacataatatgaacaacactgatggagaatgacatttaaaaatagccacacagaagaggaaggcctaacaaacagacaggtttcaagaaaaggactgattgggagaagaattcaaaacatgatgtagtaagacaagcaaccacataattcaaaatttgccactgtaaaaccaaaggcaatattatgaacaaaatttgcctgtctgctctgtttgagaagtgtttcaaacaagattaggaagttctatgtaactactattatgcaacgcaatagcactagaaaatagaaactaaatgttgccatggaacacagaaagtcttggtagagaatacagtcatagatgttcggaagcaaaaccacagagcaagagaatgaagttaaaaaatttcaaacaggagacacaacagggagtagtagatggaggacaaagtgactttgcttactccaacatagaaatggtaaaatttgcaaagtattaagtcagtagggaaccgagagcttgagcccctccatattattaatttattatcagttcaccatgcagtatcaatcagcaccaatcaacagcgagatattgtcttttggtaaggtttacatgcagtccaagcaaataaagcacgctctcaaatttcagcaattgatgacaaactattagagatattatcttttggtaaggtttaaattcagtctaagcaaataaagcatgctctcaaattttcagcaagtgatgacaaactattgacaaacaaaaaatctcagtagtacttaagaaaaatgaaatcctgtgaccaatattcaatattgagctggaacctacagtccagctaggtggaacatgtgtcctagagccagaactaactctatagttgtagtcttgtagatttatgcacacctaaaaaaagaaaagaaaagaagagcgaactgcaaagccaacaaaactcaacaaatttatggaagacagagcttataaccactgctctaaacgcattgctgcataacattgggacgctaactttgtcttgtgctgcagtttgtttttcattttaagaaatgagatatagtagcggaccctcattgattagcttgtgcaagtaagaactgatagcctgagatttgataggtgactagaaacatcaatgacaacccaaacacccaacagtcatattgacttattgtcatgtagccaagtttaaccatgtgacaattattggtaatacaatccacgaaactttggcatgtcaaaggatgaaaagcatgctctgaaattccagcaattcatctggaacaattgtcaaacaaaaagacgtgaaacaacaataagatgaaatcctgctaacaaaggtaaacttggcgactttcttgtattgatcccttggaagcaagacatttttccatttttttaacagctgatacattgataaaaatgatttatctctgcacagtggtgttactttgttctgaattttacctttccttttggcatagtgagaagatctccaaagtaaatgaatgtacactcagaactaatcactgggaaaacattgcgtggattgttatatgctcaaaacgtgccacaggtaacctatcaaattcacaatgtgaagattcatgggtgcaaggttactcaagcaacttaatagcagccatagcaattccacatctcccttatgaaataattatgaaataaaacaggatatatcacaaagcagcagagccatgtacctatctatgtgtccttccgtgcacttcaaaagcagccagggattagctctaagtgaaagctgtctcagtgctgcgcccactggatactcttgaggtcaatgcctgccttggccatctcatacagtggactcatgtcacgaagcttcttcacctgatgcacggtgagctcaattgctctgtcaacctcttcctcagtggtaaagcggccaatgccaaagcgaatggaggtgtgcgccatgtcctcttctacaccaagtgcccgcagcacataagagggctccaagctggcactagtgcaggcactgccactcgacacagccacctccttcaggcccatcagcaagctctccccctcaacatatgcaaatgacaaattcaggttaccagggtaccgatgctccatgcttccattgataacaatatcatcaacctgtccacggatgccatcaagaaggcgctgctgcagaaccgaggctctcctgtgatcatagtccatctctttagccgcaatttcgcaggcagcaccaaatccaacaacaagaggcgttggcactgttccactgcgaattccgcgttcctggccaccgccactcatctgcggctccacacgaatgcggggtcgacgacgcagatagagagcacccacgccctttggcccataaatcttgtgcgcagacaaagacatgagcccaatccccatttggttgacatcaatcgggatcttcccgagcgcctgggcagcatcagtatggaagggcacgcccttctccttgcagattcgaccaatctcctcgagtggctgcacgacgccgatctcgttgttgacggccatgacggagacgaggccggtgtcggggcggatggcgtcggcgagctgcgcgacgtcgacgaggccgtcggggcgcacgggtaggtaggtgacctcgaagccttcctgctggaggtacctgcaggagtcgaggacgcacttgtgctcggtctgcgtggtgacgacgtggcggcggcggtcgcggtagaagcgcatgacgcccttgacggcgatgttgttgcactcggtggcgccggaggtgaagaagatctccctggggtcggcgccgacgagggaggcgacgcgggcgcgggcctcctcgacggcggcgtcggactcccagccgtagaggtgggtgcgggagtgggggttcccgtagcgggagaggtagaaggggagcatggcgtcgagcacccgcgggtcgacgggggtggtcgcctgcatgtccatgtacagcggccgccccgagatgcgcacgcccttgatggtcatcgcctcctcctccgccgccgccgccgccgcggcgggagcatcggccgtcacggcggccgtggagagcgcgcgggcgggggagagggagggggtggacccgcggcggaggaggagcgggaggaggcggcgggagagcgccatgggtggagggggggagaggtagggttcggggattggcggtggcggcggagatcgagctcccgtttcggcggaggggtgatttggggagaaaaaaaaaaggagagatagggaggagatgggttgaggagaggataggcaccgccgtggcggtgaggttggcaactgggccacgcaaggcgacgcgtctgactctgagcccgtcgcggtcgcggtcgaggcgacacaccggttcggcccgttgtttgttgttgggccgtggactactggtgagtcataaggtcatatcatattaacatagccaatccaaaatttatttctcttctttaaattttgcttttttaagaaaaggcaacctgccaatttttattaaatagagaaggagtaaacggagagagctacaaatcggacgtccgacgttgtaataaaaattggacagtcaaatatttcggttgactgttggtgcaacattaagttatacatagtgaaacaaaacaaaaaagtcagcctatgaaacatatagaactttttgtgaaacataataagaacacatggtgaaacatatttctatcacatatgaaatttttattgtctgaaatatatgtttttctttcatcaaaatataatcatgcaatatcttgttgtaaagatttaattataacgaatttaacggtgcgatcaaatcgttcaacgaataagtagtttaaaagaaaaaataatttttaagatcactaaatacttgcatcatgcgtggtgtgtgggagaaagctaatagaatagcatgagagagactaggggcaatagcgtctcatattttttcggtcattggtgaaacattgagttgcacatagtgaaacaaaaaaattagttattgaaacatttaattttttttatgaaacataacaaaaacacacgttgaaacatattgctactgtgtctgaaacattaaatttaacggattgaaacatatatttttctttcatcggaatgcaatgatgtgatatcttgttgtaaagatttaattgtaacaaatataatgatgtgatcatatcataaattggataaatagtttaaaagataaaacattttgaagaccatcatatgaatgtgtggagacatggggtactattagtagtttgttcatccgatcttttttttcgttggacatctgatctcctcaagcatttcgggagtgaactgtacaaagacgaaaacgagctcaagacctttgatccgagctaactaaaagaaagccaattatgaagatttttcacgcccgctaatgcccaatttttggcctgtcacgtccggaaattcactagtaatttccgaacttatttatgcataaaaccctcatctaggaatcagccgaggtacacaaactgacaatttaatatacaaatccatcataataataacgttacatacttacagaagaaaaaaaaacagcagtggaattaacggtctagcgatggcttcagctccactcccacaggcagctcaactggggtataagccaaacgtcttctctttctggatcctttttcttcaactgaggtttgatgattattgcaagatgagcatatgacatactcaacaagccacacagcaaatatgcaagtgcacaaggataccaaaggatggcataatataggctcatttgcaaaagcagcatttagcaaagatttaagagtaaaacagtagagtaattaattagaaattttaattaacactgaacagcacacccgtgctgctcaggcccaaccatcctgaacaaccatacccggctgtacagatctaactccaaaccaggaactaaacaaattattaccagttattgcatcaataattatttgtgagaggtgtgagactaatcacgaaaaacatttctcaacccgcccatgaccgcgggcacggccattcgaatagttttactctggccagagatgtaccactgtacccacaagacacaattccacacatgttgccatgccccgaagtaccaccacggcactacaaagggggaaattgtgacaatacccttcgcacaacacaactcaccacagtgcaccattcctggatcataatcaccccctcaaaaaccagaggcatggactccccagcgaccccacggacttctcgccgcttcttagtctggcaccccgcaatgaatcatgctatacaaaaggtaaagccgttgcccacgctggcttgtggttggcatggtaattgtttcacaacagtagctcgcgaaccggtccttaattatcatgagcatgaccttcaaaaccatgtgctcacaacccgccattgtcaagttttaattgtcaattaattatcataacacaattaaccatcgtgagctaccattaaatataaccataaataataatgtagtatgattcatcccattagtgagctaatgtttctaagcatggctaagcaattatatatatatatatatatatagcatttagctgaaccaaaccaatatataaggttccagctaagcaaattataacccataggaaaataaagtcatcttcggccattaattaattgggaaaggctcaccacccgatgacattcgaaaataatgcataagttgaaataaaacattatctttaaacgggttcaacatgctcaaagggttgtttggaatctgtgtgacttgccttgagcttccacaaacgcttccaaaccttcctcaacgaaaacgttctcctccggaacgtcggaaactaaagcaaatgaacaaaatcaacaaaacagtacaaaaacaagcataaatagtacatgtggatatttttaacatgtagatctcgattttagatgaatttagcaacttgaaccactcgaatccgagttatgatgatttagttatgaatttccgaattttaatcgattttcatctaatagagaaaactaagaaaaagggattaatgacgtcatcgctaacatcatcgccggccatggcacgacttcacgcgaccaccggcaaaagagggctcggttgggctatctaagggcacctacgcgtagaggacgacgacgcgaactcaccggtacaagaaaacacgacggacgacgacggacgacggccggcggcgaggttccaaggcggcacggttcgggttgacggcggcgatggcgctccggtggtcttcggcggctgcgaaggggcggccgaggttcttctcctccgtgcgcacccgacggcggcgacggacggcagcggcgacgatgctagcggcggcgcgacgcgaccggaggatcgccggcgacggcggcggctagagcaaggcggcggcggctctacgggcgacggctctacttgggacttggggcaaacggaagaggacatcaaggggatgctttatataggcttggactagagagatcggactccaaacgagaggatttgaaccggaaaatcctagggttagtttggagagataaactcgaaaacgaatccaatttcgcgtcgaattcaaagggataaagtcggatttttgggggaagagatagaggaggataagaggaatattccccctcaactaattttggtaaatacacgagataaaagaccggatttggaggggaaaacggcggctgcacaggtacaggacggctggctcgggctctgtccaagcttgaagacgacactgtagcagggaggcgtactagactttcggctgggcttctgctaccaagggctaattaagggagggacaccaagcagacttcgggaaagagagggaaaagactgcaggctgagagagagattgggcccagcaagtgagaggacttttcctaattcggcccgaaaaggaaaaaggggactttaattacttttctaattaaattaatcactgaaatgatccttgaattgttaaaaatacttctattgctcaaataatttcaagaaaaatcctgaaaatacttggacactcaaagtatttaaaaatattaaaactagaccatttaatgattaatttaatatgtggataattactgaaatgttgtttgtatgattaaaattaggaattgagctccgaaaaatccaagaaaattccagagagtataattaaccatggataatttaataaaaattaaatccatccatgctttatatttaggaaattttatttcccacatttaacttctcttgtaaattaatgaacatttaatataaattctaataataatttattaactaatttataaatcctaagacgaaaatcaggatgtgacatggcctcttccttgattttggccagaagggaggtggtcaatagctccttttgctgaaaggttttgcggtttctctcattccagatctcccatgcgaccaacagcgtcagtgtgcgaagagccttcttggtacctcttggatgtttgaggtagcctcccaccattttaacaccgtggaggtttgctgccaccgacatggtttcgatccctcacacgccgtccattccgcaattgcctcccaaattttatttgtgtatctacatcacacaaagagttgaagggcagtttcttgagatcgacgacataagggacatatggaaccgtttggccatcctctagttgctagtctatcggaggtctatactctgttttggatgattagccatgcgaaggttttgaattttttcggcgcccaggtcttccaaattaggttattaaagttggtggcagtggtgctgaggagttgcgtattgtaggctaatgttgctgtgtattcgccatggctggtaagcttccatgttattttgtcgacctcttgctcttctagttgtagcgtctaagtgacggtccagattgtgacaagttgatcagttaagtctatcgtccatcctgcatttgacggcaggtccaaatcatgaagccattggtcagattgcaaggcctgttggatcgtcctgttctttttcttggatgctgcatagactagaggagctacatttttcattctccttccgtcccaccaggccgaattccagaagcttgtcttcgcaccgtttccaattgctatggaggtggcagccaaaaaaggagtttgtcggtgtcttctttaaaatttgatgaataaccaaacgaaaatgcaacgaactgacaacttaggctgtctggctgtggctgtgttcgtttattcccaatcacaacttttactctcttcgaactactgtacttaaaacgggatgttcgtagaagtgcataggcggtacttaaaattgtagaggtgtgttatctgggtccctaaactctcaaaatacagatacaagttatataacttgtaaaagtgtgtcatcaagatcctaagtcaccacaacccctctaaaatcctacgtggcgctaatgtggcatgccatacggatgtgacctggcattatcttaactgacaaatatgatccacttaaaaattttatttttccttttttcttcttctccttctcttttttttttcttttcttctcctttctttgtgacctgagcaccccgtgtggcggtggcctgtagctgcagtgagaggaaagagaagaaagcaaaaaaaaagagaagagggagaagaaaaagaaaaagggaaggaaagaagaaaaaaaggaaaaggaaattttttaagtggatcctattcgtcagtcaagattataccacgccatgtccgtgtggcatgtcactttagcgctatgtaggatcctagaggggctgtagcgatttaatacctagatgacatattttgataagttataggaccttaattaacattttgagagtttagtgacatatgtgacgctacctatactctttacaaaaatattcaactttgaaatttatattaatgaactattccattttacatgcgcggaagggaaatttcccaaacttctctcccgaacacacccttatatgttctccctccataccaaaatactccctctgtcaacgtatatgaagtattttcttggttatttgatatagattaccattgaaggaaaaaactttaatatatgtcattaaataaaagatggttggaggtaagatagggagggaaatttaaatagaatgttatatttatgtgcaaattttaaaccccccaaatactccaaatatttatatttatatttatattatatagaactactattaggagcattccaagcaccaaacatgcatcggcccaggtccaccccaccccacgtcccgtcatcccactcctaccgttgttggagtaaacgatttactcctatcgcgcacctcaaccacccacctttattcgagtaaatgatttacttcgataataaaaacaactcccccgcttccgatcccaccccacgtcctgcatcgtgcacccaccattatcggagtaaatggtttacttcgatgaaaacaacttctctgctggcggtatatattctatttttcccgtacccaaccaaccactctcgcccccactccgttttttcctttttttcggatctgaatcgattcatcatcccagtccacagatcggtgacacaccatggaggaggacgactacaccgtggcggttgatggtggtgtccggtgagcgatggccagcggcggttgaggcgaaggcactacttcgggcctcgctgccggacgcaagacaacaccttaaccagcaaggaggtgttcacctgggccaatagcaacaatcagcggttgctccacgtcggcgacattgatagaacaagcaagtaaggaaatgacactttgatttgcatctgcatactctccttcaacttcacacatgaagccctaatttttttttgcaaatcaaattaacatgtaatctccaatattacctgatctcaattgatgggctgcacaggttctacatttgcacatcgtgctccatgtggctggccgtagaggatagggaccggtgatggagattgtttgctagttttcttttgctcgtcatctgtattgacatgaacgagaatgtttttgcattttttttgtgcttgctagatgatggatggctgcgattgcgcaacatcgagctcatctcttaccacaccgctacatccttccatgtttccataatggatttttggctgaatcattttttttctagtttgattcacctgtgagtaattttatcgcttgtgtgtgattgagcccgtaactttttcattcatacgactattttgtgatacagatcaacaatcactggtggagaaaccgtttgtagtcccggttcataaccccctttagttccagttgtccaaccgggactacgaatccaggactaaagatagcgatctttagtcccgggtgaaataaccggcactaaagattgatctttagtcccggttggtaacacgaaccgggactaaagatcggtgtactattttttttatttgcatggccttgtttgctgcatggttgattatatatatatatatatatatatatatatatatatatatatatatatatatatatatatatatatatatatatatatatatatatatatatatatatatattaatatatatatgtatgtatgtatgtatattacaatacatatatattacaatacatatatatgcattgtaatatatatattatgcgcatatatagaatacatatacatacatacatacatacatacatacatacatatatacatacatacatacatacatacatacatacatacatacatatatatatatatatatatatatatatacatatatatatatatatatatatatatatatatatatgtatgtatgtgcatatgtgtatatgtataaatacatatattacacacatatttataatttaaaccacttaacattttatgtgcatatatgttaccaaaatatatattaacactaaagaaaatgtacatacatatataaatatatatatatacatgcatgtatagtataattcatttgctcgctagctatagctacgacttcgacgccggcgttatgtcagaagaggaaggaccgatgttatgaattgtcgatccgtcgtagtagaattcaccatcgggattaaggacttcttcgttgatgaaccccatctgttgttcttgaacagccgtgataaaatccttgtgtgggagattttccctcatgtgaatacgctatcattcgaaaaataatgacatatcaatatatgaaattaataaacaacttaacaaatcgatacgcaatgaaattttgaatggtttatgtatacgtacatcgagctctcgtgtggtgtatatttggtttgataggcagtgggcatactcgcatacgtagtagccgcataagttagttccctggtcctgctttgcacactacatgagaaatcatgagagatttaatatactctttatattaactgtaattagagattcaattcaatataattttggatcatgcatgtactcactggaaaatgaaacctccgtccaagtttttctttccaagtcccgcggaccaattgacggaaccgatcccaagccctacatgtgcagttgcaagctatgattaattaattattacccgagatcaacataatagcaacagagtcccgcgactttggaatagatggcattatattacctgtctatcagttagaagaccttgtcaaaaaccttctcctctttattcattgagtcatacatagtgactctgcatgcgtccaagtcgaaaaataacaggacccagtggataggggtgggcagaagaagaccgaaccgaagaaccgaaccgaaaagaccgagaccgagaccgaaaagaccaagaccgagaaattcggttagtaattcggtctcagcatgttaaagaccgaaatttattcgggtaatttggtcattggtctcagttaaccgaactaaccgaaaaaaccgaattttagcccaataggctaggaggcccaataggcccactaaaccaaaccctaggatggacacccaactcccactcagccactcctcacagccgcaccgcactccctcagcacgcacagcgccgcactcccatcgtgctctccaccttcctgcctccacaaccaccgcgccggcgccgcctccagcaccgcgccggccgcctcggcccgacctccgcccgcccaccgtctgtgccgccgcccttcgccgcctccgcccaccctcagcttccaccgccgctttccgttaccaccgcggtcggaacgcgccgccggcaagcagccacgttgtccctccctcttcttcggtcgccaccgccgccgccgctcaagctacggctgctgcggggtctcctgctgctgtggggcgtggctgctgctgcggcagccggtcatcgccgtcgaggccggcgggttcctccggggccttctgctgctcgtctacccgctgctgtgcctctcctcgtcggctacggcgacgacgacgacgacgacatgctggggaggcccatggcgacggtggcgctcgtggggctgaagaaaaggaaggtgacgaggggtggcctgggctgaaataatttggtcagactgagaccgagaccgaaaccgaaaagaccgagaccgaatttgccggtcctgagttttttggaatgaaattcggtcctgagttttcaaagactgaaatgaccgaaagaccgaagaccgagaccgaatttttcggtctgaccgaacgcccacccctaccagtggaatttggaatatgcgtgagatgagataaatatcagaatgtacatgttatatggatgggaatgaaatttgttcgaacgacaataaaaactcactctgtgttgtacgatagtagtatgaacgtcttgaaatgctgctgcgttaggagatagacgagattgtcctctgtgtctttctcgtacttgtcgatcatttcagtgttgattttccgagggtcgatgaacctagtatcgtaaactccccgccgtcgggccctttgaatctccattctacaacgatgaaaggaaattattattgctttcatatatgccaggagctaattattgaacgaaacaaatcgaactcaaagatacttacaaaatctatgcgctcagaagagagacgtcgagggcgtccagatggtacagatcgaagacatccttgaaatggatccatagaacatcttctccttgcagaaagtcggggtttctaatcctcgctccgaacatctctctacccttggcgctcatttccatgtaccgttcatggaatttgtacatttgtgtcagtggggactgcagctgctcaggcctgacaagcggtttaccgagttcaaacttatatgccacttccgccttcgggattggtgcgcttccaaccaactgatccacagttagactggtgtccgaaatgaaatccgttatgccaaagtcttcgccagtcaccaacggctcgacctcttggtttggctgttctccaagctgaggaactggtttggacttcttgtaataggctttcctaagtgttcggtcatagtccgatagctttaagacctccttgtttgtggtggacattcccttgaagaacttcttcacgctcgggtcaataggtatcttctttttaggactccaaggcttgagttgcctcttcacttctcctgccacataagcatcaagctcctcttgactgcaatcgtacggcggctccttgtttttggtggcgtcaactttcgccttcttcgttgcccttgtgcgggcaagaggtggagcttggcgagaccttgtcttgggaggtgcaggcggacacggtggaggtggaggtggaggaggcggaggagtcggaggagccggaggagatggtgtaggaggacatggcggaggaaccggaggagatggtgcaggaggagacggtggagccgaggagatggtgcacgagacgccgcttgtcgcccagggaggatgatgtaccgcttgcgccatagtataatggcgtggcttgtgtctcgtagatacgtctcaccgtctcctcctgggtagtccaactcagggtcctcgtatgcggcttccaccagctcaacttcgaccctcgagtatcctgctggaatcggcctgcagtggtaagtccctgaaatgtccattgggatggccattccagacgccaccttcacgtgatgagaggttatctattagtaatcaacctaagcagcaacttgcggaatgtacaagtcaaaaatcacaaaactacgagcataccttgattaataagttcttgaagggaatatgcagctcacatggtgtccgctgcgtgatcccatcaacggggcaggtggtttcgtcctgggtttgcatggcgtccatgctctgtgatcctacctgccccgttgaggcgcagctactacgattgcctgatgggctgaccattggaggaggtatgtacggctagggatcctaggaccgatatgctgccatgcgttcatccaccttccttgccacctcctcttgcatgttgagctcgtagctcgataccctgtactcaagatctgcaatcttcgcctcggtatctctcttgctcctcatccgactcctgtacgtgtggatgtcctccttgaatccaatcttccagggaatcacgcctttccctcgtgttcgtcctggatgctcgggagtctgtagggcaagtgacagctcgtccttctctctgtcgggtcggaacgtgccctgagaagaggcttccactgcatccgttagtcgactggcagcctcgcgtatctgattgctgaagacaagggagccatcaactgggttaagcgttccaccgtgagcatagtaccagaacttcgatcgatccggccatttagcggtggccggttcgatacccctctcaatcaatcttgcctccatctcctcccacttcagcattgcgacgctatagccgcctgaccccaagtggtgatggtacttcttcttggcggcgttttccttgtttttgaccatcatcgcttgcccttgttggcctgccttgtaagcaacgaactcgtcccaatgatcccttagctttgggaatacgttgaagttcggtgttagtcccttcaagatgtatttcttgtagagatctccttgaagctctggaactgttctgccattttctttagagtccactgtttcactatgttctccgtacccgcagggagcgtgacttctcgagcattgtggtccacagcatctctttctctgattccgggacaaagctgtcattatccccgcgtgcccttgttctgcgccagtacaccctgctgacaggcacgttatcccttacaacccaaccgctgtggcgtacataattcttggctgcttccgccggggcactaggtcggccgtcttcgtccacctcagtaatgatgtgccgaccctctatctttttcgcgacacctcgttgtccgcgtgccctcttctgtccagcggagggatgacttccactagcctcctcctcattcccctccacatgcctctccacgttcccctcctcgttcccctccgcatccctctccacgttcccctcctcgttcaagtattggtttggatcctcgttcccctcttcttcgttccagtactggctgcttccctctgcgattgtatcgtacaatatctgttcctcatcgcgatcagccatctgttcatagaagaaatatttgctaagttcataggtcatatttgctaaccgtaatattaaaactcaaataatcatatatgctaagtctaagtgtcgtatattagaaccctagataatcatatatgctaagtctaattaagtttcgtatattaaacctctaataatcttatattaaatctctaacaatctctaacactcacatatgctaagtctaattaaatttcgtatattaaacctctaataatcttatattaaatctctaacaatctctaacactcacatatgctaagtctaattaattaagtttcatatattaaaccatattaaacctctaataatcttatactatatctctaacaatctctaacactcaaatatgctaagtctaataatctaataatctctaacactcacatatgctaactctaataatcttatattagaaatctaataatcttatattaaatctctaacaatcacatctttacatcacttgcctgcgcgaattctttcgagggctagctaccacttcggcttgagggacgacgacgacgacgtcttctctacaacatgcaaaaaaatgtattagtctaaacgcaaaggaacatatattgtatttcacgttttcaagtatatataatcatatatatatatatatattctaagttcaagaatcttttaattatctcgttcatacacgtttcgctcgtgttcgttctcacacttttaattcaagtgcattcacggtcgtcggcgtttcgttcacgttcgttcgcgtttcatttacgttcgttcgcgttcgttcacgtttcaatcacgttcgttcgcgttcgttctcgttcgttcgcgttcgttcacgttcgttcacgttcgttcgcgttcgttcgcattcgttcacgttcgttcacgtttcaatcacgttcgttcgcgttcgttcccgttcgttcacgttttgttcatgttcgttcgcgttcgttcacgtttcgct

SEQ ID NO: 25616 - DNA, 4098 bp, Oryza sativa
taattaacatatgtaaatatgacaggcatgatttaaaacttttaaaaattctaataatcatatatacctagcatatgcatgatttaaatttgttaataatcatatataactatcatattcaatacatacaaaatagtttacatcgtgtacacaacaattacggcaatacatcggcggtgacggttgtccgcacgtactttctcctcactactgttccttccttgtgatcgctacgtgagtaaggggtgtcttcatttgataggaggatgctagggtcaatcgtcaccgtgaaagtgggttgcccatcaaactgatcgtaatcctcgtcagtcttgtcctctactccgacgatttttcttttgcctgggagaaccacgtggcgcttcggctcgttaggccctttgcccttctttcctttgctagacatgtccttcacgtaaaaaacttgcgttacatcattggcaaggataaaagattcgtccgagtatccaaccttgttaaggtcaaccgttgtcatcccactgtcatcaatcgttacgcctctaccagtcaacctaacccattggcaccggaatagagggaccttgagaggtccatagtcaagttcccatatctcctcgatggcaccgtaatacgtgccagttgtaccatcgtgtcccatggcatcgatacaaataacactgttctggttcgtgctcttcatgtcttgggctctcgtgtagaatgtgtacccattgatctcatatccctggaatgtcacaatcaagccagatggacccctcgccaggaaggccagttgctggttaatcgcctcgttacccatgagatgttgtcgcagccacgcgggaaaagtatcaatgtgatgccatgtaatccatgcatcggacttatcgatgtttgtggcgcggactagagccaagtgctcctcgatgtaagaagccaccaatgaagattgttgcagaaccgtgaaatgggctttaggaataaattgttgtccaccgtcattattgctttccttccgagagtcccctttccccgtagtctttccccgtagtctcccttcatggcgtgattcaggtacaccgattgggcgaaggtcttcaataaattctatgtagaattcaatgacctcctctgttccataccccttggcgatgcttgcctctgaacgagcacggttacaaacatacttcttcagaacgcccatgtacctctcgaaaggaaacatgttgtgtaggtacacaggcccgagaataccgatctcttagacaaggtgacaaagcagattcgtcattatattgaaaaatgaaggtggaaatatcaactcaaagctgacaagacattgcaccacattattctgaagggcttctaatctatccggatcgatgaccttctgcggaattgcgttcatgaaagaacatagctttgttattgttgcccggacattgtctgggaggataccccttattataactggtagcagttgtgtcatcaacacgtgacagtcatgagactttaggtttgtgaacttcttctccttcgtgcttattattcgctttatattcgtggagtatccagacggtaccttgatgctctccaagcattcaaacatactttccttctctgccttgctaagagtgtagctggctggactcaagtaatggttgcctttctcctttggttccgggtgaaggtcgccgcgttgttccatatgcctcagatcattacgtgcttccagtgtatctttcgactttccatatacacctaggaaaccaagaaggtttatgcaaagtttcttagtgaggtgcatcacgtcgattgcgtggcgaacgtccaagaattcccaatagggtaactcccaaaatatggagtttttttccacatcgccgcgtgaccatcttcgctctctataggctggctgccaggcccctttccaaacactactttaagatctttcaccatagcaaacaccgttttcccgctgcaatgtttaggcttcgtacggtggtctgccttatattcaaagtgcttgcctttcttccgtactaggtggtttgcagcaagaaatcgacgatgacccatggacacaaccttcctacagtgcttaagatacatactttctatttcatccatacagtgagtgcaagccttgtaacccttgttggactgcccggataggttgctaagtgcaggccaatcgttgatggttacgaacagcagcgctcataggttaaacttctcctgtttgtcctcgtcccacacggggacaccttcctttttccacaacagtttaagatctttgaccagtggtcttaggaacacatcgatgtcgttaccaggttgcttggggccttgaataataatcggcatcattatgtacttcctcttcatgcatagccaaggggggaggttgtagatacacatcgtaacgggccaagtgctatagccgctgctcatctctccaaaaggattcatgccatccgtacttaaaccaaaccgtatgtttcgtgcgtcctttccaaagtctttaaattttctgtcgatgtttcaccactgcgaaccatcggcggggtgtctcagcatcccgtcctgttgacgctcttcagcgtgccatcgcatcattctagcatttcccttgttcctgaacaaacaccttagtcgtggtattatagggaaataccacatcaccttagcaggaattctcttctttgttagctgcccgtcaacttctcctggatcgtctcgtctaatcttgtatcgtagtgctttgcaaatagggcatgcttctaggttctcgtactcctcaccgcgatataggatacaatcattcggacatgcgtgaatcttctgaacttctagtcatagagggcagactatcttcttagcctcgtacgttgtctcgggcaatttgtttccctccggaagaatgttcttgacgagtttcaataaatcgccaaatgccttgtcactaacaccattttttgccttctattgcaagaactccagaatggtatccaactttttgtgcccctgctcgcaacctgggtacaacgacgttctgtggtcctctaacatcttgtccaatttatgggcccccttttaactttcgcagtcctccttggcgtcctgcaacatctgaccatggtcacccgcaacgtcgttaccatcagcatccctttcctcctcgcccgtttaattttcttcaaatccagcgtactgagcaaagtccggaatattgtcgtcttccagttcatcttcttccatttcaaccccttgctctccatgggatgtccaacagttatagcttggcatgaaccccgactcaaacaagtggaaatgaatagtcatggatgcagaatactccttctgattcttacacttattgcatggacaacaaataaaactcttatgcctgttagcttcggccactctcaaaaaataatgcacgccgtcaataaactctttggaccaccggtcagcgtacatccattgccgatccatctacatgatatgaaaaaaaatcgtacacaaataattattcgtacaataatgacagtcatacaataattataaaataattacaaactctttcaacagtcatacaataatgacatatcattattcatacaaaaattataaaatattacaccaaataattcttatttactatttctaaagttttaactaatattaatgtgttgtacttcttttaattttcattttagtttgttttctattatttaagattaactttcactatattttccttctcaactattttataaaaccttctttagcaaataaacaaaatttctatatattctttcttccccacacaaattttctctctcatcaacttacaactaaattttggagacaaaaaagtgtgcaaaacatagctccaaatgtaatatgacaaaaaaaacattggaggatgaagttgctaaccttttaggcacctccgatttgtatataatcaccaaaataaattcactagaaattttggcatgacctcccctcttttttgaagaaattttgaagctgctcgggcagctggaggaggaagaagacatatatataggggtgggactttagtcc

SEQ ID NO: 25617 - DNA, 31299 bp, Oryza sativa
gggactaaagttaccatctttagtcccggttggtgttaccaaccgggactaaagatcccggggggcctgacaagccctgacagcatttgaatcgggactaaagatgatattaagtcccggttggtgttaccaaccgggactaaaaatcaaatatgcccgttaccctttttaaccgggactaaagatcatctttagccctggtttttattgcaaccgggactattgtggaattcggccgaccgacgaacgatggtttctccactagtgaatactcttagtaccagtttttactcttataatgtatattgaacacatcagtaaacatattactacacggtggcgacaagatcatggctatatcaagaggaaggtggtaattgttttactcgcagaccacaaaatatcagtttttactcttataatgtgtattgaacacatcagtaaacatattactacacggcggctatgacatcatggactatatcgagaggaagatagtaattgttttactcacagaccatgaaatctaaataatattggtaaaagaattactagcgttgtaagctggtagtaattcttttatgaccatctaaatatagcatcatacgatgtggaggcattcatgcgagtaaatttgttactttagaatgagcagatgtgggaggctaggagtaaatgaaaactccacggagtaaattcgttacttttgagacgtgcggagatactaacaaatattttactaaaacgcgaaaagagaaaaactatagagaaggaatgaataagagaaaaatctggatggttaatattttaccaggcccattgataaagcatatataagatggaaaagagaaaaaagaaacacggaaggtggggtggtaaaaaacgaaaaaaaccgaaccgagaaaaggtgggatgcggaggaaaggtggggtgataaaaaatggaaaaacagcaaggagaaggcgttgtacggcgctcgaattattattcgtggaatagcgctaccgtatattatatacaaattttaaaccctccaaatacttactccctcctagggagaatcaaaccagtttgattctttttgcgacaaaaggagtatatgtgtgaatagtggaagtactcccttcatacctaggggtggacatcaggctcgctcgttgggataacaagctagctcgactcggctcattatcataatgaaccaaaaggctggctcgactagttcgttagctcgtttagctcatgagccagaggaagaccaaacgtggcatgccgtgaggagggagaaggtgagctcccagggacaaatgacagagggcagtgtcaaaataacttggttttcaaagttcatactttgtcttaaaataaattgatttctaccatgttacctaatcttgatcgaatcgagaagttttatcacttcaatactccttaccttccccaccaatactattttgaattaatgtgggacattttgatctttcgtactcttcactaaagttttctcgagatgtgagtgttacacttattttgggactgaggagcagtataagcatttatatattattttttggaacaaaagcaatgatgtatgtgtggtgaaacctatggagaaaaccggcggactatttcttaaatcatatttctcataaataaaaaacactattaaaatttgagaggtatccaaatcacccctcaatccctagtcctaggggctctactctacagtccccatcgacgattacgaaacatgagaaaaatcgaaaacacttagcatcacgtgtctaatgcacgcgaaatatcaaatgcttcacctagtgggtcccacctagccatttattcccacctaccgcaatgaatatcatggaaattgaatctagacaacttataactttattcgagataagacataaaacatataaactagaatgaaatgagagacaagtctcttaccccatgcatatagccaatgcaccgaaggcaaagaaggagggggactcgagcaggccaatggagagacctcacgaggggaatttcatgcaaagatgccgagacttttaaggttgtgttcgggagagcctcttctcaactttcctctctcgtttttcgcgtgcataattttcaaactactaaacggtgtgttttttaaaaaaaagtttctatacgaaagttgtttaaaaaatcatgtttatctatttttgaaaaaaatagctaatacttaattaatcacacgctaatggaccgctccgtattccgtgcgcacagttcccggttgggaaagctggcttcgaacacagcctaagtcaagaagcattatgtcattgacatttttttttcaattatatgttgaacacaaaacaacatgcacaccatgctcatacacctctaagtggcatctcttattacacaaaccaggtacaaatccctggcctcattaataaattctcatcgaaaatgaactttgtttaaccttttgggatttatataccttcctaacaatcgaaaaaaggcttaaaacctaattaaacatattggtatacacacagaaaaaagattacatccaaatgctgaacatcatgcatcctgtgaatataccaacaaaaacactaaattactttacggtgtcactcttcaagttctgttcccaaaataaaaaaaataggaacactaagggttgttttcatctttggtgtcggctgatggagttagcttaggagacagccgtggtctcttgttttgattttcggtgacggttgacggagctagcatcagagacggccgtggtctcttaaacctgttccttatctcggacagcacactcgggtagctctgtatcagattatagtactccttagtcgttgccacctcggcgaaattttgtgtattcgataggaatacaagacaggacgttcttagcttcggatatgatctcgtctccgccagctccagtgttgatgtcaccgtgtccgtggtgatgtcagcgcagagcgtgtcctcgcacaaatccttcaacgtatccactccgtatcgatcggcggtgacgagcaggtgctgcaattcgaagatccaggaggactgatcgtctgtgtcttttacacaggtgggcaggtcgttgcagtagatgtagtggagcatgtgcttgaaggtggaggcgctcatgtcggagatggtgatgcactccatcttgctctcggccatggagccaagtagctctgccctaaacacctccgactgacgcgccattatgaggcggtgcgcgtggaaactcttgccgtcgacgtcgaagcagacgtcggtgaggtctcgaccgtttgacatggtggcaaggcagtgggctaacaacgagtacggcgaccgcggcgacgagggaacaaagacaacccagcacaacgccgccaggatgccgccttttacacagttggccaagaggtgatccctcgaggctaccagtttgcagctagcagctaggttgctcccggcgacgggcggcggcagcttaggactgctacctgcagcggcggacggcgacatcaccgatctggcgaacggcggaagaacaggcgacttggtatcgtccaagagtgccatgtcaatgaacaccttgtgcgctctcgccaacgactgagctcggtcgctgtttaccgtcacggccagaatcatcatcacctttctctcacccagtaatgacggcacgaaaagagatgcttcgcatgtgtagccattgccgatttcgcaggtctccttgactatgcgcccgacgggccggcgtatcgccgccccgtcaacccggaacatgaagtggcggttgtcgccgcaagagacgagcttacacggcgagctgctgctcgccattggtggagaaagagcggcggcggcggtggcggtggcggaggaggaggggtggtcggcaaaggtggaggcggcgattcggtggcacggcgtgtatgcagaagcagtagcgtgcaaactgggaaatcccgatggattatattgcgatccatctgttcagagttcaactggacttagatttggtcaaatgtatcggggttccagacgatatacagaagaaggttcacgtaaggaagcacacaaagaactacgagatttattttggtaaagaaggagcaatattggcatgtgctattggcaattgcaacgtctacaaaatctttcttaagagcgtgaatagtatctttgacaaccattactacgtaccatataaactatctccgcgctgcatacatctctatctctactctactattataaaaattaaaaatacttccgctccgctagaattttggtacgtcatccgtgtttgaatcggttttaattttattgttcggtcgaatccttcctttctttacttacgccaaagtgtccatcttatccgagacacatgcgaattaatttgggcccgtaccttttcacgtgccccttgccacacgtagcaattgggctcgtgcctgagtgagttttccacacgcgcctttatgtgccactgtgattgggcccataacgacctcgcgtgcgtgattttccgcatgcacgattgggcccacgatgccgtcgtgtacttgatttgcccttgctgcatgttcgattgggaccgcgtcgtcctcgctcgcgatttaaaaattggagatgcttttttgtcaaagctatgatacgtcatccgtatccgattctgttcacacgtaacattcattgaaaagtcacgactcgcgagcaaactgcagaaaaaagttcatgtgatgtggataccaagcgaatgaaactcgcagagtccgcgtggatatcacatacgtcattgctcagatcatccgattttattcgtattacacaacacgattccttggacatgttagcatgatttcaagtcagtctctgtacatgctcatacgcactaccagggataccgttacagtaatctataaggatcaattttacttttgaaaaggacatgccaaccggaataaagatgatcgaagttgctgattctatccgccattaattcctgcccaaattgagataaaattggacgcaaatcgagcttgtatttgaatgcctcactgtttggcttatgcttcttcctataattcaaattttaaattggaatggattcacaataattctgaattttatcctatttagaatttaattttgaatttgacttttaggttttttatcgtactattttacgacatttgcttttgagttactaaaaaacatgtatataaaagatttgctcacacataatcttttatttagtaataagtgattcggattttcatacgaaataatgggctgtgattatttatccacccacacatatgtacaaattaaatgagctctatccattgcaatgcacgggcatcttttctagtatatctagataactatcattgcatatgctcacatgggcttgttaattgttatattctacaaaagacagcttaatttttgaccaacgtagaaagtaaggcaccacatcttgaaagacattaaaagataagcaaacgattgagcgcaaccactacattgactaactccgacacgtacaaaagctagtttttgaacgagtgtcagccaccatctttgctcttctgatagatcaacgaaacaaaactaacaccaccaaacaaatcagcaacccgaccctaatgctgacactatcaattggattgtagcaactcgaaaaatcaatctcctaggtcacattgggttaatttctggcaaacaacatagacataaaaaaagagatagaaaaagatcctgaacaatctacgtccagaaatattgtggaagataaaccctatacaagtttatagaccttacctctaaagattttattcaaaataaaccttaaatcttacaagaaccagatgagagatggattattttccccaatgcatccaacacaatgtggggaaaggaggagaggggggggggacccgagtggccggtggagaaaatcctcacaaggtgaatcaccgcgtgcgacgacaactctttagtcactaagcattacgacctagacaatcttttcagttacatgattacacaccacttttcatgcaccatactcacaaatccactgcttcccctccaactctgttgaccccatctcctctagattaggtgacctcgacaaataacaatggagttagggtcaaggttttgggagtggggttggggagagggaaaaagagggcaagttctccaggcttagacgaatagccatgggagttagcatcccgactgtgggcggtggagcagacatgcgacaaggtggtagcaacatcacggaagacggggttcggcagccggcagtgtacctatgttggcggtggcgaaggagctatcaaaggtgagaaagatgattgggtgggggacctgccatctgcacggggatagggagggctcgccagcgccattgccaccttctggtcagccggcaaggccaggaggtggcgcatggggtggtggaggtgttggcaacttttttgacaagttgacaagcacgatcgcagcaccttaagccttgcggtgatcctagagtcgccaaccacctcgatctagtgaagagctaaacctagatgggttttgataactaaaccgactagcggagccgatttctagataactacccgtctcgtgggcaaaacggaaggttttcaagacaaacctacaaagagatgtcgcactctcgcagcggcggcggacggtttacggcgcaaaccgacaaagatggacaaactaagagaaaactaaaagcaatatgaaaaacgattcgattgattgattgtagattttttttttacaatgaaccggccatgtcccttatataggagttggtcttgccctctacagtcccttctccatgtccaagttggggtagaaaccaaaggaaatccaaaacatgccttcctgagcaaggaaacttcgagacccgacgaaacacagtcggacttggacctgctggttagaccggccacacaccgccggtctgaccggccctcaaccggcggtctaaccgcccaacacacggcggtcagaccggcccactcggaggaaaccggtagacttccaaattttggcaatctttcctatcttaatcctaagtgccaaatttgggtgtaaacacatgcccccctgcctttttgatgaacaacgtgaatctaaaagcatagaacatgtttttgatcttaggacgataacccaattaccggccatagtacctcctaagcgtcttgccaaacgctcgggaagtatttcttcaagtatttgccgttgattgctcactgaaaacgctccccttgaagtgtctccaaaaagtatgcgtttcctcgaacaaatccgcacactcgataaggaccctcccaactaggagaccacttaccgaactccttggatcgagtacccaaaggcaaaattgtcttccaaaccaagtctccaacttgaaacaactttgctttcaccctcttgttgtacgccttggccaccctcttcttctctttctctatctcttccaatgccttcaagcgcttgtcgatgacttcatcaaggttgtctcccatcaatgtcttgtaatcttcacttgacaaatcatcttgcttgatataacgaagagaaccaagatttacctccaccggtaaaacggcttcttgaccataaaccaactcaaaaggagtgactttagtagcaccatgtttagatatcctatgcgcccacaattcttcggaaagcacctcatgccacctctttgggtgttcctcaatcttcttcttcactaacttcaacaatgtcttattactcgactcggcttgtccattagcctgagcgtagtaaggagaagaactcaacaatttaataccataagattcggtaaaactcttcacttccttagacataaaagaagcaccttggttcgtagttaatgtttgtggaataccgaatctatggataatatgcttcaaaataaaatcaattacctccgtatgagtcatattcttcaaaggcatggcttcggcccacttggtgaagtaattcgtagcaactagcacgaacctatgcccctatgatgacgaaggataaatttgaccaatgaaatccaaagcccatcatcggaacggccatggtttgattatgggattcaacacggcggcgggcgccaattgaacattgccgaaccgttgacaagcctcgcatcctctataatatttgaagcaatcatcaatcatcttcggccaatagaaccccgctctcctaagtaaccaattcatcttgtgggccgattgatgagttccacaaattccttcatgtacctctcccatagccactttagattgatcttcatctaagtacttcaacaagacaccatctatatttcggcgatacaaatctccatcaagcaatgtatatttgaatgcttgccaccgaattttctgatcaaccttaagtgtaggatctttcaaatattgaatcaaaggaattctccaatcttcttctgtttcctgggcacaaacgtccgaattcacaattaattcggcctctaaattgattgaaacgtgccccccagcgctctgcccagaaccggtcagaccggccacacagggccggtcagaccgctcggggttgccggttagaccaacggcatgaggccggtcagaccgcccctggtcactggtcagaccggccatgcaatgccggtcagactgcccctggtctccagttttgccaatttcgcacaaagatttaaaatcaagcaccggttcttctaataccagaaataatccctttttcacattatagccagatgcttgttgtgccaagtcatttgctctagaattatcatgcctagaaatatatctaatagcaaaattttcaaaattggcaataatatctaaacatgaatcgaggtacctatttagtgatccgtccaagcatttgtagactccggcgacttgttgtaccaccaattccgaatcaccaaaagcctccacgtatttagctccaaccatctccataacttgtaagccgaataataaagcattgtattcggcttgattatttgtacaataatactccaaacgaaccgatgcttcataacacatgccattaggtgaaaacaaaactacccctatgccttgaccttccttgcaagaagaaccatcaaaataaatcttccaagatataacttcaactaagcagaccttttcctcataagcaatatctacatgatggtccactataaaatcacatacaatttggcctttcatagatttcaatggttcataagccaaatcatattctatcaaagcatatgcccacttgccaattctcccacttagaattggcctttgaaacatgtgtttaataacatcggcttgacaagcaactatgcatgtactagataacaagtaatgcctcaatttggtacaagcatagtataagcataaacaaagtctctctataaagacatacctcgtttcggcatccaaaagacggcagctcaaatatgtaatgatatattccttgccatcttcctcttgcgtcaaaacggcaccaatgactttgtcctcggaggcaatatataaccgaaaaggctttccggctttaggcgctcacacaacgggtggggtagacaaatacctcttcaactcttcaaacgcctcttgttgttttgccctccaagtaaaatcggctttttttttcaagcgaagtacaggaacaaaagcatcgattttacccgctaggttagaaataaaccttctcaaataattcaccttacctagcaacttttgtacttccttcttgcatgtcggcgctttgaaatcacgaatcttctctatcttcttaggatcaatctcaactcctctctcatgcaccatgaatcctaagaacttcctcgccgacacaccaaaagcacatttaagtgggttcatcttcaaaccataccggcgcatcctctcaaaagctaacctcaaatcggctatgtgtccttccataccatccgatttgacaacaatatcatcaatgtagatctctaggataatacctaacaaatcatgaaagatcaaattcattgccctttgatatgttgcaccggtattcttcaacccaaaagtcatgacaacccactcaaacaaaccaacaaatcctgggcacctaaaagccgtcttgtacatatcctcttccgccataaagatttgattgtagccggcattaccatctagaaagctaatcaccttatgacccgaggtatcattaatcatcacgtcggctataggcataggatactcatttttgggagtggctttatttaaatctctaaaatctatgcaaactctattcttaccactccccttcttctccaccgggactatgctagaaacacactccgcataacgacatggcctaataaaccccgtcttcaacaaccgatcaatctcctatttgactcggtcatatagcaaaggattaaaacgacgaggtgtttgtttataaggccaaaaacccggtttaattggaagctgatgctcaacaagctcacggctaagacccggcatctcatgatattcccatgcaaagcaatcaacatattctttaagtagctcgattatctcaaccttataatcggctctcatatttttgtttacaaaagtcggccttggtttggttccatcacctatgtctacttcctccaatggatcggccgatgtaaacccttgtccaagcttctccacttcatcaaaattttcaacggcttcaccaatatcgttctttgtagaccaatattcttgcaccctcttttgtaaccactctaaattagcctctttactcattatacaaacttatatggcttagccgtgctacactagccggctttacagagataggtacaaatttgccatcggagatactaataaaatcatagctagaaagatccctccccgataagcattggatattcccatgacgccactcaaaagtagcatcggccattgcaacctcggccgatgtatccgcttgaacaatttcaacatcatcgccgtcccattgaattaaacattgatgcaaggtagaaggcacacaacaattggcatgaatccaacaacgacccaaaataacattgtagttaccttgcacatcgacgatgaagaaaacggttggtagcgtcttgtttcccacggtgagctccgccgaaaagatacccttcgcctcctttggttcaccattgaagccattgagaatcatgttggtcttcttcaactcatcatcctcacgccccaacttcttgaataatgagtacggcatcaagttcatggcggcacctccatccactagcatcctagagaccagtttcccatcaacatggcctttgagatagagaggcttcatgtgatggtttgactcatcgggcttctcaaaaaccgcgtctttaggacctaatgagaattgagcaacctcggcttcatccatagcacaaaactccatagacaacatacataccatgttgatatccatgtcttcttttggagatgattcacctttatcaaccaattgctcctccttctcttctacatcaaccggcttttccttctctatggatttacgcctccataccggtggtggtcgaaactcattgaatcttttatctctttgttcttcggcctttttctctcttatttcatgagctccaagacgttgcaaccttctctttcgagtagccatcaaatccttaggcatccatctaggattcggctctgttccaggaggtaaataatgccccctattaattttgtttgaagacgatgaagccctcacatcgccctttgcaattctcctgtcaaaccggcactggagcccggtcagaccggccgtagaccatcgatcagaccggccagatgcgccggtcagaccgacacttggcgcacggtcagaccagcctgaggcgtcggtcggaccgctgtcgggccggcggttggaccagccacatggctgcggtcagaccggccagagggcccggtcagactagccgactgcgatgagctggtatcggcttcagattttctatttgaggacactccaactccatctccagaaggtattggcacatcatgagaccccactttgatggtaattacttccgaagtccttgcctccaccttgatgtgctttcctttccttctttcttcatcagcccgatttttaccataaaaccggccgttgtttggtgaagacaaacgctcatgaattggcctccttagtccttcccacccttggttgaattgcattggaggcatatgattgaacattggcggcgttgccccccatggcatgtaataaggataaggataacccggcggcggcattggataagaaccccatgacatatcttgtggatgatgatatggaggtgaatgcgactgtcttggtgaatgaccaaatcgctccctaggaggtaatcttggtctttttcctttattgcgagctctcaaaccaccttccttctcatacttttttcaaaagcatgtcaaaagtcactttggtcttcctaggggctttagaagttgaagctccactcttattctccttccaaatgccaacctccggcttctttggcactatcatcttaggccttggtttgccaatgaccactccttttcccttagtagattcggcttgctccgaccgaatcaacacttttttattattgaaattaattgtattcaccggaaaaggatcatgatcaagcttcatcttggagccatcggtgaacttcaatcgtccttcatctatggccgattgaacctgtcgtcgaaacacattgcaatcattagtagaatgagaatgagaatcatgccatttacaatatgctcgacgtttgaactcttcttgagatggtatgacatggcctttaggtaatctaatttgtttttcttgtaaaagataatcaaaaattttatcacacttggccacataaaaactatatttaacctcactttgtcgatctttgcgaggagtcggcattaggttagagcaaacaaaaggcttgtttttattagtacatgaccactcggcaacatatatatcatgataaccctcttcctcactatcactagcctcagggtaatcaatcgcattaacattgggctttttgtcatatgatctaacaagttttttattatccttaacccggctttcctgagccagagccctttgcataagttgactaacatcaagaaattgttggccatctagtctttctctaagaggagcaattaaaccattaaaagcaagaccagccaaatctctatcagttatattcaaggtataacatcggtttctaacatccctaaatctcttaatataatcaatgactggctcattatacttttccttaaccgatgttaaatcacataacctaagctcagtttctccagtatagaaataatcatgaaatttctcttctaattgagcgcaagtatgaatagaatttgccggtaaagaagtaaaccatgtaaaagcattaccagacaaagataaagaaaacaagcgcaatttaaaagtatcactattagcctcaccacattgtgccaaaaattgacctacatgctcccatgtggtttcactatcctcaccactaaacttggtaaattcgggaactctataattacggggaaatggcacattatcataatagtcaggatacggctttttgtaaaccctagcacgattcctagtttcaatcccgaatctattcctaataatctcactaattatatcctccatattattaggcccatgttgatttggcggtggattaggtggtctaataggttgtgtttgtggcgcaatatgattatattggccttgtctagtatcgggaggataccccctagcaacatcattataagcattaggaacatgtgggggaacttggggactacttgtagcactagatacaggaggatcaaatgttctaagatgatacaaataaccaacattagtcattggatctattccctgtatcggaacaattgcgccggtctgaccggcccagggcccggtctgactggcatccagaggtgcggtcggactggcctgagtgccggtctgaccgccggggtaatacccggtctgaccggccgtttggccggtcggaccgacggctaagtcctggtctgaccggtcgtcaggcccggtcagaccggccgtgtgcgccgttccatcggttttactacccgtttgatctataggaggttggttagcagtggtagaggctttatcctttgacatgtaatcagccataagagggccgaatttaacccttaaaaacttatcaaatttaccctcaaaagttgcatctaacttatctttaaaagcaatcatagatgaatctattgtagatgctacttgttgttggatagattgtgttacctcatcattacttaccaagtcgggggcaagcttaggacgtggcccgggcttgatgatcacgccttgaggagtcctagtgcttgccctcatcaacgcctcccgtgtgagttcgttgatgtactcctccatagctttgcggtcctctccttcgatatcctccaatgtgaccggtatcacattggatggctccacctccgtcttggatggcggcttcgtcatggcgaaatcgaagttgagttgacgatgaacggatctcgtccccagtggagtcgccaaaaatcgtgttggcaacttttttgacaagttgacaagcacgatcgtagcaccttaagccttgcggtgatcctagagtcgccaaccacctcgatctagcaaagagctaaacctagatgggttttgataactaaaccgactagcggagccgatttatagataactacctgtctcgtgggcaaaacggaaagttttcaggacaaatctacaaagagatgtcgcactctcgtagcggcagcggacggtttacggtgcaaaccgacaaagatggacaaactaagagaaaactaaaagcaatatgaaaaacgatttgattgattgattgtagatttttttattacaatgaaccggccatgtcccttatataggggttggtcttgccctctacaggccctactccacgtccaagtcggggtagaaaccaaaggaaacccgaaacatgccttcccgagcaagaaaacttcgagacccaacgaaacacagtcggactcggacctgccggtcagatcagccacacaccgccggtctgaccggccctcaaccggtggtctgaccgcccaacacacggcagtcagaccggcccactcggaggaaaccggtagacttccaaattttggcaatctttcctatcttaatcctaagtgccaaatttgggtgtaaacaggaggagcatgagggcgaggtgaccatgtggaagggaagaagggattagggttgggaattgttgcacaaatctcaaagcgtataaccgtctaaaattcgtaaggtttcgtaaggtttttaggtgtgttttctatcaaatccatataggcagtccctttctttaatctaccatctaaacttacatccaaaatatagagtacttttaatttatcatgtaaatgttgtagccatttaagttaattattacttttattttgctatagtattaagctagattaattaacattgtggtttagcaaaacattagaaccatattacatgtggactatgtgccaaaactcttatattttttaaaactttaaccataatatgtgggttttttaaatttattttacctctaaagcagttgggatttatacaccttcctaaggatgggaaaaaacaaaaaaaaactaaaaatcttgatagaaataaacactactaaaaaaatgacatcagtgctgaaaatagacccgacataaaacttttggcactaatgataccctcccccctgccaaaaaatcagtgttgggtctctgcccggcacatatgggcctagacgcacataggcaaaatctggatagaatcatgtgacaggtaatttctaaacccaacactgatatggacaaaatttaggctatggaaaaagtacaaaaatatttttaatactcttactatccttactcatgtatctacaaagccacaaccactattacctattttcgcaagtcgtatataattcgtgtcatggcaaggattcaaacttgagacttctacctcgtattcagtttccttaccaactcacttacacatcaatcctgttagcaaatggtattttcccttttaagcctttctaaacccagatttgaatcatgaatttgagtataaaaacacaaataaaaatgttgtcaactaccaaattatagatcttgttgagagctacaattttcatataaactgtcgtaatccgaatttgtctgaaaaagttatgttcatatggtcaagcttatcactgcctggtcataataatacccagcatgaccagtattctaaaagcccggcactgatgtccttttccgctaaaagtagagtcaactcgttccaaacgggaaaacccgacactgatgtgttactcatcgatatcggttagtgacaagacccgacactgatatgtcaccgaacaatcacagccagatggttgtaagacccggtatcgatgtcttcttatcagtgttgtgtgaagtaggtgcataatgcgaactcgttctttgggctgaaaagcatggtcagtgctggattttgtcgatccggcactgatgagaggggcattgattgtaacaccctaggtatccttttacctacaatgctatacactatggaataaaaaccaccaaatcctaaatccattaagaattttgacagagtctcccctctaaatccattaagaattttgacagagtctcccctgtaaatatggatttccacggctggtagttaatatattaaactattaataatattattcccacagtgcgatccatccatataatccatggaaataaactaatagatatctaaacgattattacaagaccaaaccatgatatagtttaagtgtcattatgtacctaagtaatatagtttgatagtgtgtagataaatgtgtatataagagtgctacttcccgcccttgcatgccgatctcaatgtgtacctaaaaccaaacaaacacaatagtgagtacaaaaatactcagcaggtataatatggaagtagaaaacacatatacacatgattggaaatagagaatgagcaaaaagttttccttctttgaaaagaaatagcaaggttaaaggaattagtagttcccatcccgagcatacatgaaataaagtagtattttccatcccgtacagttgcgaatacatcctaacaattgccggcaagaccgaataagcgtgatcagcgcttacccacatgaacatgaataaaaccagatagcatatacatgactcgcatggaacatgattaattgaaaccggaaataaggaaacaaattgaaaccatattgcacatccatgacaactatggaacttgaattatttactgagaactagcatacggaatattaaaacaaggataacgtcgtaaacataaaatacacttgaaatctaaatggcatgaacaacagtctgaatataagcagccacttatcacatagaaatataacggaaataaatagatagagccatcaatccataaatcacacaattagtttgtcatgtacttgcatttaaccttgacggtaacccgacgaaccaccttccacaccagatctctccacacatatggagcaaaactacgaataaaccactgtattcaactaatgatagttacaaaggatatttactaaaaatcaaaatctagaacatataaactttttacctatttgtattaaacaacctatagtagttccattactgctttatgcataactcgcaaaccgtctaacggaatctggcaaccaatacaactttggtcatctagttaaaaactgtctacaacttttatgttgggtgaaaaatcaggttacgcttctgtaggtctcagattaaggaaacacgaattctccctatttccagacccgacagtagtactttttttgttgtttctgctaaaccgtttatcggaatcaagggaaactagcgccgttagaaagatatcaacgatgactacaaactttatttaggacaactaacctgaatcctgatgatttaataccagatttgaaaatacggtttccggcccgtaaacaaaaacctcaaaaattgcacgagcggctatcgaatcactttctatttgaatcttatagttctagggagtaaacaaaaataccgttacagcgaggatactaaacaaaagtaccgttacagcgaggatactagaacggcctttaccttcccttcttcctcctgttctcctgatcctctgcactctgaaccttctcctctctgtccgatgcagcagcagccagcagcagaccatgcagcagcaaccgcatggaaccattagtagcagcaacaaacaaccaaagctgtagccatagatcagatcgacaacagcaggagctcactgggaagaagcaaaacggaaaggaaccatcggttgcgatggatgacgacggttttgcggtctctggcaatggccgtggtggcggcgcaaagacggcggctgcaaccagatgacagcagcagtggcaagagcgcaggtgcggtggcggctagggctggctgtagcgatctctcctttattccttttttctttttttttatataaagaaaaaatgcctgtgcgttgcaatgggtaaagttggttttttttacaagccgagtaataaaataaaatattgggatcacaatacattataattaaaaagtagcccattccgtgcctgtaaaatggtggagttatcctcctatcaaattcggctgaatctttctcgatctcccaaaattgatcgagtgcttttaatctactcgatctcctctttctgtttgtctactcgatcttctctttcagtttttttcaaaatcagagctaaccaaactcacccatcgaccattatcaactacggttaaatatagattaaattcaacaaattaaatccaaaattgaaataggaaatcatggggaacatgatgataaaggtgtgggaaatcgatttttataatcaattgaaggaggaaatatatgggatatgggaggtagcctagctgcagcttaggcttgcggattggataggaggagatcggaaaaaaaacggaactgacccactaaaaaattggaaaaaaatacatgtggagaagggaaaaaccgggccaaaaaaagctaaaaaagcaaaaacatcttaaatttttataataggtaaagatgagactaaaaaggagatctaacgcccacatcatttcaatccacaagacatcattcggactccgattactataaatttatagtccatgttgcattactcgacgagctctacgcatccacggttcctgatcgcctattcgaaacagtttaaaagttgaacttttacgtgtatattctaatatttttcaaaatacattaatttgaaactcgggtattacattgatgtgctgctccatggtagtgaaatgattacattcaaatgctgtgcatcacgttttatgtagatatatgccaacaagacctctaagtactaacatgatggcactctctaagttttctatgtactaatctatgctttctataaagttacaagcccactaagtcaggcaactatatatgccactttatcaccctctagcaataattacatatttaatcatgcaagaatacaacataatttacaatttaattaattatacaaatcaaaatgcaagcatatccaatcaccacccctcatatcatttgcataatattttaacaaaactatctatcacatttacaatatttaacatatattgatcaatatgtttcacactaaagcacgtgtatcatttgactgataaaccctaatgtttcaactttttttctttttactcctagcttgattgtaaaaaaaaagttaatattggaaatttcttagtaattcccgctgcaaaacgtgggaaatcacctagtactaatatataaaataggccacatcaccatccaacactagtggagaaacctttttttactcccggttggtaacccctttagtcccgggtttccaactgggagtaggaatccgggactaaagatctggttgaaataatggggaccaaagatctatctttagtaccggttggtagcaaaaaccgggactaaatatagggatctttagtcctagttggtaaagagagggtagcggcagtctagatggcccccttttcttttttgtttcttttttgttttctcccaaatcgagtggcatgcacatcccaaaccaaacgctaaatctccaaatcaaagtaacatctcaaatccacatcacaaatcttaaagttacttatacgcacaaatcaaatacatcacaaatcctaaaaaaattacacacaaatcaaaaacatcacatattatacatctcaaatccatacaatgaatcataaaattatacatctcagtgattcacaaaataaaaaaaagaaagagaaaacaagctccaagcacagcgccactactactgctactactcagtgcaccgtgtttgcagctgcgcgcgcatgtgctccccctgcaaccgcacgtttgcaccacacgccgcgcgtccgcgtggcctcctccgtctccaggggagggaggagaaaggggagaagggggaggagaggggaggaggaaggggaggcgaggatcggctgtgacctgtgaggaagtggttgtgattgtggaggagaggataagggttagggattatatactacgtgttgaattttagtcccggtaataccaaccgagagcaaagatctaaattatctttaggatgactaaagtggtgatctttagtcccgattggtgtcaccaactaggactaaagatcctcgccccctgacatgcctctaacagagaatgaatcgggactaaaaaccatctttagactaaagatcatataatggctgtggggttttcaaccggggctaaagatcatttttagtcccggttctttttggaactagactattgtggttttgggtcgacctagtaaagatcaattctccagtagtgcaagtatcctacatgacctataccacaatgagataagactctctatttgctagtcctatataggacacagaccacaacaacaaaactagcacagacctctaactcagtaacaacgacgaaagtagcataacgataatatattagacaactggaataacatttttatggggtttataatatacacacaacaaagctataagttttctttaaaagaaaacccgtggcaacgtatgggcattatggtagttcattctgaaattaattaacatgataacaactgtaattaagggttgttttgatctttggtatcggtcgatgggaatttcggagttagccgtggtttcttaaacctgtcccgtatctccgtcagcacgtccgggtagctctgcaccacctcgtagcactcgtcgttggtcgccaccgagtaaatctgcgtgttggacaggaactcgaggcacgaccccctcagcttcgggtacgaccccttctccgtcagcgccagcgtcgaggcgaccgtgtccatgttgatcccggcgcacagcgtgtcctcgcacgcctgcctcagcgcctccaccccgtacgcgtcggccgcgacgagcagccgctgcagctcggcgatcctcgtgacatggtctgcctcgccgtcatcgtcgtcaccgtcgccggtggccggtggcggtagctggttgcagtagatgtagtggagcatgtgcttgaaggtggtggcgctgatgccgtcgatggtgacgactgcggtctccgtcttggtctcggcgtcatcggagccgaacagcaagctcctgaacacctccgactgcgccgccatcaccaggcggtgcgcgttgaacctctcgccatcgacgtcgaagcatacgtcggtgagagtactgtccttcttgttcgacatggcggcgagacggtggcctagcgagtccagccataggcaaggtggcaactccgggagaaagagcacggagcacaccgccaccaggacgccatcctgcacgcagttctcctcgaggtaatccttggagacgagcaacccgcaccctccttggttgctcccggcggcggcctggatagccatggatctcgtaggcggctgcagggccaccgacctggcattgtcgacgaggacgagatcgaccaccaccttgtgcacgtctcggtagcgtgggccggacacacccacggagaaggcgaccagctttctccgcccgatcagcagcctgaagaacgcctcacacctgtacgcgccgctgtcgccgatggcgcacgtcgtgcacagcgtacggccggcgacggcgggtcgcctcgcgcccgcgtagtcgacccggaacgtgacgtgccgaccgtcgccggaagagaggagcttgcacagtgggctgtcgttgataacggctacaccttgatcggtggtgctggcagctgccattggtgacgtcgagaaaggagagtaggtggaacagtagggggtggtcgggggtgggagtgaaggcgtcgatgtggttcgggttggttggcacagcatctatactatgcagaggcggcaaacgagaaatccgattggttatatttcggtccttatatttagagttcggtttggaattatatctgtttatctattcggtttcaagaagagacacagaaacgtattgcaaaactatgtatgtagggcaacccagtgtgtatatagtagtagtcgtcgtccagggggccggtttgattttggttaggaggcaaatgttgacaaccgcagtatacattccttctagatatcagagcaggaacaataattttgacaactattaccatattaactcttcactgtatctcttctctatctctatctctatctctatctctactattataaaattaaatatgtttttaccggtactttggtacgtcatccgtgtatgggtcggttttatgtccgtttgcttttagaaatacaaattcgtatttgagtcggtttttaagttcgttcgcttttgaaaatacagagaaatcgtataagaaatctctttaaaaaactcgcatgctaacttgagacgatcggactctaattgcagctcatgattttgtaacaaaatatatatccaaacgaatttaacacaatgcatttcatattaactaaaccatatatctctatctcttctctactattataaaaattgaaggtgtttttgccgatattttggtagatcacccgtgtttgaataggttttaatttaatgtttctatccaagcaaattaattgggctgccttgaaaaaaaaacgtgtccgattccccgtaaagagggtgaaaaaaccgtccgtaataaaagtaaaaacagagcgaaaaagtcccccaaaagaaaagtctgattccccgagaacggcgaaaaaaagtcgttccttaataaaacaaaagattcatttttttatgcagcaataaaaaaggcagttaagcagtccgtgaaaaaaatccatccaaataaaaaggcaaaaataaacaaaaaaaaagccttcaaaagagaacagaacgtttccgtcgtaatctttacctattataaaaattaaataattttatactcatcgaatttttgtccgttatcccttcgttccaacaagccgtcttgttcgttactcggttcccgaccacgcgcaggtatgtgatcggccgcatccggctctgtttatgacgcgtacaatgcgttagacagctcaaccaagtaccatgtaactaaggtttatcctcttatttaacatataagtgtgttcacgggtgttaggacaaaactcaacgagtactgtatgtgtattgtctctgtattcaaatgtgatcaactgtgagcaatgtttacatatttatacaaaggtatataagagaaaattactttattgtgagcaatgtttacatatttatacaaaggtatataagagaaaattactttattgcccctagttctatagtgaatctagagtggctggccggtgggctagcccttgggcagagaaaatactatgacaaatttatactgtagcatcgatggtgcaacaggatggcagagggaatccaagccgttggctccatcgttccaacggttataatgtgctccaactgataaagttgtagtcgttactacaacaacaccggatctcacttcttcaagacggctttcagatgctgcacctggccactgactatccacttaattaatgcaaggggtcttgctatcggtgaccagctcttcttcacaaacacggaacgtcggcagatgcttctaggtgagccccatggacctgctcgacagttgagatggtttttttaatttaggcaagattcgatttgtacaacggtgtctctgttaatctatctttatctttaccatactataatggagcaatttaggtagacatgctagaccctcaccgtttgattgtgaaatccaatggcccagatcagttcaacgatcctcctagagtctcagtgaaatcattcgtgccaccaactaatcccacacatacgcccctccctctggtgctaaccacgcctccaaccctccacaacctacacatagatggccaaataggctgctcggcccgaccatgcccagccgtgagatcagtcatgccgacatggtccgacctacacgccgaatcgggctgtgtccgttcgtgggatgcacgacctaacaggggtggatttaatgtagaaatgatgagggccttggacccttgtcaaaattacactccttaggtatatcggtatatccctagtagtatgacctatgggcccccactttaattgggaggaaggacctcagtccccaagtttttgttcctttcatcgcaatcgcgcacgcgtggaggggtcgaacggccgctccctttctctaattctcccagattccatcaactggcaaatccgcaaattatggatcagggaagggaatagaaagcgaacccaccattcgtcgcgcttccccgcatgccacacagttcgtcttcacctgaatcgccgctttctgccttcgtcgaccgctcatcatcgtcagcgcctcagcctcagcagcgctgctcgttctctcctctctgcctccctggtacgtactcatccccttgaccctctcctccctttcgtgctatcaatagttataggggatggatccataagtctccctcctcatgtgctctatctaattagcattcccatgatttggttggtgagataatgaacaatttttttattaaaaatccagcagctatgaacaccaccggaggaagttctagtgcaaatgcatctagcccaatactgagaaaaatctggactctggagtgcctcaaccaattcatatggacaagtttcctcggatacagtaaaaggaatagaatggcagttatcatcccaacatgaagacataagaaaatattagatacaatctctaatgacgtgattgtcgattgtttccataaaatgaaacaccgtcgtgaaaagggtaaaaaggatgccatgtactatatttataaatcttatttcttatctatatatactagtttcagtaatatttatatggcttgtgttaacttatgttgtttctatatacaattgacattatttgaaaggcctatctatatattactattaaaaataatgtaatatctcagagtttttagaagctgcaataaggtgagtttcacttggctttctaactattctatgagttatatagatgcatgcccccagtcattttttatcctgcgtccgccccgcgacctaataagatgggttgtgccgtgccggaggcacgaaagcccatcgtactcgtctttagaataagtctattttgccttccaaatctctttgggtcgtgccatataggctagaataagtctattttgccctcaactatttgcacatgccttatatggctgacaataagtctatagttcctccctcatccattttcctccgatcattggaccgtgccatgctgggccagcccaccatgctgaggcagaggccgaggcatgacccaacggtcaggccgggttggcacgggcccaacatgtgccgtgcctggaccggggcaaaaccccataccatgggccgggccatcgggcattcgggcctaggcgttttggccatctataccctgcagcccgttccccccaactcccgtcgtcgctgccctccagctcccatggcctatgctttccatcgctgcaggctaccccagtcgctgttgcgccctccaccttcactgcaccgttctcggaagccctaatgggcgattagtcacgccccccgcacggcccgcagtcagttgactcctctagtctctcctatctactacatatatatacgtatataaagtatatatgtatgtatacatattgtatatatttattatttttttaatatgtatatatttttatatacaaagtttgtatagttatatataaactttgtatatgtatatatacaaaatataccaattttgtatacgtatatatacaaagtttgtaaatgcaatataaactttgtatactcatttgtatacgtgtgtattaaaaaaccgaaaaaactgaaaaagatatggaaagaaaaaacagaaaaaagaaacgtgcgccaaaaaagaaaaggaaaccggactaaaaatatacgaaaagaaaaaaaaaacagaaaagaagaaaaccgttcgttaaaaaaaaaaaagggagaaaccgcgtgctggccgcgtccccctctccgcgcgggggaggacgcgcgcggctgagcgctcgttagtcttttcagcgggtttgccccaggatatggtactggtggcgctggacaaagcagacagcgattcgcgacggcaagcagtacatgtggttggtcgttgcatgcgtggctactgttagaataaatgggctggcccgatttttctattaaattgcaaaggcccataataaatattaaggataataatactaccctgggaattaaacgaggagtatctcaatttaaatagggagttattggaggctccctgttgaccggttgaggtgtggatcggaaagccacacgcgcgcgcgcctagcctgtgctgcttctgtctgcttccccggttttgatcgcttgcacgcacgagagatcggaacgagcagggcattcagaaccacaccattgcctgagatctgcaccgggtaggcgggtgatcaagtttttggggagtgcttccgcacgactgctctcgtcttctgttcgtcgacgttcgtcatcgaccgtacgtctgcatcaccatgtctgcctcacttgcacctagaaatggcgcatcgagagctggtgcacagaacaacaacaccaacggaggcagttatgcctcacaatccagcggagggactttcacagggtataatcctctactgctatttcagtttttgatatttctgttagtcgcaatgcaattgcgttctatgtatgaagatgatgtttactctaccttaagcatgctcctgtttatatttgattttatcactagatcacctcatattgttcatgtcatgattattgtcttaatattttggattaaaatatgctgatatatgactatatttccaacaatccaaaaacctgataggtcattttcggtagttgggtttgctgctgcactgaaaccacatgcttttgatggttctaattataagaggtggaaagcacgtacactactgtggttgacagcgatgcaatgtttctatgtttcacggggcaaacgaagtgaaccacctgtctctcctgaggaagaggttaagttcgaggcttcggattgcctgttccgtggagcattgatcagtgtactcgctgacaatatagtggacgtgtatatgcacatgccttcagggaaggacatgtgggatgcacttgaggccaagttcggagtttctgacgccggcagtgagctgtatgtcatggagcaattctatgactacaagatggtcgatgaccgttctgtagtagaacaagctcatgagattcagatgctggctaaggaacttgagaacaacaactgtgagttgccggacaagtttgtggtgggtggtattattgccaaattgccaccttggtcggactttgccacttttctaaagcacaagagacaagagttcagtgtttctgatctcattggctttttgggtgttgaagagaaggctagggcaaaggacaaccggggcaaaaaggttgagggaggttctagtgccattatggtacagaagaaccctcatgcatcccacaacaacaaaaaagtcatgcctgatgtcaaacccaaggctacaaccaattttaagaagaaaggcaagggaaaggcaaagggagactgcttcgtgtgtggcaagtctaggcattgggccaagtactgtcctgagcgcaaagacataaagtctgccaacatggtcattagcgagggcggaggaacatcggggtacggtaaattattacctatagttctctctgttttttcattcacctgattggtaggttgatactggtgctaatattcatgtatgtgctgatattttcctgttttcttcttatcaggtcgggagaggttcctccttgttcatggtgttggtacggtcgatctgaagtttacttcgggaaagaccgtgcagctgaagaacgtgcagcatgtcccttcaataaagaagaatctagttagcggctctctactgtgtagagaaggttttagacttgtgtttgaatccaataaatgtgtcgtatctaaatatggaacttttattggaaaaagttatgacagcggaggcttgttccgcttttctttggatgacatgtgtaataataataatgttgtgaaccatattagcgagaatgatgagtccaatgtgtggcattcgcgactctgtcatgtgaatttcggttgtatgacgcgcttggctgacatgagtttaatttcaaaattcactttggtcaaaggtttcaagtgccatacttgtgtttaatcgaaacaacatcacaagcctcacaaggcatctgaggcgagggatttggcacctctagaacttgttcattctgatttgtgcgaaatgaatggcgtgtggactaaagggggaaagaaatatttcattacactgatagatgattgcactagattttgttatgtgtatctattgaaaacaaatgatgaagcattgcattacttttaagacttataaagttgaggtagaaaaccaacttgaaaggaaaatcaaacggttgaggtccgatagaggtggggagtattttttcaatgagtttacatccttttgcgaagagtttggaattattcatgagagtacgcctccctattcaccccaatcaaatggggtagccgaaagaaagaaccgtactctaactaagatggtgaatgccatgttagacactgcggggctttccaaggaatggtggggtgaggcagttttgactgcacgtcatgtcctgaataaaattccaatgaagcataaggaagtaacaccattcgaggagtgggaaaggaagaaactaaatctctcatacctacgaacatggagctgtttggccaaggtaaatgtacctatagccaaaaatgtaatcttggaccgaatactgttgattgtgtgttccttggttatgctattcacagcatgggttatagattcttaatagtaaattctagagtacccgacatgcgtgttggtacaattattgagtccagagatgctacattctttgagaatgaatttcccatgaaaaatacacctagcacttctagtcaaaaaactgtcataccccatgagcactttgcaccgatagaacacaatgatcaaacgcttgagggaaatcctgaggaggataacattgtagatactcgtaagagtaagagacaaagggttgcaaaatcctttggagatgactacattgtatacctcgtggatgacactccaagaaccatagaagaggcatattcatctcctgacgctgactactggaaggaagcagtacgcagtaagatggactcgattatgtctaatggtacttgggaagtcgttgagcgttcatatgggtgcaaccctgtaggatgcaaatgggttttcaagaaaaagtttaggcttgatggtacaattgaaaagtacaaggcaaggcttgtggccaagagttatacccaaaaagaaggcgatgatttttttcgacacctactcaccagttgcccgtttgaccacgattcgagtactacttgctctggcagcctctcatggtcttctcgttcatcagatggacgttaagacagctgtcctaaacggagagctggaggaggagatctatatggatcaaccagacgggtatgtactagaaggttaggagggaatggtgtgtaaactgttgatattcttgtatggccttaagcaagcacctaagcaatgacatgagaagtttgacaccacacttacatctgctggctttgttgtgaacgaaggtgacaaatgtgtgtactatcgctatggtgggggagaaggagtgatcttgtgcttatatgtcgatgacatattgatctttgggaccagcctcaatgtgattgaggaggtcaggactttctgtctaagacttttgaaatgaaggatttgggagagactaatgttattcttaacattaagctactgagaggagatgagggtgggattacacttgtgcaatcccacaatgtggacaaggttttgagtcgctttggatacagtgactgcaagccagctattactccttatgatcccagcgtgctattaaggaaaaaccgaagaatagcaagggattaactgagatactcccagatcattggtttattgatgtacttggcttgtgcaacgaggcctgacatctcatttgctgtaagcaagctgagccggtttgtctcaaacccaggagatgatcattggcaggctctggaaagagtaatgcgctatctaaagggcactataagctatggaattaactataacgggtacccaaaagtactggaatggtatagtggctcaaactggatatctgatgatgatgagataaaagccacaagtggatatgtgttcacacttggaggtggcgctatttcctggaagtcttgtaagcagaccat

SEQ ID NO: 25618 - DNA, 7635 bp, Oryza sativa
atgaagtcatctaggcatatcaaaagaccgctgaaatatgttagaaagcagaaaaactccggagtgatagcattggactatgtccacatggctaaaaatctagcaaatcagtttaccaaggggctatcacataatgtgatagacagtgcatcgaaggaaatgagcttgatacccacctaaggttgtacaatagtggaaacatgtccattgtgattggagatcccgtgaatttggatggcgaatcaaactattgtgtggctgagagaagagacccttgaaaagggctcattttcatgatgtacttctcttctactctgcatggtaggatgacttatgccttaatgtgatccgagtggtttttctaagcagagatgttgacctgtagaacatctcaaaaggaacacacctatatgagttcgactgctagtcacagtctatgagatttgggcgatctctagatactcatgaaagggcctagagtttgacttatatgctccaaagaaagcggatgcaaacggcagcccaataacactcaagggtttgagtgaaacctgatcacacaagactaacaattcaaggcatagtccattgttcagttgtggtctgatgtagctcatttcctaggtggaagttcaacttaacagtctccaccaaaacactggtatatcaaacaggcacaactttgagaacatttcttatgagccatgaaatttggtggggattgttagaataaatgggctaggcccgatttttctattaaatctcaaaggcccataataaatgttaaggataataataccaccctgggaattaaacgaggagtatctcaacttaaatagggagttattggaggctccttgttgaccggttgaggtgaggatcggaaagccacacgcgcacgcgcgcgccgagccgagggcgtgggcgaggcggtgcgtgcgtgcgtgcgatgcgatgcgatgtacctgtctctatccttttgcaacggatcagaatccaaccccgagattgcctccgtaacgggcaggcgattcaatacccattgatcgcgttgttactgcggcaacgggcagatctctctcctgcgccataaggaaagggggaacccgattagatccgcccggttactttccaaacactggtgttctttctcctccgttgttaacagtgaaatttggtaagcccggagtagtcatcggcttagagtcagcatcggttttgaagtcctgagattagccgatgagagttgtcaagccgtcagttatcagattcttgctatattcggttaaggaaattgatctactaaaggaagcttatccagaagagaccgagttcaaagagaatgcggcatggcaagttatctattaattaggaataatttgttagtttcctttttatctttaggaaagtttctttcttgtccggcaaggacttgtatcaacacatgggtataaatatgtacacccggggtctatgtaatgtatcttcacgatcaatacaattcggcccatcgccacccttttttacttctacttttgtttttacgttccggcggaacatggcacccgacgcggggctgcatcgtctttgatctccggcgaatggataagtccaatgttccgtcggtccaggcaattgtatcatctacatcggcgtcgttcaaggttgtatcaatacatttgacctcttggattgctctagtttagatgatatatttgcctacctatttatcatatgtctctattaatctagtcttagcatatcaatttagctctatcggctgcttctcgttttagggtttctgccggtatcggttaaatcgtgttgctagattagattagcctaggcatctaccaccctaaaaatcagtcaacggcttgattgtctagatattgtgtttcttttcatacttagtgctgcatcagttaagtttgatctactaagtcgtgcttagaatcataatctctagtttgcttcttgattgccaataagggtttcatcggggtttcagccggtgagttatctggacgttgcatcggctcaataaggattgcatatacatataagttggatttagccgatgacaacaaaggtttcactgtttagtctaatcttgtggatttcataacatcggacctccagccgatgtgtgctttaaccttcggatcgatgcttatttatcatatcattatttgccgattggtttctactcggttatattgttattttattacatcattaacagccgattgtctttatatcatcatctacattggacatatagctggttgcttataccctattgctatcggctggtatcggcatcggctattatcggctatcggctggaactactccatcggcttgtcagccgatcggctgttttgatctactatttgcatatcttgtcagttgcaggatcaaactgactagcatgtctgcatctcatcaagatttggacctgcacaggagctaagcagatctcccaggctggtgtgttcgattttttcgtcaacatccgtgcgccgccgctgcttgtgttgcttctgtctgcttccccggttctaattgcttgcgcgcacgagagatcggaacgagcagggcctccagaaccacaccttcgcctgagatctgcaccgggtaggcgggtgatcaggtttttggagagtgcttccgcacgactgctcccgtcttctgttcgtcgtcgaccgtacgtctgcatcaccatgtctgcctcacctacacttggagatggcgcgccgggagccggagctggcgcaccgggagctggtgcacagaacgacaacaccaacggaggcagttctgcccacaatccagcggagggactttcacagggtataatcctctactgctatttcagtttttgatatttctgttagtcgaaatgcaattgcgttctatgtatgaagattatgcttattctaccttaagcattctcctgtttatgtttgattttatcactagatcacctcacattgttcatgccatgattattatcttaatattttagattaaaaaatgccgatatatgactatatttccaacagctactgcatcacatcccctccctcaaccagctctggcctctggcccgatggccccgcagcccgaggaactcgcgttccttcaatcgctcgccttcatgcccctcctatcacattcacatccccttctgtcgatgacacgctctctttcccgtatttatctcactgcgcagcaggtgagcagagagagcaatcagaggtggaggaggtaactgcacttttgtttattttccaatcaccggctaaattgatgtttttgtttatttctcatagttcagttataattcttgtttggggttgcttagaggaagaaaggtgctgtttgctttccctgattttgttcatgaaggtcctttttggagctttggtatctgtatatgtgataatgtgaagcaaaagttgcgggaattaatgatcttttccaatgcaaagtagatactcaatgcattcatctttatcctcataccgtaatagtatatatcagttagcactggatacaaaaataccttatattgtcgctcagttagcagtggataggaagataccttgtttctttcgatgtgtcaggattgagttttctagcccttaaaaactgaacagggctacatgctgaattttcaaacaaagataatggtcaatccctggttttagagggaggagtaaatctatcaccactgttgcattagagtttgttaattttcaatatctgaaagtttcacgtgccacggaatgttctcttctttcactccagcaagtaacttttgtgtctgtgtttatcaggtctaggaattagataagaatgaaaaaacaacaataagatcgttaggaaagagttttagcttgcatggagcaaaacccctgttagtccatctgatctcaccatttttttgagctcacagtgtgtgcttttgctctctgagccgtatgaagataaaattgatttcctttataatatccttggcctgcttcaatcctttacattgataagaggctgctactttaatcctttttccatgacagatcccctcctctctcaaacccagaaatactgtgttgttcctattttctgaatatatgcagtacactgtattattaacaaagtagactgatatttcatatttgattatctggaagaggatttgtttgtgctcacactgtgccagtgctttatgagaaatatgaagatcaagttgatttcctctagaataatccttggcctgctgggagaacatcttactatctgacaaaatcaatgaactacttcatatgcatgctaataaaataacatcataagtttcggctaataatttaatttaccacgtaataagtaggccttagaaatttgaaaaaaaaccaaaaattaaatagttcttagacttttggaggaagagagcataagtatagatagaggtacataatattagaattagatactcctacatatctatacgtgcacgataatgttctatttttaactaaaaatgcacaaacccgtctaaccaacacttactaaatcaatgaaaattaaaccagggaatgaaccagagctgttatacactcttttactaattaacatcagtggacgtccgtggtggcatgcaagggcaaggccggcggccatggaggcttgacggggaacacccacttctggaccagttcgtcgccccagtcatacacgtgctcgagctccatggtctcgaggtcgacggagaagggccacatccccgacccctccggcggagtcagcacgacggatcgtcccatcacctccaggatcttgacgccagttaacctctcgacgaggcggctgtagtcttccagctcgggcaagccacgcgtgatcaactccggcagccggagcgtcttctccaccgtccactccctgccgccgccagcgtggagcggcgtcagcacctctaggtcgctgtgctgcaccactcggacgaggcgccctcctccggcatcatcgccgacggcacgcaggttccactggcggtagtagaaccggggttgttcgctggcgcagcacttgggcaatgtcagcggcgagagctcgccggtgctctcgtcgagagcgaacacaacgccgtatattgtcccccagtagagggagccgccggcgcgtccggcgaagtgcatggcgtcggcatcgaaatgtctctgtctccttgggacgcccttgggccggataaggtcaccgaggtccatgcttcttgtgaggcgcagccgcagctcctcgtcggcgccggtgaaggtggagaagatgcaggccgtctttgctccactcccgaaggtatagagaatcagtagcacggtaaagttggacacgccggcgacatggttgttgttgttgttcttcttctcgctgccggtgccggcgccgaggagggaggcgtcgaggcaggcgacgtgtttgttctccaatggaggaatcactgtccggtagcgccgcgtccatggctcgcaaacgactatggaaaccgaagatgcgttgccccaatagtatctctcaggcaccaggaggacgaggccgccatggctgtcggcgagcacccaagaagtgttgccgggctcgggcacgaagtcgagagagaagcgtttgctgctcgtcacggcagcggccgccggcacgaaagcaaggctactcaccctgcaggaaggagaaggacgggaccagttggcgaagatgcccgtgtcagtggcgatgtagttgccgatggtgagcgcgttccgggagcggtagaggcggaggaagccggcgtcggcgacgacgcggcaccaccgcctgcacgtcgacgcggcacgcacgaggcagatgggcgatgcgaggcgtaggaagacgctctcgaggagttcgtcgggaagttcgttcaccgccattgccggctgcgagctcgtccaatacgaccggagcttgcctcgttggtccgcggcgccgtgctgcaattaatacaaaccttgtttaccttagtcgtagccgtaatagcgtgtatgtgcatgcgtgatctcttaccttagtctatggatggccttatggccggaggcccgactgcccggcccaagcacggcacccgttacaaccacgggtagggatgtaagcgagccgacccacgagtttacttataggtcaaatagatgataactcatggattcctttttatgggcctgctagccgcatctagagatacaagtggatcgatttatagacttctttataggttaaattaatcggtaacccgtgagttacctactaattttgcttataaacggcttcgcagtcaaacctgcctgcacccctacacacgggtattttttctatttatatctataacaaagcaaaaaatacgtaaaggttctggtattttttgtccatctttcttctagtttttctcgaacaaagcttccggttttttttccatccgttttctttcactggattatggcccgatcttttttgtttggttttttccgacgctgtttttcttagatctcgtccaatacattacatgtgcgcaacgcacctcccaccgcccccgggccaaattaaacctagcgccgccgccacgatgatcaatctctacatgctttttcttctccaattgactgtaaaaatcgattctctactgtttttcttcacgatttcgctattgaatttgtttttatttcgctagatttaatctcagtcatcgatgatgatggcagatcggcgagcttcctcagcttgtttttatccgagttttgcacattcgctctgattattggaaaaagtggaaagagaagatcgagtagattaaaagacctcgaccaattatgggagattgagaaaaattcggctgaactgatggggaggatcgactccggcatgcgaacatgagactctcttccggagggtgaagacagtgagagctggacctgtgtctccacatatgggcttggccgaagataggcagactagtggactggattgaggctgaagacgaataaaagaatgggatttcggcccaaaaccatgaaagaatttttaaaaactttttcaattatggaaagcaattctaatgtttcaatttattgctcagctcttaacagatgttgtttccatgagaaaacatttttatccgtttcaacgcatgggcaaattttgtagtctaataaaaaaatacataaggctttcggttttttcctgggccacctggtttattttattttgtcgacgatcaattttctttgcacgcggaatggttttctttttttgcgtccatggggcttcccctttttcttggtctttttttctttcagttagttcatttggcacgcgcggaaaggttctttttgcaagcatctgccttttttttataaccgtcgccgggccgaatcctagcgctgccgccaagctgagctctatagccgccatcgtggcgtgtgcactgccatgttcaccttttcaccaccaccggtggcagcggcagcacgcagttctcgtgggaggataaggccatcggccacatcgtcaggccattgtcaagcaagcacctcggcggctcgtggtacctgtacgccctgggtgggaagc

SEQ ID NO: 25619 - DNA, 15584 bp, Oryza sativa
gtgaacaaggcggcgcgcatgccatgaagtttgacatgccgacgcggccaccggcctcctctgtctccgcgccatcggcaaggtaggctctcaagaacttgcagctgccgctaccgaagccttgtcccaccgatggagggatgacctacttgtactgctgcctcagggcctcgcagacgagcaggctccagaagccatcgtcggcatgtgaccttgcgaagcccaagaggaggaggcactcttggctgtccatgatcctccatgacgactacggctgcaagccgtcgacgatgtcttggactaggaggaagttgagggagaagtggctgtcgtcaatggccggtgctgacaccggtgattgtgcaaacgaagtgatgttttcggggttatagtagtaaccagcgatggtgggggcgtggagggaatggaagcggtggaggaatccagcatcagcggcaacgatgcggtgccattgcttgcacgtggaggcgatacgatgagggagacggtggaagcgatgctcaggagagctcgacgaggtcgtcggggatgtccatagttggctagctagttttttgcaaaaaattagcgatcaaatctggtttttccctgatcaaattattaggtgtgttattgtctacgactctgtgcattagaaatttagagtccgttttgcattggaaaattgacactgtagttatattgtttttctggttactacgagaaagtagtatttatcatacgatcatctaataaactagcaaatacctgtgcgttgcaacaggtaaaagaaagattataataaacattagatgattgagttttaattcgtgatctaagctaacatttttgtatttaattctttaatgaaacattgcatttgatttcatattgcgcgcaagagtgtaccttggtggaagaaactttttcaagaaaagtgacatataaaataactttgtttaaaaaaccaaccggttcatcaagggcctgttcgtaagtgcttattgatcatattctagatgcaaattgtttacttattaacatgatgaattgcctatccatagcaacgggtgaatgcaattagggtttgggggtggtagcggctgagaacgatcgtgcctgtgagcaagagcgagagggtggagctgacatacttcttaagggcaccaacgaaacaaggatccaggatgcagagggcgacaacatctacaacagccagagtaggggacaacttctatcacgatgatgttgagcaggtcagtagcccttctcccccactcccacctttcccgcagccacacgcgcacatgaatgccttctctcctctagcgtcgccgccggccgcagctgagccttgcacggctggcgagaaggtgcgaataccgaacagcaccggtgagctccccctccccctttactcctcctcaagccagcggttgcaagatgaccctaccctgctgtcttccccatctatggtggcttcctgctgctggatccaccaccttcgactgccgatgccggcccaccaccctccgtcatccctgcagcgacgatggtaccgctacttgcgtcgccgccctcccgagtccacagcctaccatgggtcctcccgcgctcatggcaatccctctaagccctagggaaaatccccttttctacctctctgccccttccccaccaccaccattgtctcgccagagctagagaaggaggtcatcataaatatttgtgccgataagatagttcaatggatgaaccaatgattaatgacgttgttttaattaagagtgtcctatatggagaagtaaaatttactagcaatcagataattatccaatgctcagatttaatcgaacagttcatacaacacatattctctcatctaatggctgttgtaatactgatgatatggctgcactaaatcacagctaatgaggatagtgaagttgcatttatcccctagtgggttttggtgattaatgatgaataaggttaagggactaatgtgtttattgagatattcaggtaattagtcccaaggtgaacttaggtgatcaatagatgcttggagaccccctacaacattccttcaaagcggatttgaagctcaaaggtcaataggatagtttattttttgaaatcgagttttaggaaaaaccgtactattaagagaggttccaggtgtggttctgagatataaaaagtgctcttagtgggtttgtagtgatagaatatttttgggagccatttttgcaaatgggtccagaccggacagagaaggttggccggaagttccggtccctggacctggaacttctggaccctgcatcgggtgaaattttcctaagtgttggccgaaagttctgagggtcaggaacttctggacctcttccagttcaaaaatgtgagtaacggctagatgaagtcacctagccgttatatatatccagatcgcacccagctcaccttttggccatttcacttcagttctttcatgccttaagttgttctaacctctcccaagatccctttgcttcctccactcaaatctagagccgttcttgtgagattgagagaatatatgagagtgtaggagtgatttggagaaggtttgaagactagttgtgtttgagcactttggatatcttgtgggctatcacttgggcttattacttttggagatcttcttctagacggttaggtgtcgcccgtgagcttccaaagatcttgtggattttccgggaaagtttgtgaaggttttccttacctccggaaggaaacgaggtgagtaaagattcttatgctgagatttcagaggttctccttggtagagcaacttgcacttgtggtcttttctagaatgatttgtgagttggatcttggtggtcactcaaattctagaaaatgacctacattaccagggattaggctttcagtgatgaactctagtgatgaaaccctcacttctcactagtaagtggttgtatagtgacaaattattttgttgtcaccattggacggatatctagtgacaaactgttttgccatcacaattcctcctattactagtgagaaaatgtgtttttatcacaaaagatgtaaacaatgatgacccagttgtgagaatttcgggtctggtcactattctattaaaaaacagtgataaactaccctgtaatcactaatcatatcaatcgtgaggagtgaatggtgatgaattagagtgctctcactatcttgaagataccttgtggcaacaaagttgaatcgttgagacaagtacctgtgatgaataaaagtattcactgtttggttctagtagttattaagttaagtacaccatcactaacctccttttcatccctctctaccgctttgactgttcaacagtcaggctcacgcagagcaggcagcaccgcagcagcacccggcggccgaaggcatgagccttggcacgatggaaggattgcaggccaagacgctgaggctgctattgaaggtagagctgctgcaacatcaggccccgtagtggtggctacaggagctctgcgacctcgatccgacggcaggtgcacggcgaactcgatacggtgcggcggggtcgtggcgagatccatcctgcattcgagttgcgtcgagctcaatccaaagcttcagagggaggttgagcagtggtagtgggacgcggcacgatcggagcacgagtggtggacgcaggcgcaccccgagcttactgacggcagaaccagcagtggtaagttccatttcatctgcttggtgctgccggctactatatcttgatgctttgttgattagtaccatggattggctggatctatgtgagccaagccaaaacaatagattcgagtgggagttgcagtactgcagtggtatggaaaaggggaagtcagttcagtcaaaaaaacaaaaggggaaaaccgagagggaaacatagggtaaggtgaggaacgtgggagaaatactcctgagcagatggatacacagatgtgtccagatccctatcctctttatctgaaaaaagctattatccaacatggtcagctgttcaaggagtatggattatatatctgaccgtgacttacagagttgcaacagggcccaatacttagtagtacatgctagtttctactaatcagtcaaataggcctcaatatggattagttacatttcataatctgcaagaaattaatttacttagtatattgtattaaacataggcaattaatgtcctcaatatcaaagaattgtatttcaggccaacatatttttgctgtgtttgtgtaaatttgcagtaacatgaatatagtttataaattaactgtcatctacatcttcttcagtttggatgtcactttcatcatctgtatctgtatactcagcgccatcactttcagaatcttcctcttcttcttcttcctcttcaaacagatcatcttcagaatgtgttactggttctgcttcaatgggttcacattcgactccatctttactgagaaccgtagggaagtcaccatcatcaattgtagtgtaattcaatgcagccgtgatatgctcattctcttggcatgcttcagaactagacttatttgataaagttggatcattttcttcttcttcttctgtaggaggaaagtcatacaaatcacgtggcttcgtcttgactacaacaaaccatttagggtctctagtatctttgacataatatacttgctcagcttgtgttgccaaaatatatggctcatcaattggcactgtacgggaagtattaattaaggtaaatctatgcttgtcctcttttactccccttttagtgtgtacatcccaccattcacatttaaacaatatgacactaaaagtaccatatgttagcttgataatatctgtcaagacaccaaaatagtctttgcttccactggcttcatcacctttaacaaagactacactgttttgtgattgaaccaacttgtctcggtccctggtgttaaatctccatccattaatcatataacttgtgtaatgggttactcgagcatcaggacctcttgctagagcaaacaactcttctgatatatctggagatcctttggaatgtttctcaaatatctggaagaatgtttatacaggttacaaatagttgtaaaatgtaaaaaaaatacttttattatggcgtgtacatacatgattcttgaaccatacaaaaaattctttgtcatggcgcttttccacacctttactgttctggatgctaagttggtctttgtaaatgctgcaagacatgtacatgtacgttaaattttgacagcatttacatattagaaaatgagagtaagtagtagttgtttactttgcgtattctgatatttcttcataattctttagaacatatatccgagctttctccaactcattcatatccatctggcagtatttgttaccaaggagtggcctgccaacagtaccaaatatctgaaattttgtactgctgttgtcactctgcacgtcctcgattcgacttggtcgattgattcttgtttcaactccttgaaggtacatagaacaaaaatttacacattcttgcaaaatattcttgtttcaactccttgcaggattcttgtttgatccttcagggcgagctttgttttttacaaaagacttcaaccttcgcaaaaacctttcaatgggatacatccaccgatactggacaggtccaccagcaatagcttcctgggctaaatggattggtagatgcaacattacatcaaagaatgaaggggggaaaatcatctctaacttacagagggtaacagcaattgatgatgcaagcttcttgagaatttcagtatctaatttcttggaacaaatttctctaaaaaagctacatagctcaattatagcctcacaaacatcagcaggcagaactccacgaatagaaaatggaaggtatctgtgtaaaaatacatgacaatcatgacacttcatccctgatattttagcttttgttgcatccacatagtgtgaaatttttgaagagtatccatctggcacttttatttctctaaggaactcacaaaatgctttcttctcagctagtgtcattgtatagcatgcaggacgaaataagatcttcccatcaccagttggaggtgcatgaagttcaggtcgtattttcatgagttccaaatcaaaccgggatttaatattgtcctttttcttcccatccagatttaacaaggtacccacaatactatcgcaaacattcttttcaatgtgcatgacatctagattatgtcttatcgataacgtacaccaatatggcagctggaaaaatatactttttttcttccaaactccatataatgtgcttgagcgttttctcttattgttatgtttcccaaatttcacctgaatgcataaagtgatgtcaacaataatatactactcatattcttatactcaaagtaataccaaataaggcatagaatagcaaatagtataataatttactttcagattgaccagataggatacaagcataaatatatcataattagtagagtacctgattgaaattttgatattgacgcataatgtcatctcctgacaacgcttttggggcgctacgtctttccttttggccatcaaaagattttgcattgctcctccacgaatgtcttgttggcaagaagcgacgatgtcccatatagcagtatttgtgtccattaacgagcctatgggaccaagtgtccatgtgacaagaaggacatgcatattttcctttcgtgctcatgcctgataaattaccatatgcagggaaatcattgattgtccaaagcagcattccccgtagcttaaaagaggactttgcatgagcatcataggctggcacgccttcccatagctgtatcaattcatcaatcaatggctgcaagtatacatctatgtcatttccaggtgctttaggcccagggataagcattgacattatcatataagaatctttcatgcacatccaagttggtaagttatatatagcaataacaactggccatatgctatatgatgagctcatatttccaaaaggattgaatccatcactagcaaggcctagcctaacattccgtgcgtccaatgcgaatgattcaaaattcttgtcaaagttcttccattcattagaatctactggatgtctcatatatccatcatcaactagcttctctttgtgccatcgcatatgaacagctatttttgaacacatgtacatacgctttaatcttgggatcaaaggaaagtaccataaaaccttctgcggaactttcctagcttttctcctccttgacttgcgagcactattttctccatcctctttccatcttgaaattccacaaacagggcatgtttcagctttagcatattcacctctgaaaagaatgcagtcattcaaacatgtatcaatctttatataatctaacaccaaattattatcacaagaccacgataccctatggcagagacatgattttgctagatgtctagcatctaatatagcatatgcttattaattttttttagataatgagcatatgcttattaatgaaccagctcacgagctgagccaagctaagcttttagtattagctttgttaatgttaatgagctggcttattagttttccatgcagggaggtgccaacccacatcaacaattaatgtgcatgtgtgtatcattttttttcactccacaggttattgattcattaaacaattgccatatttgtttacgagagcttgttaacaaatgctggtgaacaaatattttggatcagcacaaacaaactaatttgttatgcacgcacgcataaatcggccagcaaaacatactttccctccaaaagtaattgccagcaaaattttactcccgccaaattgacagagttacctcactatataaggctgcccatctagtacaatccattcgcatctagagttctcgatccctgcgcacacttgcagtcaaaggtaaagaaacaaatctactatggctctttgctattctcgcaatcctataggatccattcggcattccccattttttattcactgcatagccctagagtacatccatctttgagagattacacccaccactgccgggacacaatcacacaaccaccatctccaaatcactgcagtcctatggatcttctggcggcgctggtgccgcaacatctacatattgatgatagcgtggtgtcgcagggatatgacctgccccttctggcgtccactctctccgtcttgtttttctgcatttatgatttgtgttaatttcctaattagatgcaacttaatatccatttttaattgggattctctttcttagttaatttggttctcaatcttatagtatatcggtgttttgtggggatttctatcttagtcaatttggtttgtaatcctgtagtagatctgtttgtactcatttcttattttgtaggtcaaaatggtttcccaagttcgtccatccgtgaaccagatggagacttcggatgatgctgctcgacaagtcataaccaatactaggaatgagggacggatgggaccaaccggaaacacaggtatttaacatatttaccttcacttcattaatctattccttcacaagcaaataaattaaaatacttcttccttcaattaggtctcaaacgtaggaaaggtaggggtctcaccattaatggaacacttgcaaaactgagagcaaggggtgtgccactagacattcaatttgctgcacagtttggaaaagtctatggtaggcacgcaagtgtctttaaaagtgaggtcactgtctgtgtgcgacaagaggtcccccttaaggtgaagaagtggaaagtcattgaaaaagcttttcctggaaccatgtcatcaatttggaatttattgaaggtatgtcatctggttggagttcttgaattttcggacacattagcatatttcatttgtacatttttgttttctttttgctgtcatgattttgtacattgtttgttcatatgatctactatcattctgtaggcaaaattccctgagatctcaatggcagactaccaatgtgtaatgacacaagttgagcgaaagtacaatgtaagacgccacaaactgtacaagacctattgcacaacaaaaacagtgtcctagtcatgttgcgccagaggactggcagtggttgattgataacttatggagtgatgagcaattccaggtacttgtttaattttctttacaattaatacaatatgattcataattcattattcttatgagattattatgtttttttagaaacggagcaaacataattccattaacagatcaaagcaagagatgaaatcacatgttggaacaaagtctatagtgcaaatagcacatgaactggtaaggaatattgtcattcacttatatctttaaactatatgtttgacatgtcttgtatatataaattataaggcttcttttgtatgtgatataattgcagagaaacctagtgacaggtgaatggcctagtgctatagatgtttggaaggcaacttatttgaagaatggaacatggtccgttcctaatggcgaagaaattctggtaaacaaaaatgtctgttacctacattttactgcatgagtttttttaatatggacttacatattttctttgatttgtttagaacaatctgcagacagtagctgaaacaaaccaggaaaggattgcagctgctcaaatcccaatggttgaacactttgcattagtccttggcagaaagccaaaccactcgcatggagttggtattagtgcaatcaatgagggagctcaagagaggtacagagttaatgcacaagcagaagctgcacaacagcaagccaatgaagcacatcaacaagctgctgctttgctagaagaagttcaaaaattgacagtagaaaacttgcaattaaagggcgagttgcagtctcagcgtgaagagttgaattctcagaaaagaaccgtagaggaacaaagtggtcacatggagtgtttgttggcccagaaacttgaggaaagaatgaaagcaatgtgggcacgcatgggtggcactggtggtgcttcatcttcaagtgtcccaaacaattaagtaagatttcttacgtcatacatgattactaattcaatctagtggtcattcgattaatgttatttttaaattatatgtaggaagttccaagttgacaaagactggcgtcgtggagttgctacaaagttctgtccatctaggcgagcatcctagagtccgtgtcccaagtttcatttgttgcttaggtgttcagttatcaatttagttatggtcttagttaaaatgctctttgtatgagcactttgttatcattcattaataaaggatagtttcctctagtgtgaggaacccttctgtcacaccccaatccggcaccgccgtacaatggcacctgacaggagcgtgtcgtaggaaaaacggcgtgaaccgcttcctacgaaaccgcgatctcagtaccagtcccaggacatagtgctggtacccacggtgacaaatatgaatcattgcaatccttaaaataaatagaggacttaattaccttaacttagttgcagctcagaacagcccgagaatgcaatcgacgatgcggacgaggaaacaccaacaacaacagcagcagcggaaccaacgaactaacacccaacaccacaggcgacggctgggaactaggacgaaaccctaatcttcactttacttcatcttcaactttagggcggaggaactatatatatttatatagagcaagggtgagtactttcgtactcagcaagtcacgggaatttaggtgtctgatgcaagcttggaagagaggcaaggttgttttgcaaatcctttgtttgaaaccacttttgaaatcactaagtgatttatttctttctaagtgtgggccgaaaagagacttgcgtctcgattcgactttaagagatgcttttcaacaactcaaatggtaatgtaccgaccacccgggtcagatcattacttctcggctcccagagccatttcacttgattaagcgtctcccagagcctttttcctttttctcggactcccaaagtcctgctgcccagcagcacaacaatccgcttctactcgggaagcctagtctatgatgcccgcagacatcccgaatcacacagattcgtttctgaccactcaggtcatccatcggccacattggctgattctggttatgattcccacaccataataacttttcacaaagcacaggcaaacaaatctaagcaacgggaaccacctcacatccgcccatgaccgtgggcacggctattcgaacagttagttaacctcttcagaggggtacccccaagatacgaacttattccgaacacccgtcggtgtcggaggttcgcaacaaagcctttcccaagccgacctagggatacctcatgccacatagaaggatcaaatcctcacataaatttaggccattttagttttcacaaatcaaactccaaccacctcgatcggtaattcagcaagcttctcttccttgcttaccaggaacccggtttggctccaaccgaccccgccccggcgttcccaactattggcatgcgaggtttccctgaaccgactagttacttagccagggtgtcccattccaccttgtggttgcactttgattatgttcgatgagtttcccacaggaatcggtccttatatgcgaatacgggacagtgccacataggcacaactcccgcatcgcgagttttcacaatttattttattttcaaacacaccgacaccacatgtcgggttttcaaggcttctcaaacccatttcccaaattatcgacaatcaacggtgtatgtggagtagttggtatacgcgctcagagagccggataccgaagtaccacaagggtggagcgacaaggaatcagggtagtacggcctgcaggaatttgtgtgactactgggtaggtccgtcggtttgacatgcaaaccgaggccaagcatgttataggtgtgattctaatagttcaagttgcaaacaaaataataatgatttttcaattataggagatattgatcaaagggtgacttgccttgctaaaggtcttcgcgaagcttcatgaatcttcgagaaaaccacaatcgacgaaaatccggtaaccgcaactatacgcaaacaatcgaaaacctaaacaaaagaccaaaataaagatcctatttagactaaataatagtgccattatatagatctcaattttatggaattactggaagttgaacggagtcaaacggagttacggattgggagatatggatttcggaggtttaattggaatatttggaataggagaaatggtttatggaatttatagaaataatattctcaagaatattattgacagtcactgacgtgcgggaccaaagaaaatgattcatggaattttgggaataaggaattgatttgtgaaaaagggaaaaggatttattaatccctttggataagaaaaggaaggagggataggaaccagactttcccgagtagcttggcgcggcccgagaggatttgcgcggctcagccgagcttattgggccggtgcgggctacggggaggcagcccaagagaggggcgcggggagagagagggggaaggggagccgggtggaccgggctcacctcgcggggtcccgagtgggcccgcttgtcagtgaggcggtgcacggtggaagcggcgcacgcgggagcgggcgctaggttttcggagggagactgatctcaactggcctcggtttttccgtggttcgggcgcggcgcgccgggtggacgaatggcggtgggcctacgtgcagccgcatggcttgccatggacagcgcgcacgggagggaagacggagggagggggcaactgactggcttggcccggtcaaagccgaggtggcgccgacgtggcgcctacgtggcagccacgcgggccggcgggaggaggaagaaggggagtccgagatggacggcggacggcggccaagttcaccggagctcgtcgcgacgattcgagagagagggagtacacccggaacgatgggacggacgagaggaagtgaaccaccggatcggattcgctggaggaaggcgcacaccggtggcgagaaaagggggaaacttcatcggagcaacgggggttcgattaaaaggggtggaagcatatccttggttcaaggaatccagttccggcgacggatgggacaaaggagtaccaaggagggccggcgacgagcggtggcctccgggagtggacggcaatggccgcgaggccatgccaggcggcggcggggctcggggcgatgtccacgcgcgttcgggagtgccaccgagctatcacgcagactagagggggcgagggagagcgaggaaggggaacgggaggaggcactgccgagccgggacgggcgctgtgacgagcggccgacggcgcgggagcaacctctccgacctcgggccggggaaggggaagatgacggcgcccggagtcctcttctcgcgtccttcacacgcaccggtctccctggtgcttcggcgacggatggtaagggcgactgcagggcaggggcgacaaggcgcgattgtggcgacgagagaaacgagtgagggagatgggaggggctcgggtttttataggtggcgatgttggtttgggagaaccgaccttgggtcgttcaaggagaggagctgtcggtcgggcgtggtcaaggtggtggcaggcggtgacgctgatggtggtcgggcaaaacgaaaaaggaggaggagaaagggagctctgctccttgctgtttcgggaaaagttgaaggaggagagggagtaagtgaggggggctgcctctctcggctttggaagatagcggcgtggagcgccagagcggcagcgcacgacgcaggcgacgccagggcttgacgcgccggcaaccgagcagtcggccacgcgcgagcgcgcgggaacgagcgaagccggtgcaggttttgggcggcgacggcgggaagcggcgtcgacgcgagagagagaaaacgagagagagggagatccttctctcggcgatggctcgtgcagcgcacgtgagggagatggcaaaggggagagatgggctggagagtggatccggcccattcaaaacagggagaaggcaaaaatagacttttacagagaagactgaattggagcttggatttgaatcgagatttgaattcaaattgcatatttgaactcagcgaaatacggaggagccaaggaatggattcaaggtggactcggacattttggaatcgggacaggtatttggcgaggattcaaaggaggcgattgaatttcggagacttgagtcggaattggaattttgaggtgggcgattttgatggcgacgagggggaacaaagatggagattgaattgagatcttggcacaacttagactcgcacacaaataacggaatttttgaaattaggattttgctgaattagtttttaacgtctcacaaaaagcggagcgttacacctttttagtttaggtgatatttcaattgagttctgaagtgctctattccgagcatactgtaatcattcatgaataaaggggtgctcagttatgaatgtttgaacttgccattgctctatcgagatttcatcattagattttgtcattgttcacatgctgaatattgtcataaaagacgtgttgtttgtggcaagactttagtcacatatataaaacttgcatctggatatttaattttttagtgataaaagttttccttacagcaatacccttttttctccactgatgcattacttcatatgtgataaaggtattgtcacatatacatattagcttggtcactactacatttgtaaagaatgaccagttttcgcaacaaataacacgtcatttcaccacaatatatcttacttcttgtggtttttacttctcaatataaactaatatcttatcacaaaaaccctatcatatgtgagaaaagttattagcaaaggtatatttgtgatgatgagttatcggtaattagtaatatgtagtgacgagcaaaccagcactaaccgtcgacaatattgtgagaaaaaaattccatcactacacgttcacatatgtgagggcactattgtcactagtgtctcctgtaattgtgaccacgataccatctctaatgtactgcttattagttgcgataggattatcacaaacagagccattatctgtgatgaaaaaaaaaatcatcactatgctacttgtgacgccagtagtggtgacaacatagtgacgaccccaaaattcgtcacaagggggtaattgtgatgagaaacagccttttagtgatgaagtttttcatcacaaaagacatgatcccttgtggtgctagaagtgttgggttgaaggccatgcacatcttctgggttctttgcataggtgaggcaagtggttaatcgagacc

SEQ ID NO: 25620 - DNA, 3192 bp, Oryza sativa
  unsure (1)..(3192): unsure at all n locations
atttgtttgtgaatttcagtaaacctattcacccccctctaggctacatctctgtgcgttcagatagttatataggatttatagatataataatggctcgaattgtcataatttgaactgatgtgaaaaatacaatagttttcccagaatggtacacaatacagtatgttgtcaccatagaaacaaaatcacaatagcaaaagggatactataagaaatacaatctatggtgatcaccggtacaaatacgacatatttggtggtcatatatatgagtctaactactgttggtgcctccatttcagataagctgcccaaccaaagataatcaggaagggccaaaatgagtgcagaaagtttcgaagtatcttcctgcccaaaatccaccacaccttaaacccaatccttccctgtaagagcacggccatgcggatctgtgtcttcattgacgtatgcccgtgcaataacccaacggaacacatgaggcagataagcaaggcagtcttgtgagcaactggtgccaggacaacgtataaacctaatgcaaatgcagctagcaagcacctgattgatagccagaccaagctattggccgagttaaggtgctccaagcggatgctgtagtcaactttggtcattcctgaatacacgaggctaaatgtagccaacaaggagtagacgaatgcaaatgtgatggccaagacgaatgcatcgaaaccgtagcttccgacgaatgtcggcgtgccgccattggtgtgatcatctgctctataacctccaggcaatgtaaaagctgctgcgaatgccacagttgcaatgagtgtggagcagacggccataacttgtgtagactccgtaattgtctttgaatcttcttgttcatcgtcatctttttcaactattttagaatctctttcctcacggaccgttcggcaaatgcacttctcttgacgatggtcaagggaagggttagcatgatgtgcattcgcaagatgtagtgacctctttatccaaattcgttgatgctgtaataagcacaagcatgcatgagcatcaagaagtacataccaaatttgtgcaaaaagaacatgcattttccgcgcgggggtggggggggggggggtgggnanaggggattgttattaccgatccatgaagaagcccttctggtatcagcttccttgatatatctagaggtgttagaccctccttgttcagacaatcaacttttactactgggttcatcaatagacataaaacagcatgcagatccccatcttgtatagccaagtgtagggcggtgtttccatcgttgtcctgcaaattcataattttagctgccagccttcttctcctgcgaacaaacattatgattgtgtgtcttccgttctcaacagcaatatgcagaaatgttcttccctgggcattgcgcaaggtggcacaattggggctcttattgagcagtatgttgatcgtgccatcattaccctctgctgcagcgacatggatggggaaagaacccttgtcgtcaggctgatacgctgaggattcatcagcatccatcaacataccagtcagagtcaagctatctcccctggttttcctaggatagaggaaccggtccaaacaaagagtgtatatgtctatgtggcgcatgatggagaacaatatcttgtggtaatatggaatcttcgtgggtggttctatcgatacagcaaaatggagaggtgtccggccgtgtgagtcaccttttccagtaaggtccctgttccaattcaaaagcattccggtcgcatctgcatgcatttggaactttctttaatatctttttttaagagtgggcaaaagttgtgcctcctatattgatataataggagaaaattatacaaagatatgtatagggcttgtcaaaaccacatgcccagaaaaaaaaaaaagaccctaagtgatatcttcgaaaattccaaacacctgacactagtaaaataccatcataggtgccgcttgggaaccggctataggtgccagttttccaaccggcacctattggtcggcaccaataaaaacaaccgacccctataccaaaatagaaccggcacctataagtttgcacgagccaaaaaaaaaaagagccgactcgaatcgagccggaactcacaatcatcgtcactactccatccccaaacccccacaaatcacgaatcacaaatcacatatcacagatcacagatgaaacatattcagaaataaaatcatccacaaatcacaaaaaaatctaaaagaactataaaatcatccaacaaatccatcgggcgccgctggcgccaccgccttcgctggaccgccgcccgaccgtccccgacgtccaccacctcccctccgtccagatctagcggaggggagggcacggccgccgccagccgcctccgccgaggtccgccgccagccgctgtgccgcctccgccgaggtccgctgcctcctctccggccggatttggcggaggggagggcgcggccgccgcaaccgccttcaccggaccaccgcccggccgtccccaaggtccaccacctcccctccagctagatccggcggaggggagggcgcgccgttgccagccaccgccacgcctacctcgacgggccaccgccgggccgccgagagagagagagagagagggatagagggaggcgagagagagaggcgagagagcaagagcgagagagagacgtgagcgactcggtcggatggatggataaggcggatggataaggacgggcggatggatatggccggctcggctccatataggtgctatttttttatacaaaaccgacacctataatttatttaaggtgccagtttttaaaaaccggcacttataatttaggtgtcggttttgtataaaaaccggcacctatactataataccggtttttctttaaaaccgatacctataattgcttaaaggtgtcgattttatgtgtttttagcctacgggggagaggaaagcattataggtgctggttttaactattccggcacctacagtgccgatctctatgagcttatttctagtaatgtgaacttccttaatctcatacgagtaaatctcataaaattacatatgctttgatcaaatgatcataaatctataatttaaggaatgtataataaaactagaaatttacaac

SEQ ID NO: 25621 - DNA, 48200 bp, Oryza sativa
gcgtttgctcagggtccttgataaggattgaacccctgaaaacggaagtatgcttgaaggtcatcatgctattgctgcatcatgttgttgaagttggcgaactgagcatcagcagattgttgccattcttgcgtttgagctatgtgttccgtgaggttgtactggatctctctcgtctgcatatcaagggtgtccattctcctagtgatttcacccaagtcccaacgagaggaacttgagcgacattcacttggagatggaggcacaccacttgatctgggaggttgattgtccccccattggatgtcatgaggcgcatgccacaggtccacactggcacttacccaggttgagactctgatactgtgacgtggagcttgggtccatctgggtgcgtccccagttggctcccaacctacctcatacatctgcacggctgttgaggattatgaactttctcgttcgttccttgtcatgttgcacgtctccctgtatgctccacctgcatgagattcttttatgttctgcaggggaatggttagttcatggcagttgtacaaatgataccccgtatttggcaacgggatttcatttgtacaatcggggaataagtaaatcaaagatttatttactccatgtttcagaatgtgcccttgcactaaataagcctcatcaatacacggacaagcggctgagataaaagcaatttggtcgctaacgacccctagcccttttgctatccgagtaatcagagaagtgcactcaacaggagcagagaactttatactttctaaccattgccttatcatacatttcacaggagcaattttgatctttctaaccatggcaaatatgataatcaattcatctcccctaatgggcctcagatcacctctaggaaacaaggtcatagcaatccatttgtgcatgagcctaagtgtaggattatggatatcattcgttctagctttcttgcaaattggagcaccagaaatgtcttcccaaaacttatttttctcgaacccataaattcctttctggagatcgattttacaggaatcgtgaaaaccaagaagtgtacttaagcttttccatgtaagtgtgtactttttatggaaaaagcgaaaggaaattccatcttctatttctttcaaagtgcacagaaattgcaaagtaagcagacgagaaccaggctcatctaccacagcaaatctctgccaaccaacaactttccaaacagtacgaaattcaacatccatacctatctttttagcagctccggtgagtattcttgcgtgtgagcatactcccggtcgctcagcatgtagtaggcttgtctctcccgatcactgacaaagtcgaggtcggtgtcgtttaggagtcgttgcggagcttcagtgtcttccatcgagacatctgctgatgaacgagtactagactcgtcataacgacttgatgaagaaccggaccccttgaacagacgagacagtcgcctcctcattctgcacaacggagcaagaatggactaactcggcgggggttaggaatgacaagaatttcacccgccggttagtttcaccaaagcaacttgtatatatgcaactaagtgtttgaatttgagggaaactatcaaagcttgaatgaacttgagagcaaactttggagagggaatgaaaatgtgtcgaaatggggtggaattccctctctcggccggttggcttaagtagtgcacccaaaaaccgacctatggggcccactagcagttgcctcaaagaaggaggcagtcgaccgttggcctggctagttcggccgaacaagtgggttcggccgaacccacagtgggcccaagcggccccactttcggtcgttgggttccaacggtcagtgtggtcgtggcacagcgaattttcattgaaaattttattttggtttgctctgaaaaattcatttaaagaatttcctccaaattcaaaaatcctaaatgcaactttgaaattcaaacatgtgattatgcaaaaattcaaattgttgaaagcaaatatgcggatacataccaaattacctgttggcgaagatcacgtcatttaaagtccggcgtacaagactgtacctccatctagttcagttagtggattttccacccgtatcaggaggtgatggagcgggtgtctttggcttctccctccacaccttctttggttttggtgcagacggtggcttcttctaagccggcttctcttgcttcttagtcggtatgggtggttttaccggcgtcttccaataacggttcctgggcattgttgtgtccttctccaggaaattctgcatgaatttcaccaggctgtccgttttgggtggctccacttcgacctcttgaatattctgtcggttcggcccgtactttattctgaccatggagcattgttccgtcctcggttgaaactcaaaatatatggtgcaaacatcgtaacaaggtttacagtacatatttttcctcatgtgtcttggttcatctaacccatcgtgtgggtctaaaactaaaaaccgacacatataacaacttataagtgccgatctattaaaaaccgacactattagaaaaaccagaacttatatactagataaagtgtcgagccgaaccacatgcaaccgagctctcacccttatcctcttgtccccctcgcctgtctcctatcatcgctgtcacccctctctcgccatctctgtctccttggcacggcaagcggcagagctgcctcccttcacctaagccagcgaggggtagcctagaacccccaccagcctccaccagattcggttgttgcggatacttttctcgctagttgcgttgcctccacctcctcttaaccaagctagagagtgttggcctagatatccctgttagccttcgccagatccaatcaccatcgatggtggggaacgggacgctccaagcatcggctttagtttgaactgatgcatcgaactgagctaggtttatttctttcattcgtggaacctcaaaggtgtgccaattcctaaaccaacaccgaccttcttcccatcagtcctgctaatagggtcctggttgtgaaattcggcacctaagtaggattcccaaccagcagccatcgggtgagttacactgcaactacaatgtaattacattgtaactaacaatataagtacattataactatattgtaacctctatagaacttatttatgaagttacataaaattctttaatacttgtatatatacaggttatataaaagttataatgcaattacagtatagttacagtataattatattaccattataatataatagcatttgaaacatttccactaaaagacttgtggttgtttttttagatagtctcttcaaattattcgtggtaatctattgacaccaaatttaacttcaatatatggaaaaatttgctacaggacattgttcttcctatctttattcccattcttcttcctttcatcacagcaaagcggtgaacggctggtggcattagccggtccgcctcgaccaagacgtttagaaccaccagccagacaaaggcgggttgttgttggtattatgaaaaaagtgagttttgctgccgtggagctcacgccgctcgaagatgtctctgctttctctacaaagacgtcggtggctcgcctcgccttgcgtgacaccacgcaaaccaccccgaccatgtacaccagcagcgcgtcggcgacggagagcgtcacggctagcaacagcccgagccagctttgtcatctacccaccgttgcacaaaaaacgccccaccgtggccgaaccgtccaggctcgggccagccgccggcctcgatatggagcaaggacatgacgttctcctttggcaacatcctggcggcgatagagcacttcaacgacgcgtactgcatcggcaaggggagcttcgggactgtgtaccgcgccgacctcgacggcgggcgcgtcgtcgccgtgaagcggctcgacgcgtcggagaccggcgacgcgtgctgcggcagttgatgccggtgagcgtcatgacgtagaacgtcggcaccgaggggatgcggcgcatcagtgtgaacgagaagccggccgccgtgttgctgctgttgggcgcaccgagggccatgaaaagcgtcgcgttgctgtcgaacaagaagaacagagaaagagaggaagaagaatagagaaagagagattgacaagtgggcccatgggcaaacttgtctttaaccaaagtttctctctccgttttcatcaaaaataataaaatattgggaggagtgtccagcagctaattaccacttttttacagtgtccacgagcaaatacacgatcttcgagtgtctcacagtaaagaccacaatctttgagtgtcctgtagcaaattttgcctcaatatattcatggtagtatgtcacacctggagttttcccctttcccatagttccaattcaccaataaatcgtctaaagaaattactttggttaacaaggagaaaatcaaaattaacaatgtatttaacaacctgaattgtcagggagaattttttttgaattctctttgctttaaaatcactaacaggacttaaagaggaagttaaagagcatcggagttaatgtggttaattaaaaatttgtcaagttttgaagtaataatagtttttccccgcctttggtcgtgaatcgtgcccgattcactcccctctctgtccacggtttcgttttgcatggttcgccatgtccgttatcgttcgcgggaccgttttcgttcttttcctaaaacgacaccgcatttgttttcctttttgggaaagtcctaatcctattctccttctccaatttttttcctcccctccccctctcccactcggccgccgcccctccacctcggccgcgcgtgcctcccctctgccataccgagtcggtctcctctccctctcccctgccgactcccctcctctcccctccggccccacctattttatctccacccctatataagccaccataccccttcgtttttccctgttcttcattttgttggagtcctagctctagccgccagccacctcctgtagccgccgcctccccattgtcgccgtcgtcgcccttgcatcactggtaatccgtttcaccatctccgtgtcatggctatcgccattacctatccatttcttatttgttttcgtcgtaggttttgatccaacgtcgttgtcgccttcgcgtgttgccgttggaccatcgtcgtcgtttccttctcgccgatcgcctcagtttggtgaggaacctatccgtaattctctgttttaggtgttgtttctttttagcgtcattgtggaaaccgtagttgtttagcccgagccgccgctgccgtccgtgccctggcgctgtcgtcgccttgccgccgctgccgcgccacctcctgttgccacgccgccgccttagccgccgccgtcgctgccgctagccgatcccaagccgagccgagccgccgccgccgttgttctaggcgccgccgccactctcccgcgtcgccgtcgtagtttgccgttgtgtcgtagctcggtagccgaatagcaaagccttaggtgcagccctaaactcataccggcctatcgtttgccgtaccgagtctctaccgtaaactgtgtctagttttttgttgtcattccaagccgccgattccgttcgccggttcggttgaccgttgggatggccccatggcacgataagttgactcgttgagtcactaattcttgaggctttcttaccggaggtataattccattgatctatttatctatgggcaataatgtgtaataattgactaaggttttttcggttattagtaataacgcagctcatcttttaaaattcagaacttaataatccgagctccgttttaatccattcaaattgcagtgaatccgttaaaaagtatagaatccattaaaatttgtttattttgctatttcagtagacttattgcttgtatcacctgtgtgctttgtttgtcgtttagattccgtcagttccggtgatccagtttatttcgaagtggttgccgaggttcagtcagctcaagagcaaggcaagtcatacatacatcattgattatattgagcctattttacaaaatcccctgctttctattaaaattgcattgttttagaatgtcatgtggtatggatgccttttattctcagcctgatgaatatcttgtgcctttgataacttgggttatatttgatttattataatttagtccttaattactttatgtacaccaccatggttatggtttaattaaattaaaatttgctttaatggtgggtcgtgggtacatgcatgattttctggaagtcgtgcccatgacaattaaggaccggtttctcgggaatccctagaagatatactcgtactcaccacaggccagatgagctccaggctaaatctagagtataacttaaactagataacataccatggcaagggtagaggcgatggtgcagttcagacctggattttggtctctactatagccagatttacctaggcacgagaggggactgcccgacttcgaataaggagggggtgaaacctgaggtgcatatgttcggttagggagggttatatgacgggttttgtcacgatttccccctttgcagtatctcggtggtacttcggggcatggtaacatgtatggaatcgtgtctagtgggtaaagttgtgcacctctgatcagagtaaaactattcgaatagccgtgcccgcggttattgggcggtcaaccagctcaccgtgattagtcccactataacaatttgacttatagaactggtgtagtttaggtggttttggttggccctgttgcgacgtgatttagcgttggacagtgatgatgttaatactccttaattacttatattgtttttacttctttcaaatcatgctttataaatgctgattttactgcaaactatcctatgagccattcatttgaatatccttgcatcataccttccccttggtatggcttgttgagtacagtggttggtacttagtcttgctttttttcccccaccccaggagcagaagttggttcagatggtgagttctctgaggattgagcttgttctggacatcgaggattgtatggagaaagcttcgctttggtcgtgaagattaagtttatttctttagttctttagattaaataaaaaaatgagggttataaatttattttgttattttttaagtcgtggaactgtatcaaattgtcgtttgtgtaccctgactggtcttggatagggatttaatacacatcctgcttgagattcgggttgtcgaatttctgggcgtgacatagcataaactgatatatgcaattatgcattgaacatgcatgatacatataattatttactacgtacatacatatgtggcattagaatacacatattgaaattacgcagttgggtatgaaggctccatggcaagcccacacatgcccctcttgtcggaaatgtctttctccattctcaggaagccattctcaccccatgttgtgccccaggagttcttcagcaaccaatattgtgtgccatcaccgtccttgccatagccaatggctacaatcccatggtctaagtcagtgccgcatgagccggtcatcacgccaccagagtagaactggaatgtcatgtcgcctccatccacggcaacagaaacaggttggtttgccacggccttcatgagtgcggcctcattgttagctggcacatcctcgtagcccttgattgttgcggcgctgttggatccaccattgcacttgccgtctgccgctgtgtatgggtacttagactcagtggtgaggccaccattcttgatgatgaatttgaaggcatcatccatgagccctccctcgcagccctgatcctcgccatgaacatcgcagtcaacaagctcttgctcagagagggagataagcttgcccgtgctcaacttgacaataccctccatggctgccacggccgaaaatgcccagcaacaacctacaataattattcatgtttacactttcgattcaatacattttacagatgatttgtaaaatgttgcagtggcaaagtggcttgaattttcttaccacactggccttggtccttgatgggtgtgacagcgcccttggttctccagtccacggttgctggaagcgtgtcaatgctaacattctcatacctgaatgtggtaggaaccctaaccgtgctaggaatgaatcccttgttggtcttcgtcgcccggaactcatagttggtgaggtcagcgaactggttaacgccgagccaaaacttgtggttgcctgcattgaacgactcgatgaatgcgacgttggctttgaatatctcaaatcgacgtgccttctcagtagcatccttgtacacccgcccatactgttccatccacctctcgtgcctcgccaccatggctgcgtggtcgctctgctcgcgagctgctagaacagcgctgcagaggcagaggcagctgaggatggcaaagagcagagccttggggatggccatggttgatcagactttgtcagtggttgctcactactgcttctgatctgtactcgtttggttgatggctttgggttgtgaagtggatatagcatggcatgggttaatatactagcttaggagagcttagattaagtaattaatttgtacatcccgtgcttgtgtgatgttgtagacagggatgtctgcgtagcagagaagttactctgtatgtaagctcgtcagtgaacgtacgctagcttcgtagtaagataatgtacgctttgctcaccatgttcacacttactaattactgatgatctcgtcgagcaaatgctaatacaatgaaattctgaacatagatacagtaatgttagagctgtttcccttattttatatctgtactagatcctcatgcatgtgacttatttattttataacagttacagtattggtatgaaaccggattgcatatctgaaatgttgtgaaaagatttcatcttcatcatgattcgtaaaacaagagttcctcatgtctcatggtagtgtcttttgcaatttacatgttaatctttattcccattacttggagttaacattatttttagtacggatatttaattacctagtttatgttatttcctatttgggttctacagcttgaatttacaaaattttagagacaagtttcacttgatttggactttatttgaattacctatgagttttcaaattttaattcatatttctcttcacagaaataatctctcaagtcattttaaactaattttccgaaattacccttctgggagacgttagaatcactgacagcaggggtctacgggttaatattcctatttgaaattattttctctaaggaaaagggcatgtggtattgacatgtggggccggggttatagttgaccatgccatggtggccatagagaccacacgtcagtgacaccatatcttaaacaagattttaatcagtttcttccacgggtatgggcccacatgtcatcgactgattagagagggattcgaggagggcttattgttgtggattagggaaggtgggaccggggtagcgctactggagaaaccatctttggtcggttggccaaatttcacaatagtccgggttgtattaaacaccgggactaaagagcatttttagtcccggttcaaaagagggcaggtagtggacccctatattttctttagtttcggttgtccaaccgggactaaatatctatttgggttgtttcttttttttttgaaaatttgttattcggatctgagatgtatttgatttgtgtgtgatgtgaatacgtgatatatttgtgatgaattttgtagaacatgtgatgtaatttttttaagattttgtgatgtatttggagatgatcgatttgaggatttggaggtgataattgatttgagattttacgattcggggatgattgatttgggattcggggatggggtgaaatcaatatattaaaaacaatgaagaaaagaaaaaaaataaaggagcaaccagatctagcccggctccatctttaatcccggttggtggtaccaaccgggactaaaagggctccatctttagtcccggttggtgttaaaaatgaatttttactcctggttatttcaccctggactaaagatagcaatctttagtcccggattcatagtctcggttggaaaaccggaactacagggggttaccaaccgggagtaaaaaccacttctccatcagtgtaggcccacatgtcggtccaaggaaacgcaaaattttatcccctttctcttctttcattccagcgggcgatcgcgatggcaaagcgacctatagtagtgatgattctccagcggattggaggaggtgaggtggccggcgctgggagtgctcaccatgcagcggccgcatagcggaggaaccgggctcggggaagaagtggtagcatctggctccagcgtcaggcggcgccttctcctccaagaagagaaaaaccaagtagctagatttgtttgcaaaaattgtatttaatttgcgtttatgcatgaattatggaagtattatgtaagctactctatgtgtaatgtgtttgaatagttatgatatgaactttattgatgtgcggaatatatcatgtgcacacaagatttacacattgtgcataccaactaacaaatgtcacaataaaacttagaaaataatattgtactatgtacttacaataatattacacttatgtgtaatgttttcacccccaaattcattatattttacccataacgaaaaagaaaaaattctgacagttttgaagtacaaatatgtcataatttgatattttttgtctctccctatacaattaatttaaagatgatactttacacggaattgtgtaaattgcacccacgatacaacaacttggcaggtgggtgcgatatagtgcaagaacttgagaattgaacgtccgagtgcaacaacttgataagtatgtgtgttctagtataagaacttgacaatttagtattttggtgcatcaacttggctaagcatatgctatgtgagtttttttcacgatgtaaatatgccattacacagtattcctacagatattaccttataatattgaatttaatctttaagaattatactgcacacacaatttacatccaattacctttaagatttttttattttcttcaccttctcaaatatcaaccgaaatataataatttctacatccagtttaattgactttaagttattagtaattaggataaaaaaatataaatatgcttatacaaatccgcgctagtatattgtcaaaataagtacttaaaaaattgaatttatataaaaaaatgctccaaataattaagttgtcatgtactttcttaatttattgtatcaaaatcgtacctaccttacaggttgttgcatttatactaaattgcaccttcctgccaagttgttgtactagaacgctcatttctcaatttattgtaccaaattgcacccacctgctaagttgttgcaccgtgggtgcaatttactcttgtaataatattaatagaaaaattttaaatattttttggttggtatgtgcagtgtgtacacaaaaagacttgtgtgtgttagtatgtggatgtggatgttgtatgtggaatttttgtgatggtatgatttgtatgggaaattggtaggtcctgtaatttttttttcttgccagcatcttggtgcaggtttttattttttcaaaggaaggtgcgggttttaattacaaaccggcacgtatattctttgccacgtgtgtaggtcagtcaacaacctgcacctatatgctatttatgtacaggtgccggttgttttaaagaaccggcatctatatggatagcaacgtggcacgttagtttagaaccgacacctataatgccatatatgtgttagttcttacctaaaatccaacacctatatgtcttataggtgcctgttctacatccatattctaaactatagctggttcccaaccaaagtcatcagtgtgctaggtactggttgagaaatctggctcctatgactagttcccaagcaacacctaacatgttttctctagtattgtggtttgatttgattgactaatgttataattgcttgctatttaatcagtcactgaacctaatcagcaacagaaaaatcttcattcggctaattgctcaattaataaccgagttaaaccaactagccagtcgctcgtgcggtgcgactggatcaagtatacgactttgggttatttgccgtagctcaactccattaacttggaagaaaacggggagaaaataaaaccacttttaaggataatggttggggcatgtactgcaattttagggtcaacataccccactaccaatgttttctatcattacatagtgagagttaagattgtattcaaggtggcacaacggtctagtaatgtatttttgaagaatatggctaatgcaatgttagagaaatttgataaatattgggacagcacaaacaatatcatggttattgctacagtccttgatcaaaatgagatacattaaattgttcttcggaaaaaattatgactgcataagagctagcatacagcttgatgccatcactggtgagttggataagctatgaaagacattcgagaagatctatcgccagaaagtaggtgacaataacccacacgatgctcattcagcctcatcttggaaggatgcatgcaactctttggcttctattgttccaagtggattccagtcctctttgcaatctaatgctactgaatcttcaaagtatgaataactcatctatgttgatgaagcaactgtgcccatagataataatgcattcaacttacttggttattggaaggtaaatgctcataggtctcctgttttgtcgagtatggcaacgaatttcttttttttggctattcaagctagcagtgttttatcacagttcacttttagcactggacgtagagttatcgatgactatatgagttcaggcattggtttgtgctcaagttggataagagaccctcaaaatgagaatagttatccaaatacttgtggtttgtgtcgacgggtgatacccgtagaccggatatagagggtattggggtacgctggtacaaggatctacgtagtacgacatcgagcaatcaaaagacaagaattttactggttcaggccccttgataggtaatagccttaatccagttgacatgggattatatggtggaaaacacaggttacaaaggaaaagatggaactcggggggtttggcgagattgtagtcgagttgattcgactagctctcgtcgacttggctcctcgcaggctccggcttcgtaggctgtgtgggttgtgttggctctgagattcgatgatccatggcctccccggggggttccttttatatcgcaggtctgatgctctccgagtaggactcgaatatactagacctggcacgacacgtaggtaacccaattcttgtccgagaaggactctcctcatcaatcgatttcacgaaaggtttcctttaatcacaaaggaaatatccacgtacgcatagatatgccatgtcgttacgtgacgtacaccgaagggtagagggtatgcctgacccgtaaccctgacagtagcccccgacttctgctcaacaatgaactcgtacgaccattcgcgacttcaggtgtcgagaacgttgtcattccaggtgcgagaaccacggagatgatgtgtagtcgagcataccatttgaacccaacggtcacgagtgaattttgaactgaagtcaaaaaactgccacacgtaacggacctagaaatttccagcggggatttctctccgttccttggaattcgcaccatcgggagtgcggttatttaaagggattttgggtgcgcgttttgaagtccgcccactttgtcaagcacacactgctcattaacgctcctcgccttcttcgctgtcgcaaaaaaccctagcttcgtcagttttcgttcatctccggcgatcttccagcgacgatggatcttggcaagtcggcttccaccagcgcaaccctgaagaagctccaagaggatggcgcccttcctggccgtgaaaaggcagagagggaagcaggaggtactaatccacagcccctcttaggtcgcatggttgcgatcgaagactatgttgtctgcgggtttcttcctcccccctctgaattccttctgctagtctttaatttctatgggctttcacttctgcacttgaaccccaactccattgctttccttagtgtctttgtgcatctttatgaggcctacattggggtagagccctttcttgacctgttccgcttctactacgagttgcgctggatggaatccaatagggtgtctggatgcgtcgggttccgacttcgtgacggaatgaagtcgcggtatgtccccttccagtgtccctcttctcgcagtaaatggcggaacaggtggttttatcttgaggtcaaggattcggatccagtccttgttgttcccgaggagcaaccggacaaaattccggtttggaccgccaagccccctttgaccccctctctcgaatcgtttatcgacatcatcgatgatctccgagaacggggcttatcgggatatgaagtcgttgcagacttcgtcgggaggcgaatccagccgctccaggctcgggcccacccggcttataactattccggggcagatgacgcgacccgggtttctcctcggggtatccttctcgcattcattttgatatgcttgtactcacattccttttcgacttatcaaaaattgattctttcttgacaggtctgagcggcgaagtcgtgggacggcgcgtgagtcaagtaatgatcagcggcccgacaacagcgagcgacatccccgcgcccctttgtgaaagggaagcagcggagcgcgacgaggcaatcaatgtgagttcatttgataagcgtccgcctcccttgcacaaaatcggcttatgacatgatttagcgtaggcccttcctttgactgatgtcatcggtccgctcgcggatcatcaggtggcggcgtctctgaaggagaaggtcatccaggaggcgtccgatgctgccaccactagtggtggcaaagctccgactaagacgaggaaattctcatctgtactcggaaatcgccgcaaggcagaaactcccttggtaatttcctccttgtcattaggttgtgtagcgaggaaagtttgttctcactctttatcggttgtcttgtaggcttccgacgtgtctcctccgcccgcgcgacgtcagcgtattgtgacgatccgcgagaagtaagtgaagaatttttagactctcatatcttctgtttgagcggagttttgattcatggcggttaacagggaggcgcggtcgaaagctgctcggggcaagtctggggaaacgtccggcgcgtcccctgtcacggcgtcaacagatgttgtgcccgtggtcgggagtcgggaggcgacaccgaacggccccgtgggagatcccgtcgagggctgcggtctgtcagaggccgtcctcacctgggaggagcgccacgtcgagatgaggcgccttctcaaagccggtgcttgcggcgtggggcgcgaggtctcggaggcgagggcggagacggcggcggccaatgcgcgtgcggagctcttggtgcgggaactggctgaagcccgcgaggacctcacgaagatgagggagctggtggccggcaacgagcgccagcgcaaagggctcgaggaccgcatgtcggaactcggggataacctctccgagatccgtggttcgctgcgggtcacctacaccggtctccaccaacttgctgaggagtgcggcgtcaagtcctcgatcccggcgaaccccgacgagttctcgttgacctcttctcttgcggagctggcgacggcgatgggggaaatcccctccaggcacgtggccaggatcgcggaggagacgtccaacggtatctataccggggcgtgtcacgtcctcgcatgcgtgaagttgtcgtgtcctgaactcgatctgcgcgagatcttggatcagggagcggcaagcgacgcgcgcaaggaggtgatggaggaagtcggtgacctgggggagtatgtcctccccctttttgaagagtaggatctcttgtatattttttttctgacttgtaaatcttaaactctggttgccttcgtgcgcatgattaccatctttgttcaccgttgatctcggaaatctctcttatcgactgtagagatgctgatgacgaggatgtccggcaacgtgggcagcctgagtcactggcgataattccggtactcgagtttgaactgcacgcctcacatgacgtcgaggaccaaactcctgatgcggaggttgaagtgacgacaactgcctcaagtgagtagcctatcaaccttatcgttgttttgggggtttccgggttgtcttagtggtcgttacgtttagcagatctcgaggatgcccttgcgacccaaaatcgtcgtatccaatactggaagacgaaatttgaagtggcggaactcgagagagcaatgctagccgtaaagaatgagaaagctgtggaaacgctccgaggccgcgaggtgtggttctcgtcttacttgcagagttgctgcaccacgatggctagggtgtgccgggagttcgggtagtccgcggtgatcctaaggaatcgccggccgggtacatctcgtggctcaacggggcctgtgcccaactcaatggcattggcaagcgaatcgacgaggccttgaagcaagagtgtcgtcgagcgagccgatatgccggaggacacatgctggcttgcctgcgagatcaccgcccgcgcttggatctcgaatttttacgtgaaggttttttacattctcggaggaacccggcggagatagatcaccttgcgaggtcgatgtcgccgttggccgagaagattttccaatcaatggactggcgttggccgtcttggtaatgtttgtatcctgcgaccaaatattttaggggaagatgtaatgcagcgaaatatctatgtataaactgtaaggaatgttttgtgaataaagaaattaatctttaacaaatgttttcttactctggatgttgtgcataagagtgtgttctcagttaacgactttggttagccgtttgagtcgtacactctccctagcccccagccttgtcgtcggagggatttcctcaggtggcaaggctcttagacccttggcatgtcttggttgaataagctctgatcctagcccccagtcgtgaaggtggaaagctcggttttcgattacacggcttggttaatacgcacggcgagaactcttacacgaccagatctgacatggtcttttgtctctgaaggatctgataaggccttatcggctctgggcgtccctagccgaagatcccttaggttcctcggaggccttgtcgagacggcgtaaagggacataaggacaggtttcaacgctaggtgtcgtcagagtaaggggtcattgggtgaaaacactttggtcgtcatatgagaccaaggaataggctttattgatactgtaagggtgcttacaggtatagcggtattgactcatacatagaatttacgtagttggtcaatgttccacgaatttgctagttcgcgaccgtcgccgtcggcgattttgaatgcgcctggccgcaagacttgtgtgatcgtgttgggtccttcccattttggtgagagtttgtttcgccccgcttgagtttgaactcgcctgaggacatagtcgccgatcgaaagtatgcgtgctcggatgcgcttctcatgataacggcggagggcttgttgatagctagctgctcggacggcaactcgctcacgatgctcctcgagaaggtttacatcgatatctcgctgattctcctggttctcgtcggaatgcttctgtactcgtgtgctttgatgccgtaactcgtcggggagcatggcttcagaaccgtacacgaggaagaagggtgtttccttattggacgttgtcggtgtagtgcgcacggcccatagtactgatgggagttcttcaacccattttttgtcgtgtgacatgagtctgtcgtagacgcgggttttaatcccttgtagtactatgccgttcgccctttcggcttgtccattgctttgagggtgagagaccgaggcgaaacatattttgactcccaagccgatgcagtaatcctggaaatcggcgctgatgaattgagagccgttgtcggttatgatgcggtgcggtagtccgtatctgcaaaatatccctctgacgaacttgatggcgttatcggccttgatttccccggtgggtactgcttcgatccacttggtgaacttgttgatcgccacaaataggaatctgtagccgccctgtcctcgtgggaatggaccaagtatgtctagcccccagcatgagaacggccaagtcagagggatagtctggagcgcttgtgcaggcagctttttgtgcttgctgtggaattgacaggcttcacatcgctggaccatgtcgcatgcatctttaagggctgttggccagaagaacccttgtcgaaaggctttgccgaccaatgttcgaccggcggcatgtgacccgcatatgccttcatgtatgtcgaggaggagttgtttgccgtcgtcggtagagacgcatttgagaaatatcccatttggcgctttttttgtataaatcgttgccgatcatacagtaaatctttgctttgcgggttattttctcagcctctgtatcgtcttcgggtaactcctcgctgccgatgaatttgattaatgggctgcgccagtcgtctgtagtttcgatgtcagcaacttcgcattctgcctcagtgacctctgagctgatgtcgggggtgctcgggccaacttcgccgctaacttctttcaccgatggctttgtcagaacgtcgagaaaagtgccgggctcgagcggctctcgtctggatgcgcgtcgtgctaggtcatctggctcgacgttgtccttgcggtagacgtgccgaacctcgatcccatcgaacctcctctctagctttctgacttctgagagatacttggataactcggggttggagcatttgtagtctttgtgcacctggtttgcgactagctcagagtcccctttgatgattagtcgcttggccccaagtgcggctgcagctcgtatcccggcgagtagtccttcgtattctgcagtgttattggttgccctgaagttgaggtggatcgcgtgtttgaattgatctccagaaggagatgttaagataaatcctgcccctgctccttggctgttgagtgcgccatcgaacgccattgtccatgtctcattttcgccttggctgtctgacttgttatctggtatggtccaatcggccacgaagtcggcaagcacatgagatttgatggctgtttgcggcacaaagtggatatcaaattggcttagctcgactacccattttgcgatgcggccgacaacgtctttgtttctcacaacttcgccgagtgggaaggaggagacaactgtgactctgtgggcttgaaagtagtggcgtagcttccttgatgtcatgattactgcgtagagcagtttttgaatctatggatatcttgtctttgcgtcatggagagcttcgctgacgtaataaactggtcgctgcactttctctctctcaacgacaatgacggtgctaacggaatatggcgtagcggcaatataaaggaataattcttcattaggttggggagcaacgagtacagggggttttgataggtagcgcttgagtgcaataaatgcctcctcagcttcctgtgtccatacgaatttgtcttgtttcttcagcaaggcgaagaaaggctgtcctcgttctcccatcctggcgacgaatctgcttaatgctgccatacatccggttagcttctgtacctccttaagtcttgtgggcgacttcatgttctcaattgctttgatcttctcgggattcgcctctattcctctgccagaaacgaggaatccgagtaacttgcccgacggtactccgaacgtgcacttctctgggttgagcatgaggcgatatcgtcgggggttgtcgaacgtttcccgcaggtcatcgatcaatgagtcgcttgtcttggttttgacaacgatatcgtcgacataagcctcgacattgttgccaagctggttgctaagtgcgccctggaccgtgcgctggaaggtattcccggcggttatcagtccgaaaggcatcttaacgtaacaaaataccccgaatggcgtgatgaacactgttttctcctcgtcctctttcaccatactgatttggtggtaaccggagtaagcgtcgaggaagcttaaaagctcgcatccggctgttgaatccaccaactggtctattcaagggagaggaaagtgatccttggggcaggccttgttgaggtctgtgaagtcgacacacattctccattttccgttggccttccgcaccatgactgggttggctagccactctggatgaagtacttctctgatgaagccggctttgagaagtttgtcgagctcttctcgtatggcttgttttcaatctggtgcaaatctccgcagtctttgctttactggcttggcatcaggtcgcaccattagtttgtgctcaatcacctccctggggacccccggcatgtcggacggctgccaagcgaacacatcggcattatcgcggaggaaggtgatgagcgcgagttcctatttctcatctagtgtagccccgattttgacagtcttgtcggggttagcaatagagagtggaacgatcttgatggcgccgtctggcttcggcgtcttgtttagcttgctcactttcttgggtggctcagacgtggcgggtggggtgggcatttgctcgaccatgtcgaggctccgcttgtcgcactgcaccgccagttttgcgttcccttgaatagtgattgttcccttcggtcccggtatcttgagcacttgatatgcgtagtgggatgcggccatgaacttcgcaagtgcagttctcccgatgatggcgctgtaagctgtatcgaattcagcgacatcgaaggtgatctactctgttcagaagttgttggcttggccgaaggtcacaggcaacgtaatcttgcccaaaggtctggacgatgattgcggagtaattccatggaagggctgagtggttggtgtcaactcactctgcggaactcccattgcatccagagtgctggcaaagaggaggttgatcgagctgcctccgttgatgagaacccttgctaccttgacgttccgaatggtgggtttgaccacgatcggataccgtcctgggataacagaggtctttgggtggtcttctgccgagaactctattctctgctcagaccacttcatcttgggtgcagccccctgccaagtcgaacagacttcgcgttccactttcttgtattctcacttggaggaatacgttgtggagccaccgaagatgtgtgagacatggaggtcggagtctgggtacgcagaatctgattcgtgaggaggtgactcctcgttcttctcgacaacacgtacccgcttgcctttttcaaacgccatgtgcttctcgagcgactttttaaaaacaaggcaatcctccagagaatgtctgtccgttttgtgtatagggcaccatgatttttttgtatcgctgccttgtgggtctgggcgcttgggagggttcgcgtactctgctgcgaggacttccgcttgagcttttctcttcccgtttttgtgatttttcttcttgcttgactcagatgcgtctgcggttggtttcttctctcccccggtcttcggcttgtcgttcttgcgtcttagcgcgtcatccacgtgggcgcaccgctcaacgatctcgaataacctttgagtagttgtgatgcgtcttgttgccaacacctgggtagtgtagtgatctctgacaccggacttgaaggcgcaaattacagaagcatcggtaatctcgggaattgtgtttctgcactcgttgaagcgtcgaacgtatcccctcaatgattcccccgagttatgtgttaacgcgtgtaagtcgtcttcgatcgcgtggcgcttgtttgttccttggaaattggcgacgaactgttgccataggtctgaccacgaagagattgagtaggaggggagatgcatcagccacgaacgtgcagaacccttccacgcggttggtaaatagttcgccaacgcattgtcatctgctccggcagcataaagcactgtcgagtagacttgaaggaattcttctgggtcggtgctcccatcatacttttcaatagctccgggtcggaatctctcaggccatcggacatcacgtagggaacgacttaaagccctacacccagcactgggagcggtgggttgtcggtggtcgcgtgaccttctggatgtctgtctgacgatgaagaggacgcggatgatgatgatgatgacgatgggtcgcttggttccggcgtacgattacgaggatgacgacctggatctcgggaatcctgtcgtcgtctctcgctgttgtcttgtcacatcttgatttttgtttcaggatttataaattatttaataaattaataatataatttatattaaatgttctttaatttacaagtgaagttaaatgtgggaaataaaatttcttaaatctaaagcatggatggatttaatttttattaaattctccatgattaagtcaactctctgaaatattctcggatttttcggagctcaattcctaaatgatacaaagaacagttcagtaattatttgatcattaatgatctaatgatatttgttaagagcttttcttgtttaaaatccttaaattataaattgttgtttaaaaggaataattagaaaagatcttaaaagcctaaaagagaagatctaattttaatttgctaaatctcaacataaaattgggctagataaaatttcattaaatactttgcttaattctataattcctagatttttctgggatttatttgagctaaggaagtatttttaataaatggaattgcatttcatgaataatttaaattgaaaaaggtttttaaaagtcttcttttggctttgggccgaaagtcggcccaaaaccgctccctcttctcctcggcccagtccggcccagtccgatgagccgccgctcttctctctcggtgtcgctgacaggcgggacccacctgtcagggtcgtcgtcctcctcgcgccgccggcgccgcccgaaaccctagcgcaagccgccgccgtctccttccaaattcggccgatcctttccttctccggccgaatcttttgaggggaaatgatctcctcgatctcctcttccttttctcttatagaaactccggtcaatttcgtttggaaatcgacggacttgagttcgattcggatcgatctctctcctccgaacccttgctttcctccgccgtcgctgaagaccgccggagcaccgtcgccgccgtcgacccgatcttctccggcgctttttcctcgtcgccggcgccgtccgttgcttctccgccgcttctttggtcaccggtgagttcgccgcgtcgcgctctacgtcctggtgctcttcgtttgcgccgccgcgccgtcgttcaccggcgagcatgcgttgccgagccaccgccggtgctgacgtcatcgctgacgtcgttgctgacgtcatcgtcgccgtctgccgtgagccggtcgtggaccaatcgatctcggccgtccgttttggatagggtcgatctcggccgttcgtttccgtgagccgccgccgtgcgcccagttcaccgtgaacccgacccgctgacgcaataatcctcttttccttttcaaaaataattcattattgcgtcataattccattaaaatccatataagtgttttaatccgatttaatctttgaaaattcataactaattcactgtaactcagtttaatgtggttcaagttgcaaaaaattatataaaataaagatctacatattaaaattgtccataaattgaattaaatttatttaattctttttaaatgggctttaattagatttaatcttgtaaaattcgtaataaattcatatgaagtcagaatgaggccgttcaagtctcataattcatctaaaattatgatctacatgtttgtttacttttcatgtattgtttatttggtttttattagtctttttcttcgttttgcgtgttagcttgtcgtttccgtcgttgcgaaggttcgcgagtgcgccggaagtattcaagaagattaattgaagaccgattattgcaaggcaagtcacacagatcctaaacacaatcctttgagcatgttgatcctatatttaaattctctatttatttcaactgtgcatttattttcgaatgtcactgggtggtgtgaacctattcctttgttatggcctgtttacattgattactttattccttgataccttgggtgattataacttgactagttgagctatatatattggttcagctagatattagatatgattgcttagccatgcttagaaacattagcacactattgggataacttatgactcattatttaaggatggtttaatggtagctcatgatggtcaatcgtgattggttaattaattacttgccaactaaaacttgataatggtgggttgtgagcacatggttttgagagtcgtgctcatgacaattaaggaccggttcgcgagctactgttgtgaaacattaaccgtgccaaccacaagccagcgtgggcaacggctttaccttttgtataacatggttcattgcggagcaccagactgagaagtggcggagataagcccacgggggtcgctggggagtccatgcctctggtttttgagggggtgattatgatccaggaatggtgcgctgcggtggattgtgttatgcaaggggtactgtcacagcccctttccgaggtaccgtggtggtactgaggcacatggtgacatgatgtggggctgtgtcttgtgggtacagtggtacacctctggccagagtaaaactattcgaatagccgtgcccgcggttatgggcgagttgagcaatgtttttcgtgattagtcccacacctctcacaataattatagatgttatacctggtaataatttgcttagctcctggtttggagattagatctgtacagccaggtatggttgcttcagaatggttgggcctgagcagcatgggcgtgttgttcagtgttgattaaaatttctgattaattactccactgttttacttctcttaaatgttttgctaaatgctgcttttgcaaatgagcctatattatgccatcctttggtatccttgtgcacttgcatatttgctgtgtggcttgctgagtatgtcatatgctcaccttgcaataatcaatcaacctcagttgaagaataaagatcccgaaggagaagacgtttggcttataccccagttgagctgcctgtgggagtggagccggagcttcgctagattttattttccgctgcagttttcttcttggtgaggactaagtgcctcataagtaagtatttatcattttagttaatttgatgaatctgcatactaaattgtcagtttgtgtacctcggctgattcctggacgaggattatatgcacaaataagttcggaaattactagtgaatttctgggcgtgacatgtctcgacgccgatctccttcatcgtcgtcgttgcggcgacggccatgaccagtgttgtctggcccccgccggtcgcgatcgtcgtagtctcggtcctcgtttggacgatttcctcgatcatggcgtcgtgaggagacatgacgccgggaacggtttgcgtcatcccgtgtgcgtcgtgcttctcggcgaccgttgatttgatctcgaagatcgccagtgccacgaggtggaggggtagcttgttggggtgattccctccgttccggattttcaccattggcgtcgccgactggcgatcgattttgttgtgctgcggtggcggcttcttcgaacgcattgctaaggtcagtcaccgatgcccgtaatcgttccgtccaacgctcgaggtcgttgttcagaacgggatcgtaaggtgtttccctcagtatggcttgaacaaccctgatgtgctgggctggagtagtcgattgattcgccgtctccgcattggcttgtgctgacgtgccaacttcatcgatagccaataccttccgcgccgcgcctgacgtcgatgacccatagtcttcgaggagatgtaagacagatggttcgtggggatcgagatcgattaccccaacgaatcgatctgaggccggagtcgctccttgttccttgccgttatccctgacggggacgtatgacttaggagacggagttttcatggcgccgaggagaactttgcagcttgagaggtcgtgattctttgtcttatggataggacaatagtcgtcccgagttggagaagtacgctgaattccacgttctttgcaggcgcgaatttcagcacggacattgatgaatacccagcaatcttgaaaggtatgtttcttggttttgtggataggacaccaagacctggtagcttcggaagttatccttatcggcccgcgattcatgtcagaaggacaaagcttggccacatcagaatccttcacgagtttggacgtagtcggcaatccgttctccgtttcaacgggtggatttttcgacatggaggcgtcttggttcgtagccacggcgttctcgtttccagtcattggaggaccggttgagatcggcatcgtggtgtaaaccgggtagacgatttcgccgacttgagtccataccagcattgttgaagtaggaaaaacttggctgaagctggtgttggcgttgttgtcgacgatatgggattatatggtggaaaacacaggttacaaaggaaaagatggaactcggggggtttggcgagattgtagtcgagttgattcgactagctctcgtcgatttggctcctcgcaggctccggcttcgtaggctgtgtgggttgtgttggctctgagattcgatgatccatggcctccccagggggtcccttttatatcgcaggtctgatgctctccgagtaggactcgaatatactagacctggcacgacacgtaggtaacccaattcttgtccgagaaggactctcctcatcaatcgatttcacgaaaggtttcctttaatcacaaaggaaatatccgcgtacgcatagatataccatgtcgttacgtgacgtacaccgaagggtagtgggtatgcctgacccgtaaccctgacagtatgtattgctcatttggattgttttcgaatcagttttgtttttcttatgcatttgtatttgtgtacttgtatttagtgcaccaatgctaattattaaactcttttttcaaggggaagatgatgaagatgacactgagtttgtggagtttccacatggtgtggtggcgagcaacttgtaattctttgatggtcttgatgttgaggaggatggtgttgccttgatgctgcttgatagaagaaaggagaattgcttgcgtattttggtgctgatgttggcaatttggcacgaacttttgtgattctgtgaattgtgatggtttgatggacatgaaggactggattgtaatagtaatatttaatctaagctagttgcattgcatggcatagtagcatttttgcatatttgcacggacgatatggacatgttactatcatattatgtcaactatggagtatggatagatggacttatccgttgaagttttccccgttgcatatttgcatggatgatggattgatggacatgtaaataatcatgatcttcatcccctaacttgctggacatgcaatatgggcacgaatgttgatatggctcgtgacctaaaagccagcttgaactggctgtcgagctgagccgagccagcctcctagcacgttactataacgagacgagctgagccaactcggtatgctaacgagctagctaggctgagcccaaccgagctgagctggcttaatattcaccccctagctatgtaccacataatccgcgtgcttattattaggaatgaagagcgtcaataaaatcccaaatttacaaattcatagatggacttattacaaattccatgattggctccatgcatgcatggctctcttgtggagcaattttgttttcttgtttcattattccttctatgttcgcaacacaattacaataatttgaacactattagcagtaaaagggccactcacatttatttcgcagtcgaaaatgttgatggaaatttcttgacacatcaataattttatagtaagtaatacttcatatttaaaataccttctttctagctatatgcacctagactagcccaagtgcttagctagctagaaagatgatattttagagaccgagggagtactagcacaaactgcattgtcaatccaatgagagtactactaaaaattttgttactagaaatctctgatcacattgttaaatgcttttcactttttcagacaggtaattggattttaagaaaatcttttgagcgttgtatgatttcgtttgctactatgttctgtgttattaaattgtccgtacatttttgtttggagtcctttcctgtgttctaccaagggaagtacttctaagtctttgaatttttcatattctgaatggctgcagactatggaacacaaactagctaacccaccccatgtgtggatagaaaaaattgaagtaatagtttcagggtatatgatccttttccattgttcataaaaataattatgattttattcagtatcctattatacgtctttgtatcattaaatgattatgttggatgatacactactggagaaacccacaatagtcttggtttgcaaccccctttagtcccgggttacaaatcgagactaaagatgtcgatctttagtccctgttgttcctgttgaaataaccgggactaaagatttatctttagttccggttggttttttccattgtttgcatattgatttcgaaccaaactcaacaataaaatcattcacattcacataaacatcacaaaatcatcaacaaattcacaaatcgaatgaacatactcaaattgacatcacaaattcacaattcgcatcacaaatttacaaatccaaagacatcacaaatcaacaaattcagagataaatcaacaaataaataaataaatcatccactcgtcgacgccagagctaatgccgcgcgggctgctgccgcccccgcgcaggccgccttcgctcgctcctcgctactcccgcaaggataagagagaggaaagagaaagagaggagagagaggaggaaattaaagatgaggaaaagggaggaggagtggaggagaggataagtgtggaggagaggatatacagggggacccataggttcccggtatgcactggcatacccataagtttgaaaattttgctaggatcagctctgcaccaggaagtcaggaactatgcaggtgtatgcagtatgcagtaggctgcttgctcaatgctcctactgtactactagtagacttcctttctctctctcaatgcacgagctccaaagcaagcaagctagctagtactgtagtacgtacttcagctgtcagctactcagctgtcaagctactcagctgccaagctactcctgccaatgctttgatttggtttgaccttttatatatatctattgttaggttaatctactgtttgtattattctcctaaccatctattgcatcaagtctcgtagtactactttactaacagatttgaatcatctccaattcaccaattgtagcttaattttgaatatattaattgactttgagaaatcgacatcctaattgttttaaagaagattttgcatgatttgaatttagagtttagatagaatcaatatattgacattgttatcaattgaaaagatcgttttgatgaagaaaccaattaaattagttggttgtaatttctattttcattcaatacatatgagatgatggtttaatttctatagtaactttgcatgtataatttgatattgggattgcctttatttgtatcatgtaacttagatttccaattctacttatattattgtatgagagatatgtatatatgtattagtgcatacccagtgtagcttttctgggtccgccactgattatatataaagcaacaaaagatagtaggggccagatgctttttaaaccgagactgttggtattaaagatcataaagtggcgttgggcttttcaaccagatgctattggaaccggtactaatgtgatttttggccgatccacgaaagattagttctctagtagtgatagtgttgagtgtgattttgtataatgggacgatgcatacggttatctgtttacattgcttgatgaactattgaacttaagagcatttttatttgcaaagagtgacgtggactccatgtgcatagacagcatagtgacttggtataaggaagcaaaacgaactcctgaatataacaacacaaactggactgataacgaactgtatctgaccaacctgacagcagcctcgccatcaatccattagtggaaactagtggtctcactcacaaagatgcttggccgtgcataaacagcctatcagcaaacacataagttgaaacattgtgcttttttagtttttgaaggattgcggaccacaagtaatggatattagtgacatttccaatgtactgcactaacatgtcactcaagttaaaccagccaatggctgaaggtataggtggacgtatatttcatttgctgcaattcacaggacatacccaagttgttaggaagcaataataccgttgttggtactgtgtgtaaggctgagttgttttgagcaattcaaagtttcgttagcacatttttcaaactgttaacggatgtgttttatgaaaactcttatatattaagaaaataaaatagatctattttttatgtttaaaatatttaatagttcattagtcaccactaatgatctttctcgttttcggtgccatagaaaatctaaccggggttgctcaaaccggagtttaaaattttatgataaatataatactccctccgtcccaaaataagtgcagttttgcactattcatctccaacgtttgactgttcgtcttatttgaaatttttttataattattatttttattattattagatgataaaatatgaatagtactttatgtgtggctaatttttttaaaaaaaattataaatttttcaaataagacggacggtcaaacgttggacacgtatttccacggctgcaattattttgggacggaggtagtacatgtttaactaagtgcagcttatggagtctcgaattgaggaaactagtgcgcttgcttgtattcggtggccagtttaacttgagtgacagcattgttaaatcaggatatatgcactgcttaccaaggaaaatgaccttcaccaagtaagtcaaatcgccactcattagaacgttgtagaagaccatgcatatgggcagagcactacctgcttggatcacaagctttcctcggaagggtcgtatagttcatcaagcaattcgaaactggaattaattaggaaccacgtttcaggttcgtggaacacgttctatatgaagtaacaaaactaaaattctgtttggttgaacgagctagaatgtagagaattaacttgaggcttcacgttgttatgtgtatgtggtttttttttctattccattgtaataaatactccctccgtttacaaatataatagaatttaggccgtgtttagttcatgtgccaaaatatttttttaaatatacggacacacatttgaagtattaaacatagactaataacaaaacaaattacagattccgtatgtaaactgcgagacgaatttattaagcctaattaatctgtcattaccaaatgtttactatagcatcataatgtcaaatcatggtgaaattaggctcaaaaaattcgtctcgcaattttcatgcaaactgtgcaattgttttttttcgtccacatttaatgctccatatatgtgtccaaatatttgatatgatggaatttatggaagtttgaagggaactaaacactgtcttagtgccattccatttatccaccaatacgaaggattttaaaagcccaaggagaaaactatactccctctatcccattttaagcgtaaccttgagtttccatgtctaattttgatcgtctatcttatttgaaatattttatgactagtatttttattgatgttagatgacaaaacatgaataatactttatgcgtgacttatatttttgtttttttaatttttagaaaagtttttaaataagacggacgattaaagttggacacgaaaactcatggctgcgtttaaaatgagatggagggagacattgcctcgggcgtccaatgaatcgttcaacgtgtcacttgtcagtgctacctaaatttgtactaaaagtggcaaaattccgtatgtttgtgaataatatgaaatgatttgtgttaaaatatagtataatggattattttgctgcctgaaaaataaattacatccttttaaaggtgggacaatcattgttcatacttttggaagctccaccattacatacatagtttccgtcgttttcacgtcctaccaacattgaacaaagcacgattgactggcatactcaatttgaccatattgttttgaaaacttgcgtattattttactagggggcatattgcataagccccactaggtagggttcttgtatttgtcaatctgccagtacatctcgtctaattgttgttataccactagggttcttgtttcatccatacgttgctagaatgccattggatcaaaaacagtaacactggaagatatactgagggacaagaaaggagagagtgccggaaatcaattgagaaaaaggggttgtatgatcgaatacaagaaacaaacttagcatagaaggtgaacggtagtaacacaaaaaaactattttttttaataaaaagaacgctctaacttgatagagtgtgtcgttggttgaaccgctggaccaacactggttagatcgaatcctatccaccggtcggaccgctgtgacaccactggttagactacttgccttatgtcgctctgatcgtcggggtctagaaaaacacaaatctgatccgaatccgatccaactcgtagaatctgccagcctgactgttgagtagccctatcggagcgcaccaaacccactggtctaaccgaccacccaatgccaaccacactattcaatgtctgaaaacacttcaccatattttcacaaacaatcgcctttgacaatggttcatcaccgcgattaaatcatcacctgattctacggacactactatagaaatacacatagcgatatagtgccaaaaaatagttaaaaatggcacctatagtgctttccccacctccgcaggttgaaaacatacaaaaccggtacctttaagcaactatatgtgccttttttagagaaaaaccggcacctatcctatagctaccgtttaaaaaaaaggcacctataatatattatgggtatcaattaaataaaaaccaatgtgttggttttctaaaaagccggcaccatccttaaccgagctgaaccggacgagccaatcagagcccttctctctctctctctcctccccgcaactggcttaagcgacggtggcttctcccaaggaggatccaatggcgaaggcgtcaatgacgggcggggcggcgtcgtcagcgggcagggtgtcatcggcggggtctcccgcatgtatcgggcgtcgggacgaatgggcggcgtcgacgggtgttcccgtggcagatctggcttcggcgggctcttccgcagcggatccggcgtcaacgggtgttcccacatcgggtctgacgtcggtggggtctcccatggtggatccagcgtcggcgggggttctcgcggcggatccgtcggcggcggtagggggaacaacgttagcggttgtctacccctctttcttgttcatgtgagatattgttgttcttgttcatgtgagatttgtgttcttgttcatgtgagacattggtgccggcatcacttattagggccgcctacttggtgccaagttggaaactggcatctattagggtttcccaaccggcaccaagcccgattttttaccagtcagtggtaaaggctgggatcaaacccaggatcactgggttgtgtgatgcatgcactaaccatttaacaaacaagagaaacctagcttgatgaactactacatcgtacaaccttgaaaatatcttgggaattgacttgaatatcctcatgaacgttggtgcatctgccactattataggatgtaacttcaacgtaaagagaatgtaaaaaatgagtaaaaatcatatcttaattatttaccatcaattacaataatgtaaaaaaatgagtaaaaatcatatcttaattatttaccatcaatcacattaaaaattacactgcaaacaaaataatgtagccggcaacaggaaaacttgcatttttaggtgtcactttattaaaaagagatactaaaatggcaaccgtttttcttctactgaacagaccgctggttagtgagaggagattttgcgagagaagaaataatgttggtttttaagcttcgtggaacaaaaacatttagtagaagacatcgttggatgagaaacaccaaagacaacaggtcgagactcatatctcaatgtaaatcgaatgaccaaatattcgtgtcatttcatcaagtaaaagcattttgtaatagcaaaatctaaattaagaggctctcgttttagtgctaacgagaaaccataactagacacgttaactatagttctagtccatcaagcaagtagaaaatatattcctatcacctatgttgcaaataattttttttcttaaactactcatatgatctacgatccgattacatggttgtgttcgtaagaattaaatctttataacaagttctcacatgattatattttgatgaaaaattacaaattacttttataatatggttgtgtttagttcgtgtgccaattttttttacgtatacagacacacataataagtattaaacgtagattaataacaaaacaaataatagattccgcctgtaaactgcgagatgaatttattaatcataattaatccatcattagtaagtgtttactgtagcatcgcattgtcaaatcatggcgtaattagactcgaaagattcgtctcgcgatttacatgcaaactgtgcaatttgttttttttcgtctacatttaatactccatgcatgtgtccaacaaacatttgatgtgacgaaaaagatggaagtttgaaaaaataaataaatctaaacacggcctatatctaaattatttttagatttcactaaattacttgttatacatataaaagtaaattcaataaagtctaaaaataatttaagaagtaacttaaaacaaaaatgaagtaactttttcatgacattagaagtagattcgttatggaggtaaaaacatgagtctatctagaaattaaatttaatcaacacaaattatggaattggctaaaaatagtaataaaataaacagcgcacaacattatgaatatataagaagtaatttaataaaatcgaaaagtaatttatatatatgataaaagtaacttacatatataataaaagtaatttacaacaaagatatttcttttatcaaaatatagtcatgtaagatcttgttgtaaagatttaattacaacgaacacaatggtgtaatcggattatagatcagataggtaatttaaagaaaaatccataagaagaaaaaaaaaagacatgtatcatttggtgtactagtaggcaaccatgtatgagatgagtttctggttaagacaatatagcgtgcagtctctatgtaatcacgtccgtttttataacttgcttaacaggatctctatatcactacgtactcaaaaacagcaagtgcgcacttgtcgtacaaacttcaaatttatatcatcacgaacgcacgatgcaaagacaaagttgtcacgtcaattgtttcattttaggcaatggcattgccattttggaagtgcatagccgcaatccacgcctatataaaccccacaacacttgcagtatccagcaaacaaaccaagctaaacaatcacccacttctatagttagttaaagtagcaacacttaattatttgcaattaatctaattgcatatatatgatggcttacactaatctctccaagaaactagccgtagccttggtagcactggccgtcgcctgtgcccacgcactcgcggcgcgcgaacttgtcgacgcggccgccatggcgcaacggcacgagcggtggatggccaagcacggccgcgcatacgccgacgacgccgagaaggcgcggcggctggaggtgttcagggacaacgtggcgttcatcgagtcggtgaacgccgccgcgagccagcacaagttctggctggaggagaaccagttcgccgacctcaccaacgccgagttcagggccacgcggacggggctcaggccgtcgtcgtcgcgcggcaaccgcgccccgacgtcgttccggtacgccaacgtcagcaccggcgatctcccggcgagcgtcgactggcgcggcaagggcgccgtcaaccccgtcaaggaccaaggcgattgcggtaagcgtgcgtggtgttcgtcccattttgcgtgaggtggcgttcgccgccatggcgagctgagagcgttgtgctgcgtcgtgcgtgcgtgtgcagggtgttgctgggcgttctcggcggtggcggccatggagggagccgtgaagctggccacggggaagctggtgtcgctgtcggagcagcagctggtgtcgtgcgacgtcaagggcgaggaccagggctgcgagggcgggctcatggacgacgcgttcgacttcatcatcaagaacggcggcctcgccgcggagtccgactacccgtacacggcgagcgacgacaagtgcgccaccgccggcgccggcgccgccgccgcgaccatcaaggggtacgaggacgtgccggcgaacgacgaggcggcgctgctcaaggccgtggcgaaccagccggtgtcggtggccatcgacggcggcgaccggcacttccagttctacaagggcggcgtcctctccggcgccgccggctgcgccaccgagctggaccacgcgatcacggcggtcgggtacggcgtggcgagcgacgggaccaagtactggctgatgaagaactcgtggggcacgtcgtggggggaggacggctacgtcaggatggagaggggcgtcgccgacaaggagggcgtctgtggcctcgccatgatggcctcctacccgacggcgtgacaaccatcactctgaaatctgaacgagtgaatggcatgcagctagcaggttttaaataagcagtatggtattatggatggtgctctgtttctgaattcggatagtacaaaacagaactggaatgtaatgacaacttgtgcaagatcaaaatttcttgtcttcacaactggaatctatctattatctatctatctatctatctatctatctatctatctatctatctattatatactaaaagtccattaacttttctaaaatcgctctcaagctgacatgtaacatcctaaaagcgctctcaagctgccacgtggtgcgaggagaggagatgaggacccacaaaaaaacgaaatcctctcccacaacgtctgcatgtacgcatgcatgtggatgcttttcttccatgcttagcggcaggattaccaagtattcagggttttacattaataaggtttttttttctgttatttggatcggtatgtaggagtccaagttgggctttagtccgttcagctggctaggcctttgtgccacctatatatgccatgttccttgtattaggagattggtttttagttttcctctgtgttgtgccgccgccaccgcctaggtcaggaaggagatggcgattccatacgttttgccaccatcgttgctgcgttggttaatttggtcctaggcatgttctgatttctgacgaagtcttcttgctctgatcggctatcattcttgctgcatgggtggagtttatgtacaggtttcgttagtttattcattataaactgaatcatctatctgtttatatttgatgctactggagctattcagttcagtttatctggagtaaatgatcttatgtgcgaccctatatactttgctggacgagatctctatcttaatattgatgctgctcttgattcaactggagattagggtgtatatatatatattctcgttgcattagaaaggacacatttatcccataccaagttgtacactcaacatagttatgtttacatccaaattttaagagatcaaaaacatttcaagaacaattgatagaacatagacctccaatattcccaaagaaacagaaaggataactggaattcagacaaaatttgggctaaatttaaacaaattttgttgaatccaaagcccaatataaattgaagaaatcatttgaattttttttgcttaaagttctataactattcttaagaacacaaatttcttaaagtttagaactccaaaacgaagatttgatatgtattaaaaataacatatagtttagatgacaattcataggaaccaacttcatttttgcgacataatactttcctataattaaagattgtgttgcaaggataattagcattcaaaatattcacaaacaaaatattgacaaaaaaacaggttgccaatagaatcaggaacaatcacgcatatacaaacattatattcatatgtgtagagtaatatttcaagcacattaaattagatgcccgcgcatatgcgcgggcttcctttctagttatctaaacagataaataatcgcgctctttcaattaacgcgtagtcaaagctacatcatcacttgatggattatcattataaaaaaaaaagggctgctatataccggtatcccgttgggatgtcccaacggaatcgctccatgtccacctccctcagacgcgagagcgctccacgtccacctccctcagacgcgagagcgcaggccaccgtgggagcagcacagaggcggctaacgccggcggcgcggacgcggccggcgccgacgagctccggcgtggaggacgtggccgccggcgacgagctcccgcgtggaggacgcggccgccggcgagctctggcgtggggcatggtcgcatggacggcggaggatctgcgtggtgacagagacagtgccggcgaagagctccggcgtggggcgtggacggcggaggatcctgcgtggtgatggcggcggcgccggtcacgagctccggcgtggaggacgcggccaccgggtgaggcgtggacaacagacgcggctgccggtgacgagctcccgacagaggacgcggtcgccagcgcgcgagctccgatgtggaccatggacgggggaggatgcggctgccggcgatgaggttcgggttcagtacggagcgtggacgggggaggacgcggccgccggtgacgatgcctcgacacctcgatgcctagctcctggtatctagtaggtatcatatgaatacgatacctcacaagtatcaccccgatacgtcgtagaaatcgcacgataccttataggtatcacatgatacctcacaagtatcgtctgatacgtgataggaatcgtctgatacctgatacgtggtagaatcacatgatacctggtaggtatcacccgataccagctagttatcaggtgatacatgtagggtatcatacaattcttaccacgtagaagatgatagttgcgaggtatcaagtgatacttgagtaggatctcacggcttaggagctcagcctcgttcctatttggatgggaaatatggacgaagggtatcctgtcccgacggtataccggtatatagcatttccgaaaaaaaaaaaccttatggatgatggcatgatgcaatatttctgcattctgatacttgttcagattgcagtgcaataagccaataacaacttgtacaacaaaataaacaaagctcgttcagatttgtggttacaactggtcaaggatgcctcttcatgcagtacaagctgcatcaccacatgatagaggaccaaatcaatctggcatgctgaattaaccaaatgacaggattcacatttcgtagaagaacaaatcggaaaaatcacattacgtctattgacaattgacacgcatctctgtgcatgatcagtagagaaacagtgatgcagaacctgaaaatataacttgtagatacaaatggaatatgagaaggttatctctgactctcagaaatgagatcacaccttcacatcagcattaagccacgtacttatgtaacatcagtatcaagccttagctaaccaaagaagaggcatgaatccagaattccagatagagtagttcttactttttagttgttaggcagcaagcaaaatttacctctgtggaatggcacttgttggctagaataaacttgctactaaattaaagctaatcgtactacactactaatgagaccaaaaaccctgtccagtcttgagcacatgccaacaacaaaaaacaatgccttgcatgtggagatgtagatacacctatcctgcaaacataacactaacaactttcagagaaactgagcttggatggatcacatatgtaggcacctctggttcctagtacacaaaagggtcacggatagaataatctgatcctctctgaaagctccaaatcagaccaccttctgagtcatcgctcctatagacctgcattgaagagatcttactggcccatctcacagatttgaggatcttcgctgtccagagcgtatcaatggagtatgaagtgaattgtggattggccaacaccacagccacattcttcaccatctgcgcattctggacgaagtacttcaggaaggatatcgcgttggcctcccctttgaattcacggaatgtaagcacattgacatgggacacgatgctttcgattgggccagcatcatcccagaaattggggcttaccaagctggtggcttcagaacattttgcacactgcagaaatggttaaatcagtaaatgtttcagagttcagctagcaactaattgatcatgcagtagcacaagaaggcaatgaggcaggttcaattcataccacaacatgcagggactcagcattgggaaagcatttgaggaagttgggcagcatctgggcatcatgcctgactccaaaattcacattcaaccccaggatcttgacgctcgtgaacaatgcgcttgggctcgacctgatcccagcctgaaatccattaagatggaaatggattgttcagatattcaaatatcagaatttgggacatcagcaattcagaatcagagtgaacaaacaaactgaacagtaagaggttagagatgatggcaatggcatacgcacactgacaaaggtgtcatggatctccagcatgtggaatcctgtctccaagtttcccaacaagcgcagcctgggggcatggacgatcttgaccctgacgcaggagtcatccttgctcaaagaatcatagagcacgagccgctcgaggcatggcgcgtccaccacggcgagattctccacgcaacacgagcagatctgcacgcaacgaaggctccggtgctccaggcggaggcgcaacacctgcgtgttgcctccttggatgttgagggtctccagcacgggggatctcgccacgatgaactcgacctcgcggccctccttctccatggcgacggcgtagatgccgagctcgcgaaggttggggaaggcggtgttggtggggaggccggcaatgtcggggaacttccacatgccgatgtagaggcgggtgagggtggagatgcggaggatggcggcagggagagccgcctcgaacggccatgggcggttgacgaggatgaggtcgtcgacgcccttggcggcgaggaaccggagccagtgctcgagctgggcctggtacgatcccatgaagccgcagaggaggtggacgcagcggaatggccccgggtgcgcggcgaggatgcgggacacggcggcgacgatgcccggcgtgtcggcgcgcgtcggggcagaggcggagacaccgaagcttcgacctcgcgggaagaggtgggcgtccacgaggacgagcggcgtggagcgccagagcgggcgccagcggcgggagagcgcggcggtgcgcgcggcgtccttgacggggaggcgggagacgatgttgcggaggatcgcgtcggggagggcgctgatgcggtcgacgccgtcggaggctgcggcggcgcaggcggcgtgggtgcgggcggcggcgatgggtacgggtgggccagggagcaacccgtagatgtgcgtcatcaagtacttggtgcactcctccagcttgcgcgggtcgtcgccgcggcggcgcgcttccgccaccgtggcggggtcaaggtagatgatcggcgcaccttccgccatggattccgacgacgccgccggctagggtttggtttggggttctggacggcggcgacgagtcactgttgtgtgagggagcgagtgtcccgagtttggaggggacgtgtcgtcgtgtgagtggtggtttcgggtccgtgggtttcgtgtcctatagcaggccaaacgggcggcccggcccagcacgacacggcacgccgacggcacggcccactagggcacggcccgttaggcacggctcctgtagcgggccgtgccgtgccggcccacgtgccaaggccacggcccaagcacggcccaagaaggtgctgggccgtgccgggccggcacggctactgtagtggcacgtgggctggtagccggcccactagtacatgtggcccataaaaattgaaatttgaggggaaaaaaagaaaaaaggcagaaaaaacataatataaaggaaaaaatgataaatataggataaatgtgaggaaaatttaggaaatatatcataaaatatatggtacaaataggataaaatgtggaaaaaaataaaaaatatgagaaatatatgggaaaaattagaaaatcgtagaaaaaataaatgggccggtgggccgtgccatgcctgggccgtgccgtgccggcacgctacagtaaacgtgccgtgccgtgccagcccacgggctgaggcatcggcccaaacacggcacgggataacgggccgtgccggcacggcccacaggctgacgtgccgtgccgggcctgggctggctacagtactgtcgtgctcgggccggcccggcttggcacggcccatttggccaggtatatcgtgtcctggttgggccaaatgtcggtaatgagttgcacctgggcccatgaatcagtaactccacgtttctatgttcccattttccagatatttaggcgttactttggattttgttctcactcaaatttaacttgacgaaatatataagaaaaaaaagggaaacatttatatcagaattagtttcagactatcagtaaggatttgtttgaaattaaagtccgtttagcttttgttagacggaacaaaccagcatactggttgcattgatatccatctaggtcacctcccacatgtggctgaacggactactagaaaaataattttttacaacgaggcctataaaatttataggtggaccatattttagctgcgattatccacctgcgcagttacgtagagagggatccgattttcccccactcacagacggatggtttaaagggatcgcctgcaataatattcttaattttcacaggtgaaccactaaaacccccgcctgcaaaaaccgattgccggacaacccactaaaaaaacaaatcctcacgtatgtccttatccccaagtctccaaaaatctaagtttaccacaaccactccctgtctatccttatcctctccctctccctctccttaccatcctctccctctccctctccttaccgcgtgcaagcccagctacaaagagcagcgatagttcggcaaggaggagggccgaaggcggcgacaaaaaggatggcaggcggcagccgccgcttgacgaggagcggcgatgaggaagaacgcccacgatggtggcggcttggcaaggagaaggagggctggcagcagattgactcctccactcccgccagtggcagtggctctgcacaagggtgacggcgacctacttccgcaccgagctaaccgtatcgaccaacggctatctctagagctccttcgttgttcttgttcctctaaatccagatctaaaaattctctttttttcctttgtggctttctactaaaagccgggtatttgacctctagtctaaaaaaaattctctctttttttctctgtttatctggaatatgggaatcttgttcttctcatctgagttgtgacattttatatgaaatatgtgaattttgttcatcttatttgtgtggtgacatttgatttgatttgtattgtgcttgatctgtgcaaatggcagctgaatggggatattttcaaatgtacttttacttttttttgccgaaaattattaacataggcggttagttttatctactcacctgcaaatatcacattttcactggcggacggcttaaaacagccgcctgcgaaaatgattttttgtaggcagacaagaggcccacaagcaaaaatcgttgattttcataggccttaggtgcaggctgaggttttggtcacatgaaaaaaaaaatatattagtagtgacgacagcatgaaatccaccatcgcatgccaacacgaagtccagcaacccgaaatcctcatgcacggctgcgccctagcaatgcgaaatccaccagcaactggctcctgcttcttcttcagctcagcaccggcagggctctactgcaacgacacacatatctccatctcaaccaattcactgtccgtcctcgttgtcttccatacaaggccatgcatctatccagcagcaacagcagctcaggttatctatcaagaaatcaagacaaggctttgatttccatgattttcaaaactccatcgctgcatgcactccatctacattttgtttttgtgatcaatactcttcataagaagagtgcgactctccatcctcaaaccgggtgaaatgcggcagccacccagcattttgcacacacgatttcccaatgcaccacaaatttctgtacacataatttcaatccacctttcaagcaaatcactcaaaaacacaccagctattctaaataatctggcctgcccaaattactgacagtgttaaattatgtcataaacaacaggtacttcgtacctcacagcatgtcagcatcagctgagcatgcaacttgaatatttgtaactctcttttctcttttgaaaggaacaagaggaacaatattgcagcagaaagagacaaaagacagggtaaggttaaaatcttctcctcaagtgcaatagaattaccagatggacaagatagataattctccaccggcaatctatggaagatgagttaacagcaggcttcactttatcgatttagcccatttgatcggaggtcaccgaatctcgaaatttcagaaatttcggtccgaaattttgaacaaaatttagttgaatttgaacaaatgttaccaaaattcatgaaaaatttgaaaaatttcggccgaagtaatatcgtatcggaggggaccgaaataaccaaaatttcggtccgaaatttccaaccctggttaacaacagaacaaaaaaaaatggggtttaagtcttaaattaagcaacatttggtgaaagatgcctcgtaaatcgcaatccagttgatggtatcatcataaggcataaccactagagatgaacctcaaagtagaagaatccaaatgattatacataatctgatgataattgactttacaaagctaataattaactctatgaaattggaagtactaaactgtggtaccagacagaacaaaacacttcgtttaacatccaaaagacatgtataagattccaaacaaaacatgaacttgctcagatattagtgattctaactagcatcaaaggaattattgagcaaagtagtgcactgtaacatcaacatgtaaaacagtgaaggtaaagtacgataccatactaccagatagatcaaagcgtccagttaacatataaatcacattggtatgattgcaaacgattgcatgaacttgctcacatatcactggttctgacaagcatcaacgaaaaatttagcaaaacagtgcaacataacatcatcatcgtccaacaacaaatgaaacgcatagcagacacagtagttcttagttgtcatccagaaaacataatttgacatttgcatgatagataacactattcaagcactaatttcaacacttctcaagacagtataatcaagtccgctgtccaatcttcaataaaagggaagccgaaactctaacatgaataccatgaagctgcaaacagagcactaaccacttccaaagatatttgtcttggatcacaaaatgacatggaaatgcatctttttctttcagtagtccgtgaaagggtcaaaacgagaaaaatcagatcctctcttgaagctccaaatgttacactcttcaggttctgtacttggggtgaccaggactaaacaaccagtcggccgttttgcagccctcagaacctccaccttggaacgcacctcatccatcgaagaaaaacttccagtgtcaaacaaaatgaccactatcttcagcacccgcgtagtctcgaagaaaaacttgagaaagttaacctcactccgagtgccatgaaaatcatggaaaacaatcatctggatgcttgaccgaatgcactcgatgggaccagactcctgccagaacttgaagttgagcttgccagtggtttcatcagtttttccagactgcaaattggttagatcagtcaccagagatttgttcatcagctagtgatgacagattaagatgcaaatgaatgtggatggaggtgtaatttcaccttgatgtggagcctctcaatgttgggaaagcatctgaggacattggggatcatcttggcatcgttgcggacaccgaaacgcacctccagagcaaggatcttgacgtttggtaccatattgcttgggctcacctttgtcgcggactgcaatcacagaacaaaatgcacccaattaaggctgaaaaatcacaaattgccatcgttatatttaagaagttgtggaattgaaacgagcaatgcaccttgatggcggttttgccaaccacaagaacgttcgctgcagggtccaagtacccaaacacgcgcagagccggcgcattcccaatcttgacgctgccggaggaggcgccgtcatgcctccatgtgccggagacgatgaggcgctcaaggcacggcgtgtccaccacggcgatctcctcgtaggaggagccgatgatctgcgcgcaccggaggctgcggctggcgaggcggatgcgcatcctgaacaggttccccttgatgcagagcgtctccaggacggggctcctggcgaggacgaaatccatgtcctgcgtgtccatgacgacgctgcagaggccgagctcgcggaggttggggaacgagacgccgcgcgggaggtcagccgtggcggggaacttccagagtccgaggtagaggcgggtgagcgtggccatgccgaagaaggtggcggggaggcccag

SEQ ID NO: 25622 - DNA, 11093 bp, Oryza sativa
gcggtgcgcgcggcgtccttgacggggaggcgggagacgaccctgcggaggagcgcgtcggggagggcgctgatgcggtcgacggcgtcgtgcggggcgagcgcgtagaggcgcgcggcggcggagacgggcgggtcgggaagggcgtagtggatgtaggagagcacgcgcgccaccgtcccctgcacgtcgtccgggtcgtccccgcgccgccggaactcggccgccatcgcgcggcccatggggacgggcggcacgcgggtgtccatggtcgccgctcgccgccgccggggccggaagggaactagggaaggggacgagccgacgagggtttggggcgtcgtgtggtgtggactgtggagtggagtggaggcgagctctggtgtgtgtaggcggagtgggaggtgctggtttgtcttgtagtggggtagtttggtcgggatgcgaggaaacctagggtttcggtggtttggttgggccaaatttcggatgcagattgctcatggcccaaactctctccgtcacaaaataaatatataagatactttttacacgttactatatttatatcataataagtttatttttgatttatatgtgttaaatatttaaccgttcatcttactaaaaaaatataaaaatatatttagtcacatataaaatattattcatgttttatcatttaatatcagcagcataaaaaatttaaataagacaaagagtcaaacgttatatctaaaaactgaaaaatgaactttttacgagacgaacatagtaagaaatatctcatcctatcttaaattgttgataaaatttccttaagaaaatacctcgagtaacttaaaagtgtggtacctcccaatattttcttaaggatagtaaaattgccctagattgtttattttgggatggaggaggaaatcggtcactttgttcttcctaatgcaaggtacactcgactcacaattcttgctagaattttgcgatggatagattttgctagaatttatagacaccgatataattcttgcgaaattcccgtaatattcatgtgttccaatgaagtccttcgaaaaatgtctattttgcctatacttaaatttggggagttcaatgtagtatagaaattgtttcgaaaattatgaagtgctacgggtatatcactatgattcgtgtgataattactccctccagtcacgagaatatgttgattagggtttgttacaagtaagactttggccgtgtttagttttccctctattcccaactttccatcacatcgtatcacatcaaaactttcctacgcatataaacttccaactatttttctaaactcccaactttcttcaaacttccaacttttttcaggaattaaacacaccctttaaaaacaaagaaaacaaatactccttccatcccaaaatataagcatttttagatcttgtcattgttttcgagatgctattttgaccaacaatttgtataaaaataaaatattttaaataacaagagtcgcatattataatagtttattaatgataaatctagtaacatcaattttatatgatttattttttttattttattgctattaatagtcaaagttaaaaattgttgatttagcactatactgaaaatgcttatattttggaacggaggaagtatataggatccaataacgctaaaccacgtgcacgtgtgccataatatacacgctatgagtacaaaagatttcgcaggtatatcctgcacaccgtggccatcttgatctgaaaatatttccggggttttcaaaaaaaaaaattctagagttgcagcgacaacattagtcaacgcagcaggctttctaggccgagtttatttccaaactttttcttcaaacttttaactttttcatcacatcaaaactttcctacacatacaaactttcaacttttttgtcacatcgttccaatttcaaccaaactttcaattttggcgtgaaaacacacccctagtttctttatttcatcttctaaggacgaatggcagatataattctcctgtatgatctgcaaagaaatgtattgaaagaagatcataactgttggcattcaaagttaatcatcaaacttttgtataaattcgattcacattccacaataaagtttattcacattccagtattccccagtagaagaccaatagatagaccacgggagttctgataaaaacagacttttcactttggactttgagacgtccactaccaatcagaactgcaactctccaagcaacagaatgcgctactagatggaacagaaacttcataaaatgtggtaaaggaaattggtaatgcagcatataaacatgaattagctttgatatctctgatttttaccaacacgaaggcacaattttaattagcagaaactgtgtgacgtcacatgctcacaggtcaatacagcattcatcttagtcaaaagagagtcctgttaaagatactaccagactgaagaactctaccgaacctcaaaacgcaaccagaaaaaagaaatgcagaagttatggaagaaaaataatccctctcacgcagaaactgcaacagaacactagcaactaccagagatgtcaaacttcgaagatcggatgatgattgtcaaagggtccacaaatctctgatgaaattgaccttacagaaatccataccaatcaggactgcaactctacaagcagtaaaatgttctaccagatggaacaaaaacttcatgaaatgtggaaaaagaaattggcaagccagcgtacaaacatgaagtaattttgatatctctaattcttaccagcacaacagcaggatggcacaaatctaattagatagaactgtgtgatgtcacatgatcaatgccaggtcaatacaacattcatctgagataacatttgtcttctgctggaaagacaatactgttggagttgctacaggattgagagcactgataaatctcaaaattggaacaaaaaacagcagaagtcaaggaagcaaaacaatccctctcatttagaaactgccacagaacactaacaacttccagagatgtcaagccgagaagatcggatgatgatcgcaaaagggtccataagtgaaaaatcacatcctctctcaaagttccaattgctttctcctgcactagcatcactctcaaggaccactagtgaacaacatttactagcccattttgtggcgaacagaggcttcagtctgaaatttgcctcatctgtcgatgcaaatgttcctttgggagacacaattatcagcttcttcagcatccgcgcactctcaaggacaaatttgaggaagttaatctcaccccgcgttgctcggaaacgacgaaaaatcatcacggtaatgtgagactggatgcattcgatggcgcctgcatcctgccagaacttgaggttcagcttgccagtgagctcatcagttttccgggactacaaatgagtcaaacaatcgcacacttgaaagttagagatggataattcagccaaccaagtagaacatttttagataatactcgtaactaagtagtatatgaacgctaaatcaagcaagctgtgtctcacttcgacgtgcagagtctcaacattaggaaagcatctgaggaaactgggcagcatcttggcttcattgcggactccgaaacacacaattatgccaaggatcttcacacttggaaccatggtgcttggactagcccttgttccagcctgcaattttgccaatatgcaatgttgtaacaaaatcaaagaagaaacttcacacattggcatcgatcagcaatccacacattttgaccatctgcactgaacagattaacggtcataccttgataatagtgtcgccgatctccagcacatgggtttccagatcaaggtatccaattgcacgcagcgagggagcacggccaatctttaccagcatggaggagccacaggagtagagcatgatgaggcgctcgaggcggggcgcgttgaccacgttgacatcctggtcgaaccccatcatcatcaggcaccggaggctgcggctggcgacgcggacgcgctgaagcgtgttggcctggaggcagagcgtctccagaacggggctcctggcgaggacgaagtccatgtcgtggttggtgatgccgatgagggagaagccgaggtcgcggaggttggggaagcaggcggcgcgcgggagcgcggccgtgtcggggaacttccagaggccgaggtagaggcgggtgagggtggccatgccgaagaaggtggcggggagggtgaggtcggccgggaacgggcggttgacgaggatgagctcctggatacccttgacggcgagcacctggagccagctcgcgagcagaccctggtactggtccatgaacctggaggtgaggtggaggcggcggaacgggccggggtgcccggcgatgacgcgggacacggcgaaggtgactgcgcgggcctcctcgcgcgcggcgtcggtgtcggcgtcggacacgccggcggggaggaggtcggcgtcgacgaggaccagcggggtggagcgccaggcgtcgccccagcgggaggagagcgcggtggtgcgcgcggcgtccttgacggggaggcgggagatgatccggcggaggagcgcgtcggggaggaggctgaggcggtcgacaccgtcgtcgtcgtcgtcgggcgggagcgcggagaggcgggcgtgggaggagaccggcgcgtcggggatggcaaagtggatgtaggagaggacggtgccgatggagctctcgacgtcctcggggacctggccgcgctgccggaactcggccatggtggcctcgtccatggggatgggtagcaccctcgtgtccatgtccgccgcccaccgagccgacgccggaagggaagagggttgggctgtggggatttggggttttgggtgatgtgttttgtctggtagtggagctgaattctggattggtgtctggtcgtctcatgatcaggggagctttgcgcctttgcaaaacatggaactttcaaacattttaccggcactttcgctagtacactctcagtcgtaaatataatacagagtaatgtcgttaacttttttttttttagaattacacagtacaacgcagacactcacaacgcacgcgcactcaccgctatgaacacacgcacgcaaaccctagagagattgacgaagtcaccacaggcgcctgcaaaccctggagagattgacgaagtcaccacaggcgcctcgctgtcgacgggtacgtcacctaccactgaaagcacaacgctgttaaatcctggaaaagtcgctcccatggggagtcgaacccaggaccttaggtgctactaaggctcttgtaaccactaggctacaggccctttcgcaatgtcgctaacttttgaacatatatttaaccactcagcttattgaaaaattttatgtaaacgtataagatttaaattatgcttaaatcaggggtgaagctagcataaataatcaccagggtcaacactaaccaggtctatttatcaaccaaaaccaatggaaaacgacactatttcgatgtttcgatgtgggacgaaagtagattagagtgaaatttcggatagttttcgagaattcaaatttgaaacggcaaaagtcaaacgaaattaatcaaattttggcaaagaaaagtcatatggtcgggttcggaatccgatattaaatcgaagaggtgaactctgatacaaacatagtttgtttgaacgtagctaaccattccctcccaacacgtaaaatggagcgaggattagcacatgattaattaagtattagcttaaaaccttaaaaatagattaatatgattttctaaaagtaacttttccatagaaattattttgctagggaatttgagaagttgtgggccactaggcttatgcatgatctcaaatttgaaagattcaaatgaatatgcatattcggctgatgtataatcataagtgctagctaattttctattttttaccgctagcatcgttcctagttgtcaattgggttttaacacgacaattaacaattaatgtcactggggtctaatctttcttatcaccggtgtcatagccagtaaaataaagagaaaatcctttgtatacctctaaaaattttagctaatcatttatatgcccccgaattttgcttacttccttgtatactttcaaattttgattttgatcccttccacacccctcccgtcagttgaccgtgagttgaccatctaaattctataaaaataaccattttatcctttgaatgaatatagaaatttatgaatatattactgaaaatgtaaaagtctgttacgagtttgctgtctgatacattatttatgaaaaatagataattaactaaaaatatgtatttattttgtttttaaaaattcataaaaaattaggagcaatcatataaagataggactactaatgctcatgatatttttttatgaatgctcttgataaaaaaaagttcattgtccaattaaaattttaaacaataattttactttattacattttttgattttcaaaatttatgtcaaaattttttgcactaattatttattctcattagtttcataaaatacacatactgtgcactcaaacaaaattttcaatcgtttttcaagtttatattcaaacctaaatcatcaagggcataaaagacattttcaaccaattgtaacagtgaaaggaaggaaaatgtaacgataggggcatggaagggatcaagttaaaatttctaaggtatagaatgaattgggaaaatttcaggggtataaaggggatcgggtgagttttcaagggtacacagagaatttactctaaaataaagagggcatataaagttcatagaaaattgtcggtgtcccgataaataattgtagtgttgccctggcttaaactactttgtggggtaaaataactcaacaaaaaaaattataattacatattttttttagtaagtcgaatggtcaaatatataataaaaattcaacggcatcatctattaaaaattggagatagtataaatttgcatgaacacttattgagatttatatgtaaagtggttatattttgagacaaaggtagtacttattttaaaataatagaagtttaagatttatagagcatgtttgacacggctctagtctagctccacctcttttggagttagagcccaaccaaatagtttcaacttcacctgaaataagagttgagctggcgatagcgctctcaaaaagtaaattacagacgcggagatgcatttatgcagctccacaactcaactctagacctaacaaatgaagttaagtttaagagtttgagttctacgatattaagaaaacatgtgaaattgagatggtggattgtgatttgttgattagaaaacataggtgaaaatgaaatgaaaaagatgagattggttgagaagataatgtaggtggaatttttttatatttttagacaaattttaaatactaaaaatattatattttagaataaaaggcactatatttatttaacggtctaatttctagcaattatttggctcattagatggttatgttatccgtgcaattatgtgtacttgtattttgtgggcatgggtctgcgcaacggtgaatttggtgctcatatgtagaaatttgacagcctgaaatttttttacgtcgttttgataagatgccactgtatgataaaatgctattccctttgtctcattttggttatttctcatattttgtaacggatagagttgtatactcaatattttttcccgtgactaatgccgagtgggtgtttctattttgtctggtagtggagctaatttctggattggaggctggagcctgatgtgagttgttcttttttttctctctctcttttaagtaagggtttggctgcttcaaaaaaaaaaaaaagtaagggtttggcaccattgtgttaatagagcagaaagtatggatgaggttcttaggctattttttttagataatagaatagaacatcgcggccttggctcaacgagctacaaccaattattataatctaacaatcaaaatgagtgtagtttagagaaacttataaagacaagaccagccatatacaagaaacaaactaaaggttgccaacacaagataaagagtacacgattattgaattatgtttgtgaacctctatctgaaattgacaaaaagttgcataaccgttgtcaagattacgacatgcaacctttaaaagctcgccatcttcatcacatttttgtagttgtgcctaggaccagagccaatatgttgctctgaaaattacctgcatttataaaatagatggtgaattgtcaaaaaccatgtcgttcctgctcaaccatagagcccaacatatagcagatgctcctataagaataagttttctacttttttttgttaacctccataagccaattttcaaatatatgatgatgcagcaacgggggttcccgatctttcgatgagaggaggataaacttcgatttgggggaggacacgacgttggcggtccgactacaactaccacagggcaaccggtacaccgactccacgttgttgctgttcttgccgtgccaagaacaaccttgaacctgcaagcaatcgaagaacaagcaagaacaagttgacaaggaaacagctcacggcacttgtcaaatgatgaaactgaaataaaccaaaatggggttctgaatactagtatccgggtggtctagccgacacatgcgagtacaaggaagtagctgcagctaaacttacatcaaaacaaaacccaaaatgcaaaatggtggctgctaggagtttatataggtggaggaatgaccaggagaggaggtgggagcaaaccctaggttttgtggacccctaatgggctgtaaagatacaaggcccaagcctaagtttctgatgtaaagaactattttcgtcattctgagcagcctgggtcaaatttgatggtgaggccacacatagctgaaagtagacgaggagatctttccaacaagtactcatttgccccgtttgccctccggagtgaagagcattgacttcatcaaatcagtgctgctagtgctgcttgcgatctgattcctctcccatattcctaacaacaagtagatcacaacatccatttagtagcacccaattctgagaagaacttgtatgattagctaggaatgactttacctgataattaagttcacgagctcgagctctagtcattggtccttgctgtgcaataggcatggttgtatcgttggaagggatgtcctcgtcatcctccccttcttgcatttgagtcgtcctcgactctaactcatcttcttctcccaaatatggctttaaatctgcaatgttaaacgtggggctaaccccaaaatcggcaggtagctcaagcttgtatgcattatcattaatcttttgtagcactttgaaaggaccatcagctctaggtagcaacttagattttctcaaattagggaacctatcctttctcaaatgcaaccaaaccaaatcaccaggttcaaaagcaacatgtttctttcctttgctcccagcaagtttatacttaatattcatgctctctatgttctacttagtggtctcatgcagttttaacattaattcagcgcgatgttttgcatcaaagttcactctctctgaagttgggaggggcaaaagatcaattggagcacggggtagaaggccataaacaaactcaaaagggcacttcttagtagtagaatgttgtgaacgattataagcaaactcaacatgaggcaaacattcttcccacattttaatattcttttttaaaacagccctaagcattgtagataatgttctattcaccacctcagtttgtccatcagtttgggggtgacatgtagtagaaaataaaagtttagtccccaacttagcccacaaggttctccaaaaatgactaaggaattttgtatcgcgatcagaaactatggtgtttggcactccatgcaagcgaacaatctcacgaaagaacgaatcagcaacatgtgtagcatcatcactcttttgacaaggtatgaaacgcgcaatcttagaaaatctatctagaacaacaaagataatgtccctccccttctttgttctaggcagccctaaaataaagtccatagaaatatcctcccaaggcacactaggaacaggcaaaggcatatacaaaccatgagggttaaggcgtgacttagctttttggcatgttgtgcagcgagcaacgaacctctccacgtctctcctcatcttgggccaaaagaaatgatcagcaaggatatcctccgtcttcttcacaccaaagtgtcccatcagccctccaccatgcgcttcctgcaataatagcatacgcacggagctagctggaatgcataacttagtagctctaaacacaaacccattggtgagaacgaatttgttccaggtccttccctccttgcaattcaacaacacatctttaaaattatcatcgtgcgcatattgctcttttattgtttctaagccaaaaattttgaagtcaagttgggatagcattgtgtaacgtctagacaaagcatcagcaatgacattttcttttcccttcttatgtttgatgacatatggaaaagattcaataaattccacccatttagcatgcctacggttaagttttccttgacttcgaatgtgtttcaaagattcatgatcagagtgtataacaaattctttgggccataaataatgcttgcatgaatccaaagttcacactagagcaaacaattccttatcataagtagaataattcaaactaggcccactcaatttctcgctgaaatatgctacagggttgccttcttgtaacaacacaccacccaatccaatcccactagcatcactttcaagctaaaagttttgttgaaatcaggaagttgcattaaaggagcgtgtgttaacttatctttcaaagtgtcgaatgcattcctttgtgttgcaacccaa

SEQ ID NO: 25623 - DNA, 2085 bp, Oryza sativa
ctgccaatgaaagcacgtaaaacttcattcattaatctcatgaaagtactgggtgcattagtgagaccaaagggcatgactaaccactcatataggccgaatttagttttaaaagttgttttccattcatctcctaacttcatgcgaatctggtggtaaccactacgcaaatcaattttagagaacacaagtgaaccactcaattcatcaagcatatcatctagcctagggataggatgacgatatctgattgtgatgttgttaattgctctacaatccacacacatgcgccatgagccatctttcttaggaactaaaagcacggggacagcacaaggactaagagactcacgcacataccccttgtcgagtaactcttgcacttgacgctgaatctcctttgtttcccccgagttggtcctgtatggcgcacggtttggcagagaggccccaggaatgaggtcaatttggtgctcaatccctcgaattggtggcagccccggtggaacctcctttgggaaaatatcagcatactcctgcaaaaggttagtgaccggaggaggcaaagaaataggagtatcctcaattggaaataaggtttctttgcaaaccaaagcatagcaaacaacagtgtcagtgtcaacttcatccaaatctgaaacaagatcccttcagcttaatctcatttttattattttgaatagagttggtgagtttcttcttatgcttctcaagttcattagccgcaataagatgctcactcctagtatgctcctgatttttttgtttgctagctctagcatgttcatcctttaaaataacttcaggagacataggatgtaacacaagttttttttccattatgcacaaaggagtattgattggatttgccaaagtgtaaagaatctttatcaaactgccatggcctacctaataacatagaacatgcttgcataggcacaacatcacagttgattgaatcatgataagaaccaatggcaaaatgtactcttaccaatcgtgttacctttaccttgccgctgctattaagccattgaatatagtagggctgcggatgtggctatgtgctcaatgcaagtttctccaccatttcagcactagccaaattattgcagcttcctccatctatgatcacgcggcaagagcgttccttgatcacacacttggtttgaaacaaggtgtggcgctgattctgttcagccctttccatttgtgcgcttagcactcgctgcaccacgaggctctcatagtgctctgcagcttcagccccaatgttttcctcatcttggtggggcgcgtcaccttcccctgcgttgttagttgcaagcaaagcataggtttcttcatctaaatcactagcggaggagtacccaccatcagctctcacgatcattacacgagtgcttgggcagtccttgcgcatgtgaccatagcccttgcagcgtaggcactgaatatctcttgtccttcctgatgatgctactgatgatgagctcttggaaggtgtagcagcaacccctcttgttggttcactcgggcatggtgtagagtttgttgtagaggaacgcagcttgttgcttgaggacgatggtgctgctgctcgagttgacggtgcagcagcgttggaaggtgtccaagagctagcacgacctgcagaaatgttagtcctgaagctagctcttcgtccctgtacttcccttttcagctttacaagcaagatgaaacaaacgattaattgaattatattctttgtaggctagaatgtcctgaatttctcggtttagcccacccatggatctagccataccagcatcatcattttctaccaaaccacaacaaagcattcctgtttgcaaagcttgataatactcctctacatatttgtttccctgtctaagttgttgcaatttgtgcagcaaatcacgtgcatgatatgaaggaacaaatctagctcgcatgactcttttcattgcatcccaggtttggggagtgttatttggattggaacaaacaaattcactccaccaaatggatgcaaaatcagtgaactcactagtagcagcc

SEQ ID NO: 25624 - DNA, 21059 bp, Oryza sativa
ccatgccatggcgctgccggcgctgttgtcattgtggatgaccaagtacctcctcatcatgctcggtgtcagtagcgtactccaggtcttcccttgctgcgatgctgctattagcatcatggcattgggttgtgcctagccgatcatcatgaccatcttggcccattctctccaacgtattcaagatacctgcaagagaagtgttcacagccacaagggacctctccaatgaggaaagcttggagttggtgtcaatttgagcagcctccaattgaccaaggcgatcattggcgaccctaacatcctcatcaaggccttcagcatgctccctcacttggcgctcaaaatgttgtatgatgcccctcgtacgtggtgaatgttgagggtgctcccccgatcctcctgtcatggttaatgggaagaaacaattcacaagaaattcctatcaactattggagctagttgttgtccatctccacttctaccaaacttgtgcaaacgagttcttacatgttcttactttgttatgtaaaaggcgttggcaaacagcaagaacagcaacaatggttagtagtaccggagccgacaacaagcacgatcctgtgatatagcagataaaaatttgtggagctataggtggctgcaagtaatatcaaggtacagctagaaccacattaatcaaagcaagttgaataatcgttcaacgatggtattgtgctggtcctaggcaaaaccctttagagacgcgagcctagtcacaagcatagccactcaaaatagcacgaaaataacacaaacaaaacagcaacaacaacaacttcctctcttcccttccttttttttttccttctcttcacttctgattgattttttttctttcttttttctttcttttttttttgtacagcaagctcaaagcttcagccaacaagtcaaaacaagccttagcaaaataaccttatctcaaacattttcgaaatttcacaagcttcagccaacaaatcaaaagaagtaatgatgggttggttggctagttacatgattcagccaacaagtcaaaagtgagagcacttaaatgctttcttgggaagggctaattcacttcaaaaagttgcaaaagggttggctgttggtggaggcagcaataaatgcatttgggggtggctgatgtggtgatgagggggctgctggttgtggtggacgaaatttggcggggttggaggtggattttgtggtgaatatggtggtgatggtggcagcgggatgaagataaatgaagtgatggtggaagtgtttgtggtgacgaaatcgtgagcagaactcgaaactctaaaggactaaactactagaaccagcaactcaaccagtcgatgcaatcgaaaactcagcaagcaaagactaagtagaacagcaaaggctcaacatgttttggtgatttcgggtctgacctatttttgtggtttttcttttgggctataggtaaaaacaaagaagtgataaaatctctcaccgagcaacttgagctctgatactacttgatgcagcaacgggggttcccgatctttcgatgagaggaggttaaacttcgatttgggggaggacacgacgttggcggtccgactacaactaccacaggggtgctgcgccttagcaaccggtacaccaactccacgttgttgctgttcttgccgtgccaagaacaaccttgaacctgcaagcaatcgaagaacaagttgacaaggaaacagctcacggcacttgtcaaatgatgaaactgaaataaaccaaaatggggttctgaatacaagtatccgggtggtctagcaacttggcaacttggcttatagaatggttagagagatacttccttttcaataagtcctaccagaccccttgctcatttattaactcaaacaaccatttactcaagagtcatttattttggatctccaaattatgaacacccaatccccccggatctttgagttggcaaataatatcccatcttgtaagtctatacgttttcttatgaccatctccttgccaaaagaaccgtgatctttaataatcatttttttaaaaatcccatttttgaatctaaaaaaagatatcataaacataggtaaacttgaaagtaatcaaaaccagtcttcccccaacggacatatggttgcctttccaactactaagtttcttctcaattctttgttcaataatattccaacatttatttccaagctttctaaaatgcattgtaataccaaaatatttgtcaggaaatgtacctagctgatagccaaagatattagaatattgatcataatattcctttgcttgaccaaaacaaaataattcacttctatgaaaatttattttcaagccagataatttttcaaacacagataaattcaattttagattcttgacttcatgtaaatcatgctccaagaaaatgatagtatcatctgcatattgcaaaatagataaagcatcatccactagatgaggtattaccccacttatataaccaacatctttagccctcttaattagtaaagctagcataccagccactatattaaaaagaattggagacaaaggatccccttgcctaagccctttatatgtttgaaaattattgccgacttggtcgtttacttttataccaacttgaccaccttgaatgaaagaagttatccattacaaccatttaggtgaaaagtagttggagaaaagggaagtccttaggatatagtctggataaaaggaaagtccttaggctatagtttggataaaaaacagctatctaaccaatccggttaaacaaaccgattgggactacactaccatagaaaattagcaatagacttgtcacacgtgtggtgcctcccacgataagaagaacaacatccgagcgctacactaacatcaaaaactccttttggctccactctaccattggtgcaaccacttgataataggttctcatggtggcacagtaggcgatctcagtaaagcctccacaggcagtttgatgattttcatgaaaaacagtaaaattcgataaaacgtgatgactggtggggccccaaatccaccagcgggaaggtcggattcgaacagatccgggccacagcatggagccactgcggaagaaaggccacggcgctaccctggagaagtgagatggcattagcagtgctagggagcgtagggagcaaggacggctacggagcttggagcgccagatatgccacccggcgttgctcttccactaagtcgaccacgacgacctcaagtgcgacgatgacgacagcaacaaccatgtcgaccttgatttgtgatttgtgatgccgtgagatttgtgatgtctgttttggatcctttaatttgcgatgatgtagatttgttctatttcttctataaattcatgatgctacggatttggaactttgaactttgaatttgtgaatggaaattttggattagattgaatgggaaggcttgaatggaaatggaaaatggaagcttccaacccggcagaaacgacgtcgactgcttctgttttagcgctgaaaatcattttcacagtcggaccatgtaacctagtcgcctatgaaaatcaattttcgcaggcggttttcgtctgcttgtgaagatcgtctattttcactagcctatggttgctggcggtcaggtggctcactagcgaaaacgtgttctggctatcaggaaaaatgtgatttgtagtcgtgactgaatagcttttccttcttttttgtttatcaaaacaacttttcagtttgacaagaatcatgcagatagatgaaaataagttcttgaatatatccacttattatacatacctattgtgggacaacagaaatgaacttgtcgtgtttggtgcctgcgtcgataagaagaacaatatcctgctagtgccacacctaacgtctcatactctgtctttgccatcaactgacaacatcatcagcggctcatgtgatggcaccaatatactactatgaaacaggctccacaaacttcagcatcaaaacatccagctatccatatcattcctggtaccatccgttcccaactagtacacggcacacaatggtacacatgaagtagtgtggcttcgtcgcccactcgctttctagctatctgaaaattgaagtctagcctccttggtgaaatactgcagggagggagaattcttgtgttgcataggaaatgtaagtagcagatgattgaatcatatgcatgtgtgcccttcattctgccctagctggctttatgtgtctttgcagtttgacacattgagataaccctttgtctttaatccgacgactgactgagcacatgggagatagtgaaatattaacacttgcttatgatctgactgacttaacacgtgagaacatcactgaccagctccaccaggtaaagccttacaattaaacaacccaagttaatgcactttgcaaatacaaaccaagaaaggcagggttttacctttccgaaagggtacgaaatccaaggacctggttgtaacaccccaaccatttgtagcttctagtgtggtgtggtttaggcctaaataacctagaattagtgtagtagtggtggttcagtattaccttggaagtttaggtgaggacatgtttattagcttttgtgctccaatcatagtaccctcgagtcgaaactaggatgaaagtgtaacagggtactgatgcagatttaagaggcagggtgttacaccggtggtttgttgatttttgtgggaattgataaattaaaaaaagggcagattttaaaaacccaattgaattcgaatgctcttgctgaatactgaaaaccaattgatctcattgattttctgaatgaaaagacagaactccttcgggagaggtctgtaaattgaatgagatctcaatcggtttaaaccgacatatttgtgcaaacaaccagtaataactttttatttgctgaaaattggaggtagtatcattttttatgttgtgacttattttatcattaaatgtatttttccatcatttatattttgtatatttatactaaatttttaaatatattcaaacattatattttgaagttaacaacatcatatatttatatgtacaatagatggtggtagttctctatggaagacagttttgatgttacgatttgtggaggacatatgtaccaaatgcccacatatcctgcatatccgactacagatataggaggtgggctagacccatacaatatataatagaatagaacacggtcgccatgttctcttgtaacccaatgcaggtagtagagcctcagccatagactaccatgtaacagactaggaatccaatgatttgtctggctaggatttactccttgtaactctgttacctaacctgtataaaacgggtaggaagcctttcaatggcaacaatcacaacacgatcaacagataagtgcgccaagtaggggttgcatcgagtgtgtcatcgaccagcacgatggaaccaacttctggagtcgccggaatcaacttcccacgggctaggttttatgcttcaggagcttcaactttctcgctgacggcttcaacaagctttccctctccaactcggatccaaactagttggggaggcccaagaccacacaaatcctatttcgtctcccgaatgtggcccaagacctactttagagtggctattcttgactcggattcaaaccagttgggcggaacccgcctgttgacaaaaaacacgaggcctgggagatctgcttaactccagtgcaggtccaaaactcgccttcaaatgtatgagcgtgccagttgatttactcctgtaataaaaaagaaacaaagacaaagaaaccgtggttaaatctataaatgatagccgatcggctagatgccgatgatatatcatttatcttaagccgatgtcatatgtacatcgaccggcaagtattaataagcaaatcagaactaaatctactcgatcggctgtagatattaataatatataatccttatatcgatatatacttaaatcaagtgattgggatagatcggtcaccttgccgagatagtataaatcacttagatcgaaatatatattaataatgagattttatatatattcatagcatagccgatcagatagatctagcatgtatcggctaatactccgataccactctatattaagatattaaagcaagtagaatgttccaaacaggagcttaatatacttaaatgcaacaagatcttaatataaacggcagatttaacatatcaatcaggcatataggatgaaagtaattaaatcaggtaagatcggctgaaactccgatactaatctaatcggcaaccagaaggcaggctagatattatggttctaagcacgacttaatagatcaaactcaactgatgcagcattaagtattaaaagaagaacaatatctagacaatcaagccgctggatgtttcatagagtggtagatatatcacataatctaagtcaatgtcgttatttaacctaatcgactgccttctattgacagaggctagccgattataggttagatgacgatatcattaaagattatgtgagatatatgataaatcgacgaattacataaacaagattagagtgtcataaagatggaagcactaatctcgagaacacaagtcgtcataacaagttttacctcttgttgaagatcgaaaccgatgcagctcaacccgaaagcaagaactcgtcgaaacaaagcgaaagtaaaagggtggcgatgcgccgagattgtattgaacgtgtgtcttctttacatagggctcggggtctatttatacccgagaattacaagatatgctcataccggacacgactattatctctaacaaactctaagataccataagtctttgcggcagacttttgcccacatttatctctaaggaatttacatgaaatatcctaattaatagatacaattgctttctcaggactctatccatgtatggcaatcatcttgaagcacatcaactcagacccggtgtcgtaaacgagtcatattgtcgtaatcggttgtatcacttaacctagtctgactctaacttagccgatcccatccatggccgatccggactcagccgatccatgctctattcttgaattgatcttcgcctctgactccgcttcgatccaacctccctttccgatgctgatattaccaaatttggtcgttaacaccgccccgtgctcttcttcaatcggtttctccaagaacgtgctgacggtttatcctagaatcatcatgcaacttcctccactcctcattgcaagttttgggtctacttcaaccctatccccatgggttcaacttggatatgacatgactctatcctagtacgtgcttagggaggtagcagaccatattcacccggtcgatgatgcaaatagtaatatcgacaacatcgatgaagaatgttatatgagtaagaatgccttcgtaaggaggcggtaaatgcaaagcaatggagagctgagcgtatccgggacttgcgcatgccttcaagctatatgcaaaagaatattctccagatagagcacgaggagcatgacgtcttactcgtcttagtcaaacctcagcagaatgtcatcatggcggctgttaccttcctcgatacagtcatggagaccacaccagatcactagatttctcaaactttggcaaaagtaaaggcaatgatgagtgatgcagtggtgcaacagcaacaacatatttctccaccttcttccatcgcagttccctcccccatccttccactgacattgaatgcccttcccgttgaagctcccaaatcattgtttatccttctagctgaagtcttccaagagatgcagacgaagcttaagggaccacctctgagatcagccgcattcatgtagaactggtctcgacgacgaacaaaatggagaagcttggggaggatatggagagagcgaagtctgataatgcccaccaacgccttttggtgcaagacaatgaggtcatccacaagaagagtgaggcagcactatcattccccctcctcttctcgatccggatcaaagccctggtgggcagcacagctagatccgtcgctcgaggttagggtcgatcgctagatctggaggttagaggccaccggatctggccacccccacctcgaggacctcagtggtttgatagttcaggcaagtagcagtgacgccggacatccttttctacatggctacacgtcatcttgacattcttggggttttttttcacacgtattttgcatcggtgatgggccgtgttgtataaagtgacgagtcaccattagaacccttcaatgataaatgtcattagtgataaaggggacccaacacagataaggttttcacaacattgataactatcatccatgaccaggcgcccatccatcacgcataagggtcataacccgtttcaaatggctggttgtagtgacatgtattgaatcatagggtagaggcagtcgtttgccaaattttcaaagaaaatccaatttatttaaataatgtggagtgtggatattttaaactatcgtatgaaaattacattttttttctcaaatttgtctaagtttttatttatatggtctcatgacctgtaagtatgtttaacttagaagtggagacggttcgatgggcctcacacgtagtaaaccacgcatagaagtggctttctatctatgtttccatctataacgtaaaacgtagacagggctgattcttacacaattatatattcatgagtaaatcatttttgtaaaattaatctgaatttaaatatttagctacgattgtacctgacctggtgaacagtgcacatccaacacgtacggatggtagacattttattgctgtatgtgacttgtcacgtgacacttttccgttctttggccacgtacttggtactagtatcaaattttcaagcgttccagcgaactaaagcacacaaccgcgtacacgtacggtcaatacctgtgagaaactcgtgagccggccgggactagggccctgttcgggagtgagggatgggaaccctaaccccctagcacggaaaatggaggaacgattagcgcgtgattaattaagtatttgctaatatttatttttaaaaatggattagtatgatttttttagcaactttcttatagaattttttttttaaaaaaaacgcaccgtttaacagtttgaaaagcgtgcgcgcggaaaacgagggagacatgccatctacatcattatcctttcttaaattatattctttttaatatatggtaccgtcaattagtaggcatacgtttcgaccattcatttcatttaatgtaaatataaaaactacaaaccatgcttaaatatcttttacgagaaaaataagtaaaaacaataataattacacattttttaaaaattgtaggagtgatgaaatgcatatgaaaagttaatggccccatatattaaaaacggagggagtattatacttttcggttttatccgtcttcatataagttcattgcgcacaaatatttcttcaagaaaatattcattatacgttcctccaacaaacggtcacttttatctcactgcatagttttttccttcttttttaatttaggccgagtttagttctaaagttttttttttcaaacttccaacttttttatcacatcaaaactttcctacgtatataaactttcaacttttccatcacatcgttacaatttcagtcaaacttctaattttgatatgaactagacacacccttgacaccttctaactgccatgtggtcacggtttaattagctagtgtggtgcatgggctaccgtcgcgtcacctgtttttgccgtattggcagtggcagtgcacgtactcaaatcattcaagacggtacatgtattaatcggcaagggactgccagtcaacaaccaaacattaagatataatctttaacagttcgttgtcgatcgtgaaacgataaatcagtatcgattgattattcaactgttaaagattagaccaatatatagtctcaacccaatagaagtgatccttaacaatatttactctcgtaatataaatctcaactaccaagtaattcacacattaaaaaaaatgcaaatttggaatcgacatattaccaaagtttctcatacaatagcaaatttggagttcaacgatttgccatcaacattgtctctttctataatataccgacgattttatcaattaagtgatccttaacaatatttactctcgtaatataaatctcaactaccaagtaattcacacattaaaaaaaatgcaaatttggaatcaacatattaccaaagtttctcatacaatagcaaatttggagttcaacgatttgccatcaacattgtctctttctataatataccgacgattttatcaattattctacaatatgttattgggctggaccttcttttcaaaaatacttaaaatactcctagagacatataagattaacaattgatttaattatctcaccagaagtttcaaaaaaaatatgaaaatttttatgtggcctccttatacaatatggaagtttgtatacaagtttcaagttttttctgtatacttagcttttagaaaaaatatatattgatgtgatatatgtgagagaatttgcttatacaagagcacaaaaatatcttatgtagtgtatgaaagatgatttatattaaaaatagtaataaaaagtattttatatatcatataacaaataagttatattttttataacaaataaaaatgtaataaacttgaaacttctatataaatttccacgttgtgtaagaaggccacataaaagttttcatattttttgaaacttcaaattagataaatcaattgatatattttggtaatatgatttatttgttttggaaatgcttctatgtcttttataaacttagttaaacttaaaaatgtttagttaattaggaaaagatcaaagtgacttatagtataaaacggagggagtatttgatttctttataatatataatatttactttgtccctaacatgacagataatccatcaacttttatccaccattcatctaaaaatatatttattttttgactttgtgaaattccacaagtttgaggctaatgtgaaaaagttgggatattatttgctttaaacatattatcacaatatcacaaacttatattattttataaacatatttaaatttaaatttgatattcacagttttaaaagtttgatcctaaatgtcaaacatttagatcagcttgtactcgtttgagcactaaaaggtttttgtgctagctgctccgtgtcatggcacgaaacaattgacacatgaccacctatagtgctcctcttgtgacggaaacgtaactttttggacatatgaatcgtactttgaaccagtttttaacttcttattacataagttgtatattagagaaggtagcaaatgttttcgcatcacaccatatatattttgtttagccctagttaaaattgtagcatgcgtacgtaaaaagaggtggtcctgtatatgcagttgactctattttaaattaaacttcaaaaacttaatgtgaaaatcaatatgctttgaatattcaatttcacgtatgaaatcataatattgtagttatattatgtttctaaaagtgttttgtattttagttaaatcactggtcacaaagttatattttaaagaccatgtgtcgagttcaaaacgaagggcccctttaattaatttggagaaaaaatataggaattttagaggatttgaatcctataggaaaatttcctacgaagccccttgaaacaaatgatcgaatcatatccaatcctttgaaattcctacggaatggacaatcctatagagattttggaggaaatttagcaagagttttaacctcttggtaactttcatttgagtctatctctctcatccaattactgtgtttttcctattgttcagtcaaacggttattcgtgtgtttttcctgtgttttacaattatctattttgcacttacatttctatcaaaaccctacgttttttctattcctacgttttctcaatcatgcgatttaaagggggtctgaaatgtttttttaggggaaaaagtatatgctatatattgttccttctgttgggacaggtgcagtgtaacaaacatatatgtaacctgccttgtatccattgaaaaaaaaaatgaacaagagaaaggaaaggaaagtaaagcaaagctttgcaataactccattgcacgagcatcctcacctacacaacccaacccaaccaagcaaagccaagaatacgtgtagtacgatcatcacagcaatttgcaacgcttccgtttccacggaagctcagctatctatctagctagctacccattagctgtccacgtactttcttctctcatcaccatcgatcacgagcactacacctctcattttcccccttttaacaaccctacacatctcgcctccatgacacacacacgctcgcacgtacgtctccacagcatctaggcatctagctagctatagctagccatgtccaccgtcgtcgccgccatggccgtcgtggctctgctgctcctgatggcgctggtgccggagatggcgctggctgatgctgccggcgaggggaggaggcagcagccgccgcgcccgcggccgccggcgttgctggtgccgttcagggcgcggtcgtcgtcgccgcaccgccggcagcagccgccgccggcgttattccgcgggcgggcggcgaacgggtgcatgccgagggggttccgcgtgccgccgtcggcgcccagccggtacgccaactaccacaccctcgacgccggcctgtgcgacgaccacggcggcggcggcggtcgccggaagccatgagcctaccagctgcaatgcaaccttttgtttgtatatcatgcatgcatgatgatgatttctttggaggagttgagctagtataaacaaatgcaagcatatgcatacgcgttgtggttgtttaattttctttgggcataaataatgtttgaatttttttctggaacggaacatatgtaataatgtaatatgttttattaatatgtgccctttcttcgaagaaaaaagggttaattcggtatggttttagtccactgatcacttccagaattctcgtcctttgggtcattcatatcccaatatggcaacattgacaaattagactcttagatcaagcattaaaaaaatttccgtacaagatcaatgtgtacataaaacttcatttcataaatgaagttttaaagatatagctgaggggtcccttttctttgtgctaacttctccccggtttggcggatagctggcgttgtcaacttttatttagaaccacctccccctgctttgctaacctccaaaaccacccccttatttcctctcaaaacaaaaaaaaaatcccacatcctctcccctctcggccatttcctgccgtggtaggaccgtaggagagcttgctaaggccccatattaaatttaacccatatgttataacaacttgagactatatatgatgtgaaagaaagatgaaaattctcttcgtaattgacataaattaggttgataaataatactgtgccgcacaatttattatacaagtgacaaactcatgcattcgcacggctatatattgatgttataggaattccaatattagtgtgggatatatattacctactcaaataacattcggtagaaaattccttcaaattctttcaaatgtaattatagtgtaattgcggcgtaattatatctttaactctagagtaactaccgtataagctggcttggtataggctagcagcggagaagcttttattcccttgatcaaagggttcgaacactgcttcatacgtgggtttcaaatttttttttctcccacgctgcatgaatcttaaagcacatctgatggtccaaattcgaatgttttgaaagaaaaaataaattattagataatatttttattttagtgtacatattcaggtataaaattatttacaatatcttctattcataacctaaagtccataacaaatcagtctataagtttggaattgatatttccaagtatataacgtgttatgggtgctgttccacttaacgtttcttttaggagagctttaggaggtcagaatctaacttattggcacgaattatgtgcttctattgttcatatccagttgaataactcttctgattgttttagatggagttatcatcagaatggtcagttttctgttaggtcaatgtacttagctctaattaataatggttacattgacagaaataagattatttggaagcttaagttgtcgcttaagatcaagatctttatgtggtacttgcttaaaggggtggtgttaaccaaggataatttggcaagacggaattggaatagtagtctaaaatgttgtttctgtatgaaaaatgagactattcaatatttatttatggagtgtcattatgcaaagtttatttggagagcagttcagttctcttttggattacaccttcctagtagcatatctgatatttttaatggttggcttctgggggttgacaagaaaaagagtaaactgatacttgttggagcctctgccttatgttgggctctacggttgagcaggaatgatagggtttttgataattcaccatctgtttcctatatgtaggtaattttcagagcaacatattggctccggcagtaggcacaattacagaagtgtgatgaagatagagagttcccgattgttgcatgtcgtaggcttgacatgatggttatgcaacttttttctaattatggatggagattcaccgatagactggaatagtgttctcattgtcctgttcggttttcttctattttggtttggtatgtttcgctttattttggactatactcttttagagtgctagattgtaataattgactgtagctcttttgagcaaaggtcaggatgttttattccattatctaaaaaaaaaagtatataacgtgttaaccatattcttttctttatcttatatactttactgatttacatttcttgtccattaaattagttatatatttttgatatcttttttttgtatggaataaactttgttttgtaatgggacaatttattacataattcgaaagaaccggattcaatttcagcatgtgtcttatgtattacaaatcttagaaataataaatgaactcaagaaattttaaattttaatttcacatagggtttcactatataaatgaaaatttaaataatttttaaaatttgaaaacatatttttagtctgcacaacgttgccacatcacctaaaaccgcccccaaattatcgtcaaggtttaaaattgcactttttaaacagtagggttgaataatacgcagttaaactatataaagtttacggtcaattttgtggagttcaaccaaagttcacggttgtaaatggtcttttccatgttccaaatattcagatattcccatgcatatttgtactccctaccactagtttaatgtttgaaaatatcggaatggctaaatggttggcgaatgatttttaaggccaaaatcatgcagattactgaccttgggacttgctttgcgattcgtgctccggcgaccttaactcttctcctccatctccggcgacaccttctcctactccagcgaccccgaggaaagcaatgaaatcaaggtttagggtcccgggttgggatgggtgggagggggtggggggaggaggaagagggatcgccgagtttagaggaatggccgtgggaggcggtgaggcaccggcggcagcgccgaagctgcgggaatggaggagggcggtgggccggcgttggcggcgcgggcaaatggctaggagacagcggatccggtggttagtggttaggaggcggcggctagtggtgggggatctggctgcgggaagccacaggaaatggggaaaacggcaggacgagggcactcatgcgtccattggggaagagagggtggagggggtaggggaggaggccagcctggaggggaggggggctcgttggcaccgttaaccctttccagccagccgacgagtccgggcagcggcggaggcaacgcacacgagaggaggcagcggcggcctggaatgactaggggagagagaggggttagggttagaattgccatcatgaatcttaaaagcgttctaacggtccagaatttgcatgatttgtgaggtgttttttttttcaaatgccatctagacggtccatgaaaatatttggtcatccaacataatagaacttgtacgtcccatcttgtgccatgtgctccaaagatgtatttccacatttgctaagcccagctccctatttaggttgcaacaccacatggaagtgttaaaacagccgtccgggcagccaacatatctgtctctcatactcacacaaacaggctaggtggtctggcctagaaaacagggagaacttaaaacaacagaaaggagatgattagctaggtagtacttgcaatccatggtgaatgcttttcttttcttctatcctttattggttggattttaggacaatagtatgagtaatatctccgggcattgctacagttgtttcaccaactcattgttacacaaatgttgtactagtaggtacgttgtagctcttatgacaacgcaaggcgtttgttgtctgtaggctagtcttttcatgacatcttcttgtaataacttttttttctcacttttgttataacgcaaggtttttgttgtccggagcacttgacagtaggaaaaaggagaagattgataacataagcaaaatgagatgaaccattaatgcattattaattgagtatcaattattttaaccttaaaaaaattaatatgattttttaacaacttttcttagaaatttttttgtaaagtatacaccgtttaatagtttgagtagtgtgcgggcagaaaatgagaagtattttctctcaatcctgcaaaattattttattattagaaagaataaactggtttacacaaactgatctgccgtgtttccacaagcttacttcatgaaaaaaatatgtagtgcaaacaaaaaatgaaaacttgaaaactactgtatgtagacccccgattttagaaatcggaaatcttctgtgtttatccgtaccaatccctagatcagtagttggtacacacatacatagttggatcacaaattcaggctaaaagagttaaatacttacattagggccaggtaggccaacaactatcagaaaacaacagcggaagacaaaataatataagggcccggttaacatgccacaggcagtcgactggggaacgagacctagaacaagaccgcactccgatcatcttgttggatacgcaagcgtaccgacaagggcttctcttcaacactctcctaaaagatatataaatagcaaggatgagtaccaaccgtactcagcaagccaccacaacaacaatgcgtatgatagaaggtatttcaaggaatggcttcaggttcttttgcataaagctagttttgcaattcttttcacaagcctaagacctagcatagactgatcaagttttaataccagcgttcatattaaacaacgacggttctgtccaccatccattgtaatcccaaggatagcttcccgttattgagtcgtcatggttttctgaggacgtccaccttccctcctctcaggaagtggctccaacagcataaaatcatcatgcaataacccattccacacaagttaagaatttagagtctagccaagtgtaatacatgtcccggtgctcaattaccgcgagcacggctattcgaatagatttggtttactcacactgcagtggatgtatactttacccgcactccgcgactgcccaacacatgagcctcgtcccaacacatgagacgtgtcacggcaaagcttttcgataacctcgcattggcagtacccgctccatgaacttttcatcctcatgcactctagacgtacatagtttctagcagtgagaggagttctagcgcacccgggaagggaagactcacacacatgcattaagttataattatgttcaacttatcacatggcagtcctaccgatggcgacaccactgtagacacccgcctcgcggtcctaccaatggctgccccaccgtagagcccctgcctcacacatcaagaaaccactatgcatggatactgcctccgctcagctatctactccgctaggtctatacccatacgagaagtgcggttgtacgggggtcgtttcatgcttaacttcatggctcggtccttaactgaccagggacggcactagccttttccggacaccacccaaatcctccgtccgccccagtcgaaaacagttgtttaattttatttctcctttcacaaatcatgtcatcaacatcatggcaatgtggcgctcatgtctccacatgccgcatctcaattaccttcccaaaggtaattgcccaagcatatagcatttgataaatatgagtatgcatgattctagaatagcatttctaagcaattgtcataattgactagggactcatacgtaaacatggttacgaaggcataaggggtaaacaataatcaaggcatggcataatcacaagtgggatgttcatccttacatgcaattttatttgtagataaaataatttcgcaattgggatcaacatgttcaaagaatagtgatgacttgcctgctcaggataatccttattattgatataatcttgatcaatcttcacctcctggaagttgcagacgttgcctcacgactaaccgatacacaaggtctataatacgcgagaaaaaccaatattcaaacaacaatcaaatatgcacaacaaaatgtactatttgtgtttgctaatgaattccaatcatgctaagggctaaagtttcttaatccttctattgtcatcgtggtctatttaggagttaaccaacttagcatttataggatacatatatatttggctaatcggtggtttagtctatcaaatggctatggaagtattatggctacacatgcatttatctaaataaagtggtcatatactagaggttcggttgtcggatggatttaggatcaatcaaataattacagtgaatcatttgtattattattattctattgatgggggctttactttaattatgaacaaattttatttgtcacaataaattatgaaaggataataattatccatgctttgaatgttagagttgtttaggttaaccatattatggttacagattatcccttaatgaacaatcctaatttacagttgaactataattataattatacgaggtcaagatttataactagtatttatctaatatacatgcttgtcatatactccctctaatttaatatatgcaacacgcaaattaatactataccgtacaactataatgggatgtatagtatatgtgtaagcaacaatatcttattattggatcatatatttgagtagttgctttttagtgtaagctatacaatacatgttgattttaagatggctctgtttggttaactaatggatgtcaaccgactatatatatattctacttcacataacattgtatcgactaacttttaagtggtccaaatacaactagctctgtgattattctcctaaacaagttaaagattcatctatgtgtgtttatattttagttacaaaatatgaggctaaactttatgtaaataatttataagtcatggatttagttatatttggacatagaccagtaaatggcactaatattttcctatacacccattaatttgaaggattgattataactaatttatgtggtttctacagtgacaaaacatgttaaagaccaatattattacatctactctactgtacaatatcaaatctatttattagcacatttttaagttgactactatgcattatcttgatattaattgtttaataattataaatatattttattaaatagtgaattatataccattggaaagcttatgaatttatatgaatttaggatcaagtttcattcaaatccgagttaaaatgagagagttatgctagtttaaagattcaaatttgaataattgcgaaacagtactgttcctaactcatttatttttattccataatttacattgactgacctgtgggaccggcctgccatggacacaacatatataagtgaattttcatagatttttaatcatagtgaccccacatgtcatagactaacttacttgagattaatatctaatcactgtgcgctaatcaagtagggcccacatgtcatatccttctctctctcgttctttctctatcgtcttctacctccagaccgagcgggagcagcaggggcggcgcagcgcgcgcggcaaggccggcggagggcgacccgacggcgaccaggggagggagcggcaaggctccggcgtccacctgccggcggtcacggcataggacggcgcgggggcgagcggcgctgcaaggccgccatggccgggcacgggtagctaggtgctagggcgatacggagggtttccgaccgaattggtgagggcgtcagcatctacggcgtgtgagggttccattttgctagctagatggagaggaggggctccgggatggcttgtccacagcgagctcaccggaggcaaaacggtggccggaccggcatggctacggttgctaattggcgaaattaaagggggctctagtttttacggaaataggagaggacataggagcgaggacttaccgagggatggaggaacgacgaagctcgacggcgttggtggagcggacaagaagctgccggcatgcacacaaggtgtttgagaaaatgcataca

SEQ ID NO: 25625 - DNA, 1993 bp, Oryza sativa
acacgactagtgcggggctcgggccggcgcggggctcggtacgatgatggcgtcggcacagcagctggcggcagcggcgcggggcttgagacaagcagtgacgcgacggcgacacgcgacaacgcgacggtgacggcgatggcgcgacagcggcgtggggctcggcgcggcgggggcgacggcgacgtagcagcggcgcgatggggtggcgcgcggtgcggcagcacacggggcgcgagggcgcgtaggcggcagcggcacggcaggccgacggcaatggcgacaaaacgacgcgcggtggcggtggcaaagcgaggcgacgacgacgcggcgcggtgatggcgacacgacagcgacggcgccgatgcagtcggggctcaaggccggctagggcggcgcagcagtggggagaaagagagctgggatggctaaaaaccaaatcgaacacctaggggctaatgaacagtgctagccaataatttttgattttagagggtactttacaattaggaaaaatatactgttgctactaattttgtcacaatgtaaaaatacaccacgtctaagttatttcatcgaaatttatattcaaattaatattgtccaaatttaagttttattaaagattctataatttcctaatgagaccgttattaacacattagcacattagctcaatttatttatatgttagtttattttatatggaggggtttaatatattaaatttcaatccctaaatgcaattaggaacttggtgcaatatcgatctacatatcgaattaaatactcccataattctattatatatacagagagctcagtttatttgaatgatcatcattccatgtgtactcatattatggcacccacctttattattcaaatattttaatatttgataaaataggttaataataacttttcttttatttgattttaatatcttgtgcataattatttgtaggattaaatatattctcgtaaattatatctattgcttaaatttagatcttttctttactttctttgtgatcttttacggtttggcaagcaatagcaatcataacaaccagcatgatgcaaaagttttaaaaagttcaaaattttagtgatttttattgtcaggaattttcaggatgttacactgtaggattcaaaaataaatccctaagatttgttaatgtcatcatgagtaaaatttttactcccactacaacttttacttatggttaaatctgggtaaaattagttcccatggtcatgcaaacaaatctcaaacgtccactgtagttttttgtttgcactatatatatttttttagtgtgcaaagctttggtaagaaccaactagaagtacaaactttctacgtgcaaagtttcgacaaaaatcacaagaatttgaatgacaactaaaaaaccaaaaccccatgtgtgtgcaaagttttgtcaatattcactaggaacttgaatgaaaacttaaggaataagatcactttgactccctcaattgaccaccgaatctaaatcgtatccctcaactgcaataccagaaatcttgaccccgaactgtcaaaacaggtacaatttgactcccttagtggttttagagggcggttttgctgacgtggtgcacatgtggcagtgttgacttggtcttcgttccacgtggcattgacgtggcgcttatgtggcattaaaataaaaaaatatatgcgggacccatttgtcattcacacaaaaaaaaattgtgggtcccactgacatgtgggtcccactgacatgtgggtcccacatgtcatcctctctttatcccttcttcctcctccctctcctcccttctctatctctccctctttctcttcgtgcgtagggatgggcgtccggattggcgacggcaacagcgagcgatggacggagcagcagcggcgggtgggatggcgggtggacagtcgctggagttgtggaccacgagacggtggcttgtcgggcgg

SEQ ID NO: 25626 - DNA, 12764 bp, Oryza sativa
  unsure (1)..(12764): unsure at all n locations
agctgctcccgcgcctgtcgcccgaggtctaccgcccaccgccgccaccactccggcacccgcccgctgccgcctccactcgagcccccgcctgccaccggctcatgtcaaggggggagagagagagagaaataaggaagagaggaggaagaagggtagtgagagagaggtacatgtgggacccacatatcagtggggcccaaatttttttttgtgtgaatgaaaaatgggccccgtatatatttttaattttaatgccacataagcgccacgttaatggcatgtgggacgaagaccaagttaatactgccacgtgtacgccacgtcagcgaaatcgccctctaaaaccactaagggagtcaaattgtatcggttttgatagttcggggtcaagatttctggtactgcggttgagggatacgatttagattcggtggtcagttgagggagtcaaagtgatcttattccaaaacttaacaaaagtccataagcccaagtgtggcccatttactgatttacagcagaagcctctggggcgcaaattgacccagctatgcaccaacaaggaaattattgtgtcgcgccctctgtccctaagacttaggcccttctgaaatgcatgaaattttaaatatagatagagaaaaaacatgtattctcaatttctacaggaagacaaaccataagaaaacgtcaaaataggtgtttaattgcaatgttggaaaaacataggataggattgcaagagactaaaggatcgaaaaaagaagctatcacttattggttatttttcttcaaaattactataggattgcagttccataaaaatttcagaagaaatgatgtgactcaatcctttcataggaccttttttttataagattatagtcctccaaatttcttaatccttcgtctcaaagagccaacaccttaattttatattaagcgtagggtagggttcattggctctctttattacccttgttttctctaatcgttagatgcaaacatcaccaattaaagtttgaatataccagtctagccaaccattaattcctaaaaaaaagaatgcaatcataaagggcatatatttgccgtttaatatctttactaatctgtcttagactgtactatacattttcaacttctactctcccattttctgcgcacacgtttcctgacgtactacaatattttttgaaaataaattatagaaaagttgctttaaaacattatattcattcattttcaagttttttttgctactactccttcagtccccaaatatatatatatatataatcagatgggatatattctaagactatgaatctatatatgcccctgtctaaattcatagctagcatttatcctatttaatcgtaagtttctatgttttaaaaagtaggtagtatgatctggtgttccgtttcatgtgccggcaagggatctcaaacccacccacctccaaaacgaacacagagaacacagtacacaggaaggtaatccatgttccgaatctgatcctctgcgtcaaatgcaataaagatcccatgctggacacatcacgtcagcaatggcattttcactataatcttgttgtgcatctgtcatttgttacaagtaagacatgaaagaaacaacataggtggtgtttgggacaccaccatactccatccatcccaaaaaaacacttaatcttggtgtggatgggacatcacctaggacaacgaatttgtgatatcccatccaagttaaggttgttttttttttttttttggatagagtgagtatctctgtaacagtcatttagtcaactcgtacgtaaggtaatacaaatcaagaagggatctttgttaatgccagaaataaaaccatccacattttagttattactatcctcctttagtgagcttctaacaaaaatgctgcaaagctacaacaaagattcaaatggggtacacatgaacattatcatactgttttagttttttttagttcttgagatgtgaagtagtctcaccctagcaaaattactctgatttgcttgagaaaatgtgtataacagacggagttacaggttggatgagcgattggcgtattcctcaaccattgcaccaaacagggatggctgctcaatcaatcttgagggtgaatcaaattcttttaccagacctgaacataaatactttgattttaggatagcattctgtgagctaaaactagcaatagaaatacagtgctttccctcatctaatagagagagaaacaaatttcaataatgaagagcattttaaacaaagctatgtgcattttttagcaatatagcgaaaaggactgaaagacctacctgcatccagcaccagaactctatcacaatccatgactgttggtattctgtgtgcaatgctaattattgtacatgaagaaaattcttgtcgtgtgatcttctgtatcgtggcatcagtttgagaatcaactgaagcagttgcctcatccataaataatattcgagtccgcttcaatatgacgcggccaagacaaagaagctgcctttggcctacactccagttctccccactatcagccactgtgaagaatcaagaaaaaatggccggtaaattcaataaatttgagttccaaattttgatagatgtagattcgtttaacaatgtctatgttcatttcacatcaaatatggcaagaatcacctggatttaatatttagtttcgacatggaactgcatgcgttttttcttttacattgtacaaaaagttgtgcatacttctagttatttgaacattctaatgtatttaatcagttcaatattttggaatactttggtacttggattttgtaaatgatcaacgagccaacttcttcagacatattaacttctggaatactctgtcctcattatacagggaatgtacgtttggacatgatcttcagctcatgtttcatcattaatttctcatataatacattgttaatagctacaaaaccagtacggtgtgaaagctctttgaatatgagtcgtgttataaattttcatacattaaagtattaaacatctcacaatttgacgaactgttggtcaaatctacaatgtttggattttttttaaaaagcatgcgcgcactatattcagactggaaaatgaagcagcaaattcaagtaattaagactaagcagtaaatgcaacttaaagtcaacatagatacagcagaagcatataagtagcaaacctagagcatcaagtttttgaggttttgaagcaactacatctttcagttggcagccctccagagcctgcgaaattgaagtaaaattcccacaggtaattaacacaatacaagtacacattcataagggattaaggggaaggctgaatgaaacattatagttacaccatacccgccatatctcagcatctgaatactgcccaattggatcaatgttgcttcgaattgttccttcaaagagaactggttcttggggaataatgccaaagcgggacctcagatcatgcagacccaatgtgcatatgtctattccatcaatgatcattgtcccctgcacaggctctacaagtctgaacaatgcttggatcaaagttgattttccactgcctgttcttccaacaactcctatcttttcaccaccactaatgcttacagttatgcctttcaaaattagaggtgtattcggtcggtacctaacctgaaaggataaaaatgctatgctcaaatatttttttttgactgggaatactgctagggctttgcccagcagtgtaaattttataaaacgcaaaaagcatttacaaagttacagagaaagaactaaaggaaaaaagcaacaaagctacaaggtttgaattctccgctttataggatggatgtaatggagcggaatccctgtacaaatcaaaataataatagtataagaccatgcagtttaagtacttaaccttcttacctttaaatcatcgatgtcaatatcaccatgagtgggccaatttggagaaggaagatggtcttctatcttccacactgcctcagaaggaagggtactgaactgattaaccctctccacagcaaccatatcattttccaacatacagctaatggatattgcaaaatacactagagaattgagggagaggccatatgaaagagacatgccaacaaattctgcaaaagcatagtgaacattagttcatccagcctatgctaatgatcataaatcttgacagaataaaatttactaagcataagaattgaaaaaatatttttgtcagatgattaagatgcaaggagtaaaaggacaaacaaccatgttatatcttcgacctacttactaacattgagacaaataaaaagagaaggaattagctacaccgctttaaatatataatgcattaaagtattcctaaatgagtcggttttttcatgagactgctatgactaccagtctcggttcatgctaagaaaaatgatcaaatctatcatatattggtacctttcttgataaaattgctaggcagactaatcataaggaaagcagttattgccaatacgagtgtcccaatcaactccagacggaacccaagccattcatttgctgcataattgtggaagtacatgcgcaaacttgaattgattctgtccaaattttcttggaaaaattctttgtccttcttgaagcatctgatggttgtagcacctagaacagtctctgaaaagtgatcaattactggtgcctttgttactccttcaagtctagttagctcccgagaagttgcaagatagcgattctgcacatatataaggaaacaattgagtgtctcaatgaatataataatttttttggagcagaattagcaacagtatctgaggcaaattgctatagtaggagcataccctgtaccaaatgttcaatagtacaagtggaattacagctataaccgatggccaggcaacctgacaagtaacaattatggtacttaatactgaaatgtacattgaaattgtcagaccaacaaaaaaggacagcacaatatcaatggttgtttggtccgatgatgcctgaaaagtacaagaggaagtatttcatcagtagaggataaaagaaatgtggcgacaatctcttcagtattcagaaaagagaaagaaaaaactaaacttgatctatactttttataaatgtgaagagtacaagcagtgccagtttacaagaccaaactatttcatactgaanagggtggtagcattgttcatgccaatttaattaatagtaaaattaggtttgcagatgaagaaataatcaatttcaataaggtatcaatagtactgatgaagattgagcaaatcgcaagttaacgttatcagcaaatgaaccataagtagagaattacccgactgagaatcctccctgaaggtgtggtatcaaaaaatgacatcggggcatgcaaaatactgtcaaacatcttcttgaaaaagatctgagcagtctgaagtcccaatattgtctcaagaagactcttgattacttgaaggataattgaaacagcagctatagcaacatacactccaataaatagagatggattaaatggaatgctgcctgatgtttcatatgacagccaatagtcactagccatttcagtaacttgccatacaattgcaaaagcaagcatgccgacaaccccccaccaaccccaagcctctgtcatatataacttgtacacacgccaacttacttgaccactttctctttcctcttctcgtataattttagaagtagctgcttctatatcaggtgcaacaagtaccttctcaccctttccaatggatctagagcgaagagaaggaattctggctaccgccttaggctgagaatattcagttttgacaacttgtcgactttgatccaccagttccattgaactatcatgagcagcaacaagagctaagaaatctgagccagcatctagtaactcatcatatttccctgactgcacaatcatgccatctctcatgacctgcacaatcacatggaaaaaatgattaaaaatcaagtcaaggacaaaagtgtatgttctactccctctgccctgtaatatgaggggtttgaccccttaaatttgtcccagaatataagggattgtgatcccaagacaatactttattccccacctacccacttttgtactagtttattcctccacccacccactttgtactagtttattccttgcccattaagttttgtactagtttattctttcaactaccaccttttgtacaatcactcatactatcgttacttccttaatctttgtaaaaaaaaaaggcataatcccttatattatggaacggatctttccacgagaagagaggagcgaaactacctccaactgttgcttacaattctcttctagaaggaagctccaataacatgattacatgatgaaaagcatgttaacatcagaaattcattggggaatcctttcaatggttgattatgtcctttttagattataggggacagattatgtggggattatttgtaccgtgcttccaaaactaggatatctcgaagaattttctacattacattgcttagatcacttgttctaaacaatgttagctttataatatagaatatttaattcatacgtatttttggaccaaacagtttcaagtatataaaaagaatatgagtatatatgccatagtttttagagatttttcaagataataatttaaaatttacttgcttgttgaaacatggtacaagagtatgctgaaaataatcatgctagaagacttacaaatatgttatccacattatgcaagaaatccacttggtgagttacaagtaagatggtctttcctttgagcatgcctctcagacattcctgcaggagaaagttcattgttgtgataccatgcaaatatgttagcataacagaaaaatacttagttcatcctcgatatatagttatcccaagaagaaacaaatatatttatttaacatataattctagcctcctatgtacatcatagcaacttttttatgggcatcatagaaacttttaaatctatttatttcttctttaggataacataaaaatattctcacaaatagactgaattaatttaactcaccacaacagtagtaaatataaatatttgtccatttcttatatgttactatattgacatgcacttgatagtgcagtggcaaggggtgtgtgatttcaacccaaggtcccgtgttcaatccccaacactctcaccatttcatcttaaaaaaaatgtttggagggacatctctccctccaaatctttttttttaatgttatatcctattttcattttttttcattaatctcctacaggtaacggtcctttattccatatacacactcatctattttctcaatttaagaaggattgagtttgctccataacaactgataatcattcttcatccttcaaacaataccaaatgcagtaaggtagggcatgcatgcatccacgcagcgaaaatcatcaaattatcagttgcatgtatcaaatggcatgtgaagctagctgagtgaaattttaccttaaaaatgcttgagccagtatgtgcatcaactgcactgaagacatcgtcaaggagatatatatcacaattttgataaactgccctggcaagctgaatacgttgtttttgtccaccactgagattgatccctcgctctccaatctctgtctggtcaccaaattccatcatttccaaatccttttccaggctgcaagaccgcagaacttctttatatctttcagcatccattggctgcccaaataagatgttctcttgaattgtgccattttgaatccaagcagtctgtgcaacatatgcagtgctcccgcatatcctaacctgtggagaatgcaaaaaaggataaagaaaacaaaaggacggtgaaaactatagagcagcttgtagtccaggtatttatttagacaatactatctatctatcttctattatatactaaaagttcatgaaacttcctacaaacgctcctaaagccgccacttggcgctctaataaattagagaaatcaaagaaattctgagaaaaaaagcaaaacattctatccttgattttcacttaatagagtggacccattattttccaccgttagatttaaaaatattccaccataccctggcgtatccaaggggtggtccgggtggtccccggtccacccaaaaaatcgccagcccaaaacctatttacggtgaaaaaagaagataagaaaactcctgtgcgtaagttggtcaattggttcgtctacagataggagtccctcacccgtttgcgttgtttcctctccctcacgcgatcgcacgcttgcatcttgcggctgctggccagggatcctggtgaatggcgacggcggagttgtggactgcaagggcgaagcccatgcatgcatatggtctccgcggcggacggcaagggtgccaggacgctagagtttgcatgctgcaggtcaggtccattaggagattaactagctgattaggtttctttcttttttaccgttctcaccttaccatgaatgcaatgtgtattgcagattaaatatgaagaaagatggacataagtatgtatctcttttaaaaaacatagagcaaataagatgaagatcgctttccaatcaccttcttccttggttgtggcagaagaacaatctcttttaagtcggattttgtgactaatatttcgtgatgaacttttctaaattatatactggcaagttctatatctactgtatttaaaaatattatataaattggaccacccatacctaaaatcctagatacgccaaccccccccccccacctcccaggcatcctctcccccttatgtacatatacgtaatgtacgtacgtaaatttgtccgtccgtccctccatctcatatcttctatcattcttttcatctttaaattttctacttagcaaaatttaatacgaaaataaaatcaaacattagataactagatgattataatctatatattatattatatactaaaagtaaaacactcttacaccatcacgtgaggctcaatgaaaatcagacaaatcctaaaaatctatctatctgttattatatactaaaagtatattaaacttcctaaaaacgctctcaagccatcacgtgggactccgatagacgttcctaagtcgccacatggcaatctaataagtcgttcataaacacaaataactaaattaggtgtacaatctcatggaacaaaataaaaactacatcctcgtgacttttctttaagtaaaaaaaatatgtatactgcaatatgaaaaaacataaattaaaagacaccaataatatacaccctacatataattaaaaacatatgactaatatatgtggcatataatctatgtatttattggtctattaaagcatatactcaataagacaaattcttgaaaattttccttatgaaggcacaacattctacgtgtaatttatcattagtcaagtggtcatgttattcgtagctatcgaattatttctacattataaattataaataagcatttagattaaaaacaataatccaagtgtgttaacaaattggaaaaatacatcaagttatatttcacaagtagtaaagaaccatcataaggtatttacggttatagccaacgaggaagaaaaaaaaaaggctatggtaccccttattagttaaaagaaacatagagagtgggaagaaggttagggtaagattgggtaaacaagaaataatagttgtttggatatgacaagtagtactactctaaaatcccttatattttgaaacaaaatttaactttctcggatttatgcgacgaagtataatccatctagctttaattatatgacatagttctattagctatatgtttaatagacaatcttaaattaatttatcctaaaatccagaaagacatagatagtataaaagcaattattacttaaagtatagaaatacccatagtacaaaatatagaaagtttcatagaaattcagaactgcacgctttcacacaattttagttaacaaatttttatgttgcaagggaaactagaagaaaatcataaccaacattcatagaaatcccaaataaatttgaatagagtataaaagatatttcaataaaaaaaccaactacacataaacatgtttataagaaaatttcaagcacattaaacaagatgcccgcgcatgtgcgcgggctaccttcctagttctttcaaaaagccaacacaagttgtctaaagttcatgatcttcacaagaaaactactcttttaagaattcatggtggggtcaaagctgaaaagcagcatatcactcaaggtttagtacagtcaacagtcaacacattgttcacagaagtccacagtttgccaaagctgtagactgacaatagaatcaaccttcgatattttatcaagcattaaacaggcatagtctaggtcaaaccaacagaggcgttgtgtcaaacatctggtgtgcattgttactatgtaaaatatgaaagcgtacctaaaatgttggttttccaactaccttgcattctccttgaatgctagtccccatccattttacaacagttgttaataatacaagcagacaagcagattaccactaccttttttggttcttccagaatccccaacccaaacaaatggcaaataccacaaataaaaaatggactcaaccttctctaggtatcaatttgctcaaatggaacatatggtcttgcactgtgggtgcacccacctacccctgatttgagccgttcagacggaaatgtctaatgtcaatgtgatataatcatctagaccaacaaatgccatcacaattaatcttgagtgaattcgcattcacctgactaactaacccctgatttggactgatcaatccaaaattatacaaaatttgtgctactgttaaaagctattttcgccgggccggagaaactattaaaaactttgactgctcataaaaatgcttggtttgaagataactgacaagaatcacagacataccttcccggagaccttgtccatctcccccatgatacatgacagcagcgacgatttgccggagccaaccgtcccgaccaccgctgcaagctcacccctccttacctcaatgttaatccccttcagcactgtctccagaacaggcgtctcctcgacatctttctcctcctcctcctcctcaccttcttcatcatcctcgttgtcgtcgccctcttcattctccttcttgcccctcacgtcccatgcaaacacgccatcgcgcacttccacgaccacaccatcagggttaatcccagcgtcatcaacacgctccaccgtggtatcatcaagctccacgtcgagcagatacctgtcaagcctccccagtgacacggtcgcctgcgtcacggaggcaatcgcctcggggaagctctgcattggtccatccagcatgtggaagaaggcggtggccgtgaacaccttgccggcgtcgagcgtgacgccggtcagcacacaggtgccgaacacgagcacggtcatggcgagcgggccgctccagagcacgacggtgttggcgcacatgaagtacatggacttggcaagccacccgagctcagcctccctgagctcgtggatcttgccgccgaacgtctcctcccacccctgcagcttgatcacgcgcatgtagttgagcagctcggtgatggccttcatgcgctcgtcgcgcttgccgaggaacttgaactggtactccaggttgcggcggttggcgagcgccacgaccacggtcaccacggcgatcgcggcgaccgcggtgagcacggcggggccgaggtgggtgtacagcagggtgagagccacggcgatctccagcggcatcagccacaggttgtggagctcgtgcgtgacgttggccacctcctcggcgtccacctccatgtagttcacgatcgcgccggcgccgtgcgcgcgccgcgcgcccgtggacagccgcagcgacttgcggtacaccgcggcgagcagcgcggcgtggatgcgcatcccgagcttctgcccctggaactcgtagtggtgcgaggccagcgcctccgccgcttgccggcgaggaggacgacgaccagctgaagcccttccgtcaactccccgccgcggcggacgaaattcacgaacctgtcgacgagggaagggccgatatacatgaccgagaggtgcgccaggccgagcatggcggtgagcaagaactgcggccagaacgaccggagaagtgcggtgaccacgggatgcccggccttagtccccggcgccggcggcgcggcccagtttgacacgaacagcgcgtaagtcgcctcggcggtatcatctggcgccacgggcgggacatcgtccgcggcgagagccgccctggagcccttggagatgagcgggttgatccagctgaacgtcgcgagcgacaaccacgacgccgtcgagtacgacgccgccgccgcggcgtgacccggaacacagcttcggtcttccccgtcgggaatcgccgcaccaccgaggccggtggagccggtgacggagaagtagagaagagggagcgacatcaccagcccagcgaacgcgactgcatcgtcggggaggatgggctcgcgagccgcgtagcgcgca

SEQ ID NO: 25627 - DNA, 8642 bp, Oryza sativa
tttaatactcctaaatagtaagattccggagggctgtttaatagctcggaggatccaaacaaggccgttgtaccactcttcctatattctttcccaatgaaatctgttggaatatttattatcaccaacgtcttgaaacgtacgtatagcttgttttaaaatgaagctatttcttcacatatcctctctactcaaccaatcataactattttctatttaatgtattcacatttttttctcaaccaatcacaatatttctctaattaatttcacctattttcctaatactaatatttactttaaaaatgtttatattttgggatggagaaagtacggaaataagaagtagtacacgatatactagagatcaaatcctttccgtgtaggtcttcggcaattccttaacctcatggagatattttccataacttgagacaaattcctaacggcgtatacggaaaccaatccgtatatgtgaaggtataccttatcggtatattctataagtcgtaggatagagggtatgccttatccgtaacgatacataggattctagtgtcaataaagtgagtgcataatgacagatcatcaaatccttataccttccgtccagattcgttgccacatccctctaaaatttcttatattatggaattgtggcaaatcatctaataaaaaataattcggcacttactcaccaaatattcccccacgtattcaagcccgggtcattggcaggtattcaaaccgatctggtgagctcattaagaaaagtgactaattcggtcaacatacagatcggtgagaagtaaacaaagtgatggctactaggtatataatctcttaagtggcgtctactaagtacaacaaaagtaatggctacaaagtgaccaaatgtgatattttttcgtttcatattataatactttctaacattgcttatataaatatagatattaataaatctaggcacatctatatgaatgtgggcaatgctagaaagtctaagggcccctttgaaccgtaggaatgaaaaaacggaggaataggaaaaacataggattctggcaagaatgtaagtgtaaaacagaggattgcgaaacacaggaaaaacacaggaataatcgtttgattgaaccacaggaaaaatacaggaatcggatgagagagatagactcaaaggatttttaccaagaggttggacctcttgctaagtttcctccaaaatctataggcaataagccattccataggaattttataggaataggaaaagttcaatcctttgaatcaaagggctatatagaaaaatttcctataggatttcaatcatatgaaattccttcataattcctgattcaaaggggcccttataacatgaaacgaagggagtatctacaaagcaatggctacgaggttagtacactaaaacattttgccactagtaaaaagtacaccactacatggattatactaaggccccatttgattcaaaggaaattcataggaattttattcctataggaatttttcctacaaagccctttgaatcaaaggaatgaaccctatggaatcctatgaaattcctataaaatgcctttttccatataagttttggaggaattttaacaagaggtagaacctcatggaagaaattcgatgagtctttatctcttctcaaattcctatgtttttcctgtggtctaatcaaacggtcattcctacgtttttcctgtgttttgcaatcctctgttttacggtcattcctgtcagaatcctatgtttttcctattcctctgtttttttattcctgtaattcaaaggagccctaaaccgtaaactactagcataacagataatatacgagtactgtatggtataggtgagaaaacaagccaaagcgcgaatgcgcgatggctagtacggggtagttagtaggcctcttgcatacgtctgtgctgaggtcgatcgttcccgagtttttggtggccgccgccggcgatgaccggccgtctctcgcgttgaaccgaacgtcaggctgactcttagcctgcaaggaacactgatggcgcgcaaaattcttccgccggttaaagatgtggtcgtcagaaccactagaaagattgttaagaaacacagacgaatgataccgtgcacaacccgcgaatacaaaactcatatcttacctctatgagaacttttagagatttagatcgatattatatatatatcttgaagttgatgatatcatcatatgcatctcactcttcaggcatgtacacaatcaatttacgagcaagctaataaaggagataaatattgtgcttttatgggagacagagactattacatgacaacatagcagcaaaaagtgacctatatatatttaaagtttagaatgagattcgttcagaattttgaaagtttgaccatcagctttatattgacgccagtttatgaaacctaataacaagattgttagagtacttttctacataaatctacttaaactcttctttagaaaaattaagtaggtgagaaaaacgacaaatatttataacaagcgggagtaactctcaatcaaaatttatactcactaatataaactgtgtattttatcttctaattcctgtcaacttttagtcataaacaagtccacaaagagtttttgttcggttgggttttttccgacagaagtgtcagcaggaaagctgtcgaccatacagactccgcattcagcaacgaacagaacttcaaaacaagtgatgccagaaaagggattgaagtaaaaaccaaacaacagaagattgaagttacaaaaccaaattggaatgtcagagaacgagtgtttttccttcgaagcttcaatagctcatgtgcaaagagtttatgtacccagcaataacaaccgctattccaaccttttcgtgttgatctaagagtaactagtgaagtaactactaaaacgtcgacgcacacacaaacatagcaagggaaagcgtggaaatacaacacataatctcttcaaacttacaaaaatgtttcatatctagagtttatcctttttcgtgtagttagttttttcaggtatgtcttgtatgtttgtatgtatgactaatcttgtgattcttaattaattggctatcatcaatcgcgtgcctctgtgctgtaagagcgatttgcatactcctgaaccattgctcgaaaaagtgatggcctccccatcaacttggacggctcatcaaattccttcactaaccctgaaaataaaggcatacaacatcatactcagagctgtgaatagaagtgcaaaatcaaattatcagcaaatttctcaggatttgttttttatattgccatgcttttctttggggctggaaaaacattctggtaatactagaaatagtcacagtgtaaatcctcacctgcatccaacactagactctatcactgtccatgacagtcggtatgcggtgcgcaatgctgatgatagtgcaatcagtgaactcttctcggatgatcctctggatagtcgcatctgtctgagaatcaacggaagctgttgcctcatccatgaacaggatccggctgcgcttcagaataacacgaccaaagcagaggagctgcttctgtcctacgctccagttctcccccatgtcggcaactacaaagaacaacataaaagcaaatatgtgcaacagtaattgcagctacaaaaacaaaaaataagtgttgttcaattaaaaagcatacctagtgcatcaagtttctctggttttgtagctactatatcttttagttgacaacgctcaagggcctgcagaggaatacatatgttagtctcgacagaaacaaagagttgcaatagaaaaatccacacattgaaacatacagaagctgtaaccaaacttttgtacctgccatatctcgtcctcagaatatcgcccaattgggtcgatgttgcttcttatggttccttcaaagagcacaggctcttgaggaatcacaccaaagcgcgacctgagatcatgaaggcccaaagtgccaatatctactccatcaacgatgatatgcccttctacaggctccacaagcctgaacaaagcctgaactaaagttgactttccgctgccagtccttcccacaactcctatcttttctccgctgttaatgctaatagtaatgcccttcaagattagaggtgtgtttgatcgatacctaacctgaaaagaatagtattgatatggatcacttctatagttctattaatcgcagtgtacaaaaaggaagttcaatgaaggaacataaaatttctcacctttagatctttaacgtcaatatctcctcttctaggccaatttggtgagggaagacaatctgccacttcccatgctgcctcagaaggaagagtactgtactgattcaccctttccacagcgaccatgtcattttctatcatacaggtcattgaaattgtatagtacaccagtgaattgagagatagaccatacgaaagggacatgccgacaaactctacatcagaaacagtacaaatcaatgaagtgatctttgaaggtcacaaaggattaaactgataacatatattagcaagtcttttaatataattgatcatttagagactgctgtattttatcctctaccatacaaacaagtagctaccgttctgcgaaaatatggaagtttgcatctaacataaatttgcgcttgatctttgctaatgacacagaactatccataaagcgctatatctcaaatttagacatctatagattcacaactcatgctatcccattctacccagtgataaattcactaagaatcattcgtttatttctatatcttccagatgatgactggtatactttctaatataactactatgcttaggacaagactctattttccttaacagttcaaaattgtgttcaagggaacaagccaatttatacgtaagatgtagacaacataacatcaggagtcaacaattcgagtctcttctaccaaatgggacccgtataaatacttggtgcaacaatattttaagaatacctttcttgatgaaattgctaggcaagctgatcataagaaaagcagttatagacagtagaagtgtgccaatcaactccaggcgaaaacccagccactcattagctccataattatgaaaagacatgcgcaaattcgaattgattctgtccaagtttatttggtaaaactcatcctccttcccaaagcaccttacagttggagcacccaaaaaggtttctgagaagtgatcaataacaggtgcccttgttactccttgaagacgagttaactctcgagatgttgcgatgtaacgattctgaaaaacatgaagaaatgaaagcaatcaaatttattattataattcaattatggctgttatatgatgctaagtagtacaaaaaatgatttcagttctctgatatgcatggttgtagctggatcatacccggtaccaaatgtttaaaagcactagtggaagtactgctatgactgacggccatgcaacctggcaggtaacagcaatgctgctcaccacggaaatgcacattgatgtagcaaaaccaacatagaatacaagggcagtgtcaattttcatttggtctgctgatgcctgaaaaaataaagcagcaatagttcagaaaatgattgtgcacgtgctgtgaaacaaattaaattctactcctacacaagacatacccggcttagtattctcccagaaggagtggtgtcaaaaaatgacattggtgcccgtagaatgctgtcaaacatcttgttaaagaagacctgggctgacttaaaccccaagaatgtcacgaaaagagtactgatcgcatcacatacaattgaagcagcaactatcgaaacgtaaacaccaagaaaaacagaagtgtcaaatattgtgcccccagatgtttcatatgagagccagtagttactagccatactggagccttccgacagaactgatacagctaaaatgaccagaactccccaccaaccccaagcttctgttatgtatagcttgtacacttgccaacttactcggccactctccttttcctcttcctcgatcagtttagatgaacctgcttctttgcttggtgcaacactggtacctccattttcattactagaattggacttgacaggagattttgctggtacggtggtgtcctgagaatactcagtggtctgatcatgggacatttgctctgctgcccctggaacctccattgaactatggtgagcagtaacaagaactgaaaaatctgagcatgatgttagtagctggttgtagctcccagactgaatgactaccccatctttcattacctgctcaaacaagttaatattgtttaatttgtattatgtgtaaatgatatcagaccatggtgcatttgtcatcatatcataaacttggcatatgctgatacctaaactaaacttagaaaaaaacgcaaagaaaaataattcttgtccctactcctagaataaaaaacaaagccagtgctacagtgctactggtattgctcaatatggctaaacgattcataatatgtcagagttcatttctgcagcaaaaacatatttactactctatttcctccaaatgtaacaagtacagtttgagaatagaacttacgaatactgtatccacattctttaagaaatccacttggtgagtcacaagcaaaactgtcttcttcttgagtatacctttcagacattcctgcagaaaaaaaggtaaccattagagtactacttaaaaactgggttgacactacctacagtccatacttgttttcagaattttctttcgagacatcatagtaataagaaaaccattggaaagcaattaatattggaaaattaagtaggtcactagtcttttttttttgaggggaaactagtccatttggttgtaaactgaatttcacatcatcaacctttgtagccattcctactaaaaaattacaggtttttgtaatacaaggttccttttagtttaccataacaaatgaataaataaaatatggaacaaagtttcttgaaacagaaaggaaaacgaaagagcgctaaaattttccttcgctttcttctagacgaatccaacagaaaaaggaaaattgataaataggtaaactaaatgggatctgaattatgcaaatataaaatcatattggtaaggaaaactctaaaagcattttaatcaatatttttttaatattccgtttatgtagaaaaacagaaagatgccgtgagggcttgattcacagcatgataactaccatgccgaaagccagatggcattgcttgatgttgaaatttattttataatttacaagaatgacttttcctcttatctttcaaagaattcgaccttccatatttgatctttcctcatttattttacctttcggctttcactagacatcctgtaaatcttcattacaagttccttccccaagttcattttcacttgtggttattttgcatttgttctgaatttaaatcaactcaatgaaatagctaaacaccacaagaacacaaaagaaataaatgtgaatttaccttgaagatagctgaaccagtatgagcatcaactgcactaaagatatcatcaagcagatatatatcacaatcttgataaactgccctagcaagctggatgcgttgtttctggccaccactgaggttgatccccctctctcctatttcagtcttgtctccaaactccatcatttctaaatctttctctaagcaacaagcatgtatgacttccctgtacctctctgaatgcattggttgtccaaataaaatgttctcttgaatggttccattttggatccaagctgtctgagcaacacaagctgtgctcccacatatgctaacctgtatcaaatacgaaacgataacacagttattatcagataaaaagtaggaaaataacttggaaaaggtagcgacagaaaaaaaaaacgaaaatagcttgaagaaattggcaacaactggtatgctaatagataagcatatgtaatgagctcagtcgcaatattcagaattattgatgcatgaatgccatactggtattttattctgaatagtacataagtatggtctcaacatttagatttattgatatactacttctgataagatcagctacaaagtatgcaaagtgcgaagaaagagtctcacaaaaaatggtgtgaataaatgaatcacatcaaaactaccatctgggacgatagataagtaaaacataggaattcaagatgcaaggaggggaaggcatgagacctcaagtttgttttaatccagatatctatggagaacggactgtgtatagtgacggaaactgacagcagccagtttgaatcaatggtggctagtgggtctgctgtggctagcaagaggaactgaaagtgaaatggacaacatatgtggagattgatggcaaccggtgtgaatcgacggtggccaacaaggttgctgccgttagcaagaggaacagatagacaacggacggtgcaaatcagtggtggatgatgcagattggtggtggacagcaaaggggattgaccgtgtggttt

SEQ ID NO: 25628 - DNA, 18125 bp, Oryza sativa
cttttagtgatgcaaatctaaaatcacatgacaatttctccaatggctgaatacaaagaatcccaaacaaggaaggccaaacgcaaattgagtgaaccaggcaggtttatgtcaaactaatttctggggaaataatcccacaatctgccgtgagcttaccaaaaaaggagctaaactaaagaatcttatatacagaatttaaggaacaaatagcttttacatcagctggattttattggcttcaataaaactgtcaagagagatttgaattattttgttgtgatagtaaacacttgaattcacattttcttatcagaatagaatgttaattattccttaatcacatgccaagaatttgatatatgtacactcaccgtgccggaaaccttgtgcatttctcccataatgcaggacagcagtgacgacttgccagagcccactgtcccaaccaccgcagctagctcacccttcctcacctccacctcaatccccttcagcaccatctccatctctggcccctcctctcggccattctccgtaccatggccctgccgggcatcctctgcaccttcaactggcacatcccaagcaaacactccattctgtactttcaccgctgctgcatcaccggcgctactagcaatgcgctccacagccgtgctgtcaatctcggcatcagacaggaacttgttcagcctgccaagtgacacaaacgcttgcatacacatcacgatcgtctgcgggaagttgtgcataggcccctcgagcattgagaagaacgcggtggccgtgaacaccttcccggcatctagctctcctccggtggcgaggtaggtcccaaagaccagcacagtcatggcgagtgggccgctggagaacacgacattgttggcgcacatgaagagtacaatcttggtcaaccaccccatctcagtctgcctgagttctcgcaccttgccaccgaatttctcctcccaggcctgcagcttgatgacacgcatgtggttcagcatctcggtgatggccttgatgcggctgtcgcggacgccgaggaacttgagctggtaggccaagttgagcttgttggcgaacgcggtgatcacggtgaccgcggtgatcacggcaagcgtcatgagcacggaggggccgaggtaggcgtacagcaggacaagcgccaccacgatctgcagcggcatcagccaaaggccgtggagaccgtgcatggcgtaggacaccgtcccggcgtccacctgcatgtagttgacgatggcgcccgaccgtgcgcgcggcgcgcgccggtggacagacgcagcgacttgcggtacagcgccgtgagcagcgcgccgcggatgcgcatccccagcagctgcccctggaagttgtagtggtgcgaggccagcgtctgcaccgccttgccggcgacgaggatggcgacaagccggaggccctcccacgtcgtgccgccatggctgatgaagtcgacgaaatggttgatgagcgacgggccaacgtacatggcggcgaggcgcacaaggccgagcgccgccgtcaataggacgcgcggccagaaggacagccacagcgcgacgcccaccgggtagcgcgacccctgcgccggccagttggacacgaaccgagcgtacgacgcctcggcgcggtgggccggcgacaccggcgggacgtcttcggcggcgagcgagtcgctggcgtaccccttggagaccagtggattgatccaactgaacgtcgcgcgcgacagccacgacgccgcgtcgtacggcgtagagggctccgccgcggtggtgacgtcagcgggttcgcgttcgcacgtacctgcgacctcgccggatgaggcggtgatggctacatacaccagaggcagcgagagggcgaggccggcgaatgcgagggggtcgtcggggaaaagcagcgaatcctcggcccagcggaccgcggccgaagcggagaagagcgcgccgacgagggccgtcacgacccaaaacacgcggagctgcagagggagggcgccaccggccgctcccctccgcgacgcgatggtccacgccgccacggcgtgcgcgacgaagtggacggcgaggaaggcggattcccaaaccctccataccgtgttcggcaggaggaacaacgcgagcgcgaggaggatggccgacgccgccgcgaacacccccgacgccccgagcgcgaccgcgacccggaaaggccttcccgacgcccgaggcttcggcagaagccccttcccgttcgggaccatccccagcgccgccaccgtcgccgcggggaagggcgaggacgacgagggacgcgacgacgaagacgaggtcgacggcgccgaggagcgcgcgctgcgggcagggcgagaggaagaggaaggcgagcaggtcggggaaggaaccacctgacggcggcgagcacgccgtggtggccatccaccccgggaggaggagagccatgtcgactcggtctcagtgtcgctcgccgtcggcgaacatttgggtttgggcggagacgcgcaatggcggcggacggcaagtccggtgcgagtccgggaaaaaaaaaggtttaatctggaggaagatggtccccacttcggccactcctttgactgctagtgctaacaccacaaaagattgtatatcaatctaaaatacagaaataccgtagaatgttatactgtttcaaccgaatagcacgaggtatcatggtaacatgatgacgtgaacatggtatttagatgccagatctaattcttatggggttcatatctagcattgtaggtaccagatctgatacgtatagtatcatattgacgtcagtatgatacctaaatatcagatatgatacgtacggggtatcatgtttggtatcgaatgtattagatctaatacctataggattcatgccgatgtgagttattccgtcgaaacgataataccgttacgtagtctccctttatgaaataagatcttctctttttctctacaatatcggtagttgttaaaatttaaattctaaaattttgattttcaagttttttttatcaaaatttatttttcaacattggtatttaaatcgctaagaatacacacataaatgtgttatccatatttggttaaacgatggggcctaaaacacacgacaaatatatgttgaaacaatttgctatatagctcttataataaagagagaaagaataaatgaagaggagaacttttatattgtgttgttagtgatttaaatgttaatgccaaaaaaactatgataaaaaaccttaaaattaaatttagtagtaagatttaaattttgactacggctggtaaaagcaacgatcaaatgacgggtggttttaaaaacaagtacaccttgaaccaggtaatcttatttttattatatcttgaatcacgctactcttatttttattatatcgaatcacgctgactcttttttttaaggcaaattttgctacaaggcacacaaaatttgtacaatttgctgatatacatcgcaaaaacatctcacggctaaaagacatctctaaaactgataatttgctggaggacaatttcgactcaattggaacaataaattcttcaaaagaatgagaatgactctagggtgaaaagcttttgagctaaggcttgagtgaagatggaatacgatgtatactagtgatctatttggggtgatggctaatttagaattgcataatttctaagtcttcactctatcactatgtttgaagcatgtgttcctaggggcattatcttttttcctaagaatttatctttacaattgagtcgcaagtgtcctctagcaaattattagtcttttaggatggctttcaatcgtgacatgcttttacaatttctataagcaaattacacaaattttaggtgtcctatagcaaaatttgccattttcttaagtatatgaatgatcttaagtatttcggtttttacttggcaatgaactcacatggttgtgtgtacaataaattgaatgtagatagataaaagagcatatagctgtccaaaagagctagaaaagtaaaattatctagtttttttaaaactagtgggttcgccctgcgagttcgctggctttggcttcagtgctcattgcatccctactgggctggccttaaggcccccgttgagcggagtgtctccgacatgtttgctgcgtcacattcttcgtgtcaagagatggtgaatcaactctcttctggactgaccagtggatcgacggtcgcctggtggcctccttggctcaagacctcctcgtcgtcgtgccctcgcgtctccggggttcacgcacaattggttctggcgtcgcaaacaattcctgggttagtgatatccgcggcgccctcattgttctggtcatctcctagttccttcttatttgggatgcagtacttcctacccacctctcgccgggcgtagagccgtagaggacgtcttgtttggcaatggacgagcgaccagcgttactcggtgcactcagcttaccaggcgttcttccttggccagcactcctttgcgtatgccaatctgctctggcacgtgaagggccctgctaaatgcaaattcttcctctggtttggttttcaatagcgctgctggatggctgatcttctccagaagcgtggtatcaatagccactcagcctgccccttttgccctcatgatcttgagacggcgaaccacatcccccttgactgtgtgttcgctcgataggtctggcaccacgtgttgttgcccgctggctaggctgccctctttcccccatggcagctggctttaggactggtggccgtcttctagggcctgcttacttgagcatcttcagccagcttcgactccctagtcctcttggtctcttggtagctgtggaagtaatgaaactctagggtttttgactctacgctctcttcggtctcagtggttctggagtccattctctcggaaggccatctgtgatcttccgctggcattgctatttttgagggcttcttgggagtgtagtgtggctctgcccttctcccactaattagagttgcgtttggccgcctgaatagtttttctttttcatagcttcagtttttgtttttcttccttctcctggataggcatgtctcactggttgcgttgtgtatcaaaaactcttttccttctaatatattcacatgcaatccttttatgtattcgcgaaaaaaatattgatcaaaacaaaacataggtaataaaaagttgtccaaagtgaaactcaaacctcataaaatacttaaaaatataccaatattttagttgtgctaccccactaaatttcacaccaatattttctttgattggacgaaatacacaacaaaatactatattatctttgattggacgaagtactcctcccatcccataagaaaccaacctaataccagatgtaacatatcctagtactacgaatctagatatacatctatctagatttatagtactagaatgtgttgcatccaatcctaaatttgtatttttttttacaaagggagtaccaatgttagatttttttttatatatatacgaagggagcacacgagaatacaacaaaatgtactattcaaattaaagtgttcttttctggactgcttagagcaagtttaatagtatagctaactattgacttcaaattatctatagtcaatttatacaatagttataaacatgtactacataattaatgtctggtcccacctgtcatacacatatgcatcttggaatctgtagcccgttgctttatctcttctcttttatctccttaaaatatgtttatagctggcttatatggagaactagccaagagttattttgagagctattttttagcacaagataatagctctccaataaaatagccctaagttgtttggatcccagggttattttgagagctatttggcctttaatgtaccttcctatagagagagatagagagaaaatacactttttcagtggccccacccgaaatagccccaattagcaccccttgggtgggatagtttttggggtgggttatttccaaatagccctcgaatagctcacccttttgatctttttgggttattttgttggaaatatggtcatgaattggcatattttaatccaaaatgttaagacaataatcatggcataagcagtgtagggtgatctgaacataaccagtagcatactaaagacatcatgcgcatcaccatgaatatcaagaacagaaacatagcgcacaaacatgctagaggcatcatgaatattaggaacaggaacatagcgcacaaacatgctagaggcatcatgaacatcaggaacaggaacaaagcagtagagcgctaatagcaggaacagaagaaggagaaggatataccccgagaaaggccctccgctggattgtgaggcagaattgcctccgttggtgttgttgttcgccgcaccacctccggctcctggcacgccacctccggctccaggtgcgccatctcctccagcagcagcagcggcaccggcggcagctccggctccaggcgcagacatggcgaggacgagcagtcgtgcgggaagcactccccaaaaacctgatcacccgcctacccggtgcagatctcaggcgaagccttccaatctctcgtgcgcgcaagagatcagaagcgaggaagcgagagcagcacaggcgcggaggaggaggaactaacaccggaaaagaagcaagcgattagaacggatcggactcgcggcctccttatttatcaggagagaggcagtcgtgggaacgtggacgcgctgttgcggggcagtcgtgggaacgtgggttagtggctgcaaaagagtagcgacgtgacgcacgccgccagccagccacgccacgcctcgcctcgcccacgccctcggcctcggcccggcccgcgcgcgcgcgtgtggctttccgacccccatctcaaccagtcaacagggagtctctaataacaacctatttaggttgagatattcctcgcttaaatcctgaggtggtattattatccttaacacttattatgggcctttgagatttaataggataagttgggcctagcccaattattctaacaatccccaccaaatttcaaggctcgtaagaaatgttgtgcctgtttgatatatcagggttttggtggagactgttaagttgaacttccacctaggaaatgagctacatcagaccacaactgaacaatggactatgccttgaattgtcagttttgtgtgatcaggtttcactcagaaccttgactagtactgggctaccgttcgcatcccctctgtttgaagcatataagtcaaactccgggcctttcatgagtatctagagatcgcccaacctcacagactgtgactagcagtcgaactcatataggtgtgttccttctaagatgttctgcaggtcaacatctctgcttagaaaagccactcggatcacattaaggcatgagccatcctaccatgcaggaaagaagagaagcacatcatgaaaatgagcccttttcaagggtctcttctctcagtcacacaatagtttgtttcgccatccaaattcacgggatctccgatcacaatggacaggtttccactattgtgcaaccttaggtgggtatcaagcccatttccctcgatgcactgtctatcacgttacatggtagccccttggtaaactgatctgccagatttctagccgtttggacatagtccaatgctatcactccggagtttttctgctttctgacagatttcagtcttctcttgatatgtatagatgacttcatgttgtcctttgagctattccctttaataatcactgtttgactatcacagttcattaggatagttggcactggtttttctaaccattggcaaatccatcaggagttctcgaagtcaatcggccttaactgtcgcagtatctagtgctgtaagttctgcttccattgttgacctcgttaagatggtctgcttgcaagacttttaggaaacagcgccacctccaagtgtgaacacatatccacttgtggcttttatctcatcagcatcaaatatccagtttgagtcactatacccttctagtagttttgaatacccggtatagtaaattccatagctcatagtgccctttagatagcgcattactctttccagagcctgccaatgatcatctcccggatttgagacaaaccggctcagcttgcttacagcaaatgagatgtcaggcatcgttgcactagccaagtacatcaatgaaccaatgatttgagagtatcttagttgatcccttgctattcttcggtttttccttaatagcacgctgggatcataagaagtaggagctggcttgcagtcactatatccaaagcgactcaaaaccttgtccacatagtgggattgcacaagtgtaatcccaccctcatctcctctttgtagtttgatgttaaggataacatcagcctctcccaaatccttcatttcaaaactcttggacagatagtccttgacctcctcaatcacattaaggctggtcccaaagatcaatatgtcatcgacatataagcacaagatcactccttctcccccaccatagcgattgtatacacatttgttagcttcgttcacaacaaagccagcagatgtaagcgtggtgtcaaacttctcatgccattgcttaggtgcttgcttgaggccatacaaggatttcaacagtttacacaccattccctcctgaccttttagtacatacccgtctggttgatccatatagatctcctcctccagcgctccgtttaggaaagctgtcttaacgtccatctgatggacgagaagaccatgagaggctgccagagcaagtagtacttgaattgtggtcaagtgagcaactggtgagtatgtgtcaaagaagtcctcgccttccttttgggtataacccttggtcacaagccttgccttgtacttttcaattgtaccatcaggcctaagctttttcttgaaaacccatttgcatcctacggacttgcacccatatggacgctcaacgacttcccaagtaccattagatataatcgagtccatttcactgcgtactgcttccttccaatagttagcgtcaagagatgaatatgcctcttctatggttcttggggtgtcatccatgaggtatacaatgtagtcatctccaaaaggattttgcaaccctttgtctcttactcttgcgagtgtctacaatgttgtcctcctcaggatttttctcagacgtttgatcattgtgttctatcggtgcaaagttctcatggggcatgacagtttcttgactagaagtgctaggtgtatgcttcatgggaaattcattctcaaagaatgtagcatctctggactcaagaattgtaccaacatgcatgtcgagtactctagagtttactattaagaatctataacccacactgtgaatagcataaccaatgaacacacaatcaacagtatttggtccaagtttccgctttttggctataggtatatttaccttggccaaacagccccatgttcgtaggtatgagagatttaatttcttcctttcccattcctcgaatggtgttacttccttatgcttcattggaattttattcaggacatgacacgcagtcaaaactgcctcaccccaccattccttggaaagcccagcagagtctaacatggcattcaccatctcagttagagtacggttctttctttcggccaccccatttgattgggggtgaatagggaggcgtcctctcatgaataattccaaactcttcgcaaaaggatgcaaactcattcgaaaaatactccccacctctatcagacctcaaccgtttgattttcctttcaagttggttttctacctcagctttatagattttaaagtagtgcaatgcttcatcctttgttttcaatagatacacatagcaaaatctagtgcaatcatctatcagtgtcatgaaatatttctttcttcctttagtcaacacgccgttcatttcgcacgaatcggaatgaacaagttctagaggtgccaaattcctcgcctcagatgccttgtgaggcttgcgaggttgtttcgattgaacacaagtatggcacttggaacctttgaccaaagtgaattttggaattaaactcatgttagctaagcgcgtcatacaaccgaaattcacatgacaaagtcgcgaatgccacacattagactcatcattcttgctaatatggttaacaacattatgattattacacatgtcattcaaagaaaagcggaacaagcctccgatgtcataaccttttccaacaaaagtcccatatttagatacgacacatttattggactcaaacacaagtctaaaaccttctctacacaatagagagccgctaacaagattcttctttattgaagggacatgctgcacgttcttcagctgcacggtctttcccgaagtaaacttcagatcgaccgtaccaacaccatgaacagccgcaagcgacccatttcccatcaacaaggaggaacctctcctgacctgataagaagaaaacagagaaatgtcagcacatacatgaatattagcaccagtgtccacccaccaatcaggtgagtgaaaaacagagagaactgtaggtaatattttaccgtaccccgatgttcctccgccctcgctaatgaccatgttggcagacttcctgtctttgcgctcaggacagtccttggcccaatgcccagacttgccacacacaaagcagtctccctttgcctttcccttgcctttcttcttaaagttggttgcagcattgggtttgacatcaggcttgacatcaggcttgactttcttgttgttgtgggatgcatgagggttcttcttctgtaccttattggcactagaacctccctcaacctttttgccccggacgtcctttgccctcgccttctcctcaacacccaaagagccaatgagatcagaaacactgaactcttgtctcttgtgctttagagaagtggcaaagtccgaccaagaaggtggcaatttggcaataatgccacccaccacaaacttgtccggcaactcacagttgttgttctcaagttccttagccagcatctgaatctcatgagcttgttctactacagaacggtcatcgaccatcttgtagtcatagaactgctccatgacttacagctcactgccggcgtcagaaactccgaacttggcctcaagtgcatcccacatgtccttcccaaaaggcatgtgcatgtacaagtccactatgttgtcagctagtacactgatcaatgctccacggaacaggcaatccgaagcctcgaacttagcctcttcctcaggagaaagaggtggttcacttcgtttgccccgtgaaacatagaagcactgcatcgctgtcaaccacaatagtgcacgtgctttccatctcttatagttagaaccatcaaaagcatgcggtttcagtgcagcagcaaagccaactaccgaaaatgacctatcaggtttttggattgttggaaatatggtcatgaatcagcatattttaatccaaaatgttaagacaataatcatggcataagcagtgtagggtgatctgaacataaccagtagcatactaaagacatcatgcgcatcatcatgaatatcaagaacagaaacatagcgcacaaacatgctagaggcatcatgaatatcaggaacaggaacatagcgcacaaacatgctagaggcatcatgaacatcaggaataggaacaaagcagtagagcgctaacagcaggaacagaagaaggagaaggatataccccgagaaaggcgctccgctggattgtgaggcagaattgcctctgttggtgttgttgttcgccgcaccacctccggctcctggcgcgccacctccggctccaggtgcgccatctcctccagcagcagcagcggcgccggcggcagctccggctccaggcgcagacatggcgaggacgagcagtcgtgcgggaagcactccccaaaaacctgatcacccgcctacccggtgcaggtctcaggcgaagccttccaatctctcgtgcgcgcaaagagatcagatctctcgtgtgcgcaagagatcagaagcgaggaagcgagagcagcacaggcgcggaggaggaggaactaacaccgggaaagaagcaagcgattagaacggatcggactcgcggcctccttatctatcaggagagaggcagttgtgggaacgtggacgcgctgttgcggcgcgcctccttatctatcaggagagaggcagtcgtgggaacgtggacgcgctgttgcggcgcagtcgtgggaacgtgggttagtggctgcgaaagagtagcgacgtgacgcacgcacggcagctagccacgcctcgccctcgccctcgccccggcgcgctcgcgcgtgtggctttccgacccccacctcaaccagtcaacagggagactccaataactccctatttaggttgagatattcctcgcttaaatcctgaggtggtattattattcttaacacttattatgggcctttgagatttaataggataagtagggcctagcccaattattctaacatatttagcctatttaagatagggctaaaaaatatctctcggatccaaaacgggccatggtctgctattgtactgctctttatccgtttgtagatcacccatttatcctctttgtgcggccggcatggcactaaaaatgccatcggaatcaacgaaccattgaagcaataggttaatcaatgaccaattagtcaaacaaaattaatatcatcttgaaatattcaaatgttagattctctgacatcgtaaaaaagtattaaaatgtcagattcttctatctgacgctggctaatagaatcaatttgtcatttcatttgtactgacggccccaggttgcacaaaattgattgccaaaccctctagcaaaatgattactacgatgaaatgaagacgtatgctttgtttaactatgtgaatggtgtttgcttccttcgtttggaagaatttggagaagcagacaagaaatggctgacgatttcaagaaggcggcaacaagaaaaaaagaaactgaactgaaagagaaaaagacaaacgcgacctggatagctgtcctttgagtcgcgaagagaactagccgctctattttgtatgtcgggatgaagagttctccacgctcatcaccgaacacagcggtcacatttcacatgaactaacctaaattttgtatagcgggaacttggaagcagctttcaagttaggcctggtttagtttccaacttttttttcaaacttttaactttttcatcacatcaaaacttttctacactcacaaactttcaacttttccatcatatcgttccaatttcaatcaaacttttaattttagcgtgaactaaacacatccttaaaaaaattagcgtcaaactaaagaagcccaaatacaacaaaaacagtctatctactcaagtcaagtcttctcataacaactgcacctctgtaagccttgacaaaccagaggcaagaaccaatccatgcccccttgtcctaacccctctctctcgttttccgcgcgcacgcttttcaaactgctaaacggtatatttttttttcaaaaagtttctatacgaaagttgcttaaaaaataatcaaaataatctatttttttaaaaaaacttagctaatacttaattattacgcgctaatagaccgctccgttttcggtgtggagggtttcgggaaccaggtacagcgaacacacccgtcttcgagtcaaagtctacctactaatacaccgacgacatgcaacaactatatccatgtcatcacgtaaccaatgatacaacattttcaaactatcaacgtcaggaagtttacaatggaaaagaactcagcaaattgcgtggaaacggagccaaatagttactgacgtctcagtaaatcaacaaagctaaccaataaactagattaatggcaactgcatagcttttgtaagcatgaaaaaaactttggaaaaacgttgacatccttggtattctagtaattctctccaattctataatccttggcgttttagacattgacacggtctccaaaatatatctttgactatatttttctattataatatatgcaataaattactaatttttaattttattatagtactttgtaaaagaaatctatatatgttgttctaatacctttaaactaaatagttttaaagttattgataattaaagttataaaagtttgattacaaccttgtttaaaaggtcaaaaattatagaaccggatgaagtattatatttagggttaagtccgatttacccctctaaactcttgcgaaagtacgctttacccccctaaactatgataccatacataatcccccatttaactattcaatccgcacacttaaccccccgcgaccaatttcggctggttttacgtctttgatccgacgtggcacacccatgtggcaaatgatgtggcagttacataaaaatacccctcccctcctcttctctttctccctctttctctcccccatgaaaaattccccaccgaacccctatccctagcggcgcggagggagctgggcggcgcggcggcgtggtgaagaacgacacgggggcgtggtgaagggcgacgcaggcgagggtgtgtggcgcgagcggcgcggcgctgcgcaggcacgacacttgcacggcagcgcgagacacgcgcggcggcgcggcacaagcacagcggcgaggtacatgtgtagtggcacgacgctcacacggcggcgaaacgcaagcatgggacggcgcacaggtatgccacggagctcaagcatgtcactgatgcaaaggtgcagacggagaccaatcttgctaggcacaaagaacagacggaagcaatggggaagcaaaaggatgctggaaaagctaatctagttgctaaaattaatatcttagagaaggaaagatgtatgcattagtagcatgtgtatttataattctggggttgtatgttaagctgtgatctttctgtatatgcagtatactaacatgtaatcactgcatgcatgtaacatgtttctcaatttgtgatggtcatgtgtttgtgcaataaaggagctttgtcatcagagtcacaaatctgactacaaccaaaaatctatgtatgtcattaggctcactgctgtgcttgtgcgcgtgtgccttgccgctgtgcttgtgcctcgcctcgcgcgtgtcgtgcctgcgcagcgccgcgccgttcgcgccacacagcttcacctgcgtcgctcttcaccacgcccccacgccgcccttcaccatgccgccgtgccgcccagctccacctgcgccgctagggttaggggtttgggtggggaatttttcacggggcagagggagaaagagaggggagaggtaactgccacatcatttgccacatgagtgtgccacggcagatcaaagaggtaaaaccagccgaaattggccacgagggggttaattgtccggattgaatagttcaagggggtattatgtctggtatcgtagtttagagaggtaaagcatactttcgcaagagtttaggggggtaaatcagacttaacccttatatttatctggtgcaggagaaagttgagttgaaatggaatcgagattagttatcccggttcaattgccaggcatgcaacttctgttgtctttccatgaatgtgtttttttaaatagttttaaagaataacacatgttaggaaaagagaaaatccctcgtatatccctgaaattttagctaatctcctctgtgcccctgaattttgcttaattccgtataccctctaaaatttgattttgatatcttccatgtcccttctgtcagctgccgtctaatttctatatgaccattttactctttggatgaacatagaaatttatgagttacataattgaaaatgtaaatgtttgtcgcatgagactattatagttatgagtttgctgtgcgatacattatttatgacaatttatttttagataatgaaatgaaacatatgcatttattttttaaaaaagtcataaaaattgaggagtattcgtacaaacataggactaccaacgtccacggtatttttttatgaatgctcctgataaaaaaaaatccattgccctattaaagattcaaataaaaatttaatttattacattttttattttcaaaatttatgtcaaaattttccgcactaattatttaatctcattaattttacaaaatgcacatattgtgcactcaaacaaaaattttaattgttcttcaagcttatattcaaacctaaatcatcaagggcataaaagacatttgcaaccagacttaacagtgaaacaaaggaaaatgtaatggcaagggtatggaagggatcaagttgaaatttcaggggtatagaagggatcgagaaaattttaggggtatgaaaggaattgagtgagttttcgagtgtatacagggaatttactcataggaaaaacacatgaatagaaaaaatataggaattgaagttgcaaatttctttaatcgtataggagtgaaaagcataggaaatatgaagatggagccctttgacagcatcaccggaaactaacaaatcaaaggaaagttttcaacatgttgtgcttcttgcttatttttctatgagattgaaccatttgaatgtagtcctaggaaaaatttcgtatctttcctatgaatcaaagggttccatagaaaaaattctttaggaaattaaatcctccaaattttctaccgcaatccttcatttcgggccctaaaaggcaggaaattcagataaatagttttttttttatcatgacatcacctaggatttaattaggctccacccatacgttgtgcttcccattttaagtattacctgtctacctcggagccaccggttctcatggctgcttccttccataggttaaaattaagtaaaaatgctagcatctctgcatcaacatgacatcccccttaagaaaagaggacgttcagtgctactacactgtcatcaccttcaggaaaaacaaacaaaccagttttggatagtgaagggttttggacagcctccatcttcaagtttacaactaccatggctttaggtcacatattgaacaattgaaagattgcttcgagctaaaattttcatatagtacttagacaccttaaagtacaaaaccaatttagtcagttcagtacaactcaggatggagcatctttgagggagagaagcataacttttgttgctacatatatgtgttagttaacatggatgccaatagggatggcaatttccccggtggggacggggatccagcggatacccacccctatggggccggggacgaggctgttttttgccctgcgggtgagtcgggtcggggccccagtcgttaccgggggtgggggcgggtgtgaaaattaacccgtgggtgaccctatggagctccgaaagtgtatatcccattttatggcccattcaaaataaagactaataggcccaatttggtgtcacacaccaatccggcaccgccgtacaacagcacctgactggagcgcgtcgtaggagaaacggtgcgaaccgcttcctacgagaccgcgataacggtaccagtcctaggacatagagctggtacccacggtgacaataatgaagcattgcaatccttaatttaaatagaggacttatttaccttaacttaggttgcagctcagaatagcccgagaatgcaatcgatgacgcggacgaggaaacaccaacaacagcagcagcagtgaaaccaacggactaacacccaacaccacatgcgacggctaggaaccaggatgaaaccctaatcttcacttcactttatcttcagcttcaggtcggaggaactatatatatttatatagagcaagggtgagtacttccatactcagcaagtcacgggaatttaggtgttta

SEQ ID NO: 25629 - DNA, 4096 bp, Oryza sativa
aattctttaaattttctgtcgatgtttcgccactgcgaaccatcggcggggtgtctcagcatcccgtcctattgaccctctttagcgtgccatcgcaacattctagcattccccttgttcctgaacaaacgccttagccgtggtattatagggaaataccacatcaccttagcatgaattctcttctttgttagctgcccgtcaacttctcctggatcgtcccgtctaatcttgtatcgtagtgctttgcaaacagggcatgcttctaggttctcatactcctcaccgtggtataggatacaatcgttcggacatgcgtgaatcttatgaacttccagtcctaacgggcagactatcttcttagcctcgtacgttgtctcgggcaatttgtttccccccggaagaatgttcttgacgagtttcaataaatcgccaaatgccttgtcactaaccccagtggtatccaactttttgtgcccctgctcgcaacctgggtacaacgaagttctgtggtcctccaacatcttgtccaatttatgggcctccttttcactttcgcaatcatccctggcatcctgcaacatctgactaagatcatccgcaacgtcgttaccatcagcagctatttcctcctcgcccgtttgatttccttcaaatccaacatactgagcaaagtccggaatattgtcgtcttcacttcatcttcttccatttcaacaccttgctctccgtgggatgtccaacaattatagcttggcatgaaccccgactcaaacaagtagaaatgaatagtcctggatgcagaatactccttctgattcttacacttattgcatggacaacaaataaaacccctttgcctgttagcttcggccactctcaaaaaatactgcacgccgtcgataaactctttggaccgccggtcagcgtacatccattgccgatccatctacatgagtcaaaaaaaaccgtacacaaataattattcttacaataatgacagtcatacaataattataagatatctttattcatacaaaaatcataaaatattacaccaaataattattaaaaactatttgtaaagtgttaaactaaatttaatgtgttttacttcttttaattttcattttagtttggtttctattatttaagattaactttcactagagttttccttctcaactattttataaaaccttgtttagcaaatgaactaaatttctatatattctttcttccccacacacattttctctctcatcaacttacaactaaattttggagacaaaaaaaagtgtgcaaaacataggtgcaaatgtagtatgacaaaaaaaaaaacattggaggatgaagttgcaaaccttttaggcacctccgatttctctgtaatcaccaaaataaatttaatagaaattttggcatgacctcccctcttttttgaagaaattttaaagcttgctcgggcagctggaggaggaagaagacatatatataggggtgggactttagtcccggttattagcaccaaccggggctaaagatcaccgggatctttagtcccggttggtataaagttacgactttagtcccggttggtaatgattccgggggggcctgacatgacctgacagcattcgaaccgggactaaagatcatctttagtcccggttggtaacacaaaccgggactaaagatcaaatatgcccgttacccttttgaaccgggactaaaaatcatctttagccccggtttttattgcatccgggactattgtggaaatcggccgaccgacgaaagatggtttctccaccagtgaggcttcatgcccttgcacggagcctatcattgcttttggacatcctcgacatggattaacgattgactctgtacttaaaatcagcaattcaatgtctctgaatccatgacacattgcggaggagcgcagactggaactaatcaagcaaaaaagatgtacttgaaaaatacacatatgatctagtctaatgaagcaacataccttctagtttccagttctcctccaacccctctcctttaaagtgattccaattttcactgtaaacaggttaatatggatttgcaatctctaatttaccccctatggaaaatatgaagagaaagattttgaagaagagaatcaccttgggttaatgcacatgttgagttcaaccagcccacgtgtggtgatacgttgtggtcaacagagattgcaggcgacatcaacaaccggattattaacatgactaaaaagctaagggtgtgtttgaggagaaggggattgaggagattgggaagattgggaagatacgcaaaacgaggtgagccattagcatatgattagttgagtattaattattttaaattttaaaaatggattaatatgattttttaaagcaactttcctatagaatttttttgcaaaaaacgcaccgtttagtagtttgggaagcgtgcgcgtggaaaacgaggtgttttctctcttaatctcccagatcaaccaggaacgaacgaagcctaagtagcctcctcgtgattgagagaacattgcagattttgcagctgatttgaaatcaaattcggcactgtaaattccacaagttagcagggctcctagatgatctaccactaatggtgtaaagagttatccatatgtgagaattgttcataatgcagtataatcattaaactgaaattgattcacaataaatctgaaagcaagttcttctccataatacttgtcatgattaccttgaccaacggttgaaattgattcataattaccttgacctctcatgagataacttccatcgccatcactgtatattatagccgcttgtcacattagcacattattacgggcctgcagcgacggccccggggcggctcgtcgacggcgtgcggcacggtcgacggctagcagcgccggcttcctccccgctcaccgcgtccccagactggccggtcggcctgcgcggctgcaccgtgcccgccacccgtcgccgccgtgcccgtctcgccatcgccccgccgccccagtcagctcctccacgcagtcacacgcgcgccgcccgcccggctcggcagccgccagcggcacgcgccctgcgcggccagccgaccacgccgcggcaccagcgatccctccaaaagcaggcaggctgccaggctccagtccaccggccggccacacgccagcgatgccgcccagtcgtcggagtccgacgaaagtaactcttccctagttcccttcatcccctgtcctgcgcccttgctgcccgtagatgtcatgtctgatgttgctcctgctaggtatgaggccatatgctctggttcttttttaccgtgctctcagtaagcgccgccgcctcttcttctccccccgttagatgaccacgctattagaggattgatgaagtattgggtttagcagtgaatttaggtttctttgaagtttcgtacatactgcaagatgggcagatttgggtgttttgatatccagatcttgctttacacatgtgtttgcagttaaattgtttcttttcttgatttcttgaaggggcagctttggatgttttgatgttcaaagatgtactcgcctttgtgtttgcttttctttgttcggtttagcagcgaagccagaagaagctgaagtgagggagcaaagagggccttaggtgataaatcaagagacagtagaatgtatataatttagtaactgcaaatctttgtccagagtaaaaatattgatacacttgacatatagataaaatcagattttagatttagccatggacttggaaattattatctgaaccctagcacagatttaatttatcatgaagcataagaagtataacaactctgtcaattaggctagttcaattatagatcaattatagttcatataggagtccatgagtagcatatttttaataaagagatcaatttgaataattaaggagtctatgaacagaaacatagacctttataataaaccatctggagcaaatggttagggcatgacatgggggaccatgtagcagtatgggtaatagttaagataaggggcaactgt

SEQ ID NO: 25630 - DNA, 11467 bp, Oryza sativa
gtttgtgattttaccctcactttttcaaaacgaaactttgatttgcccctactctgttaaaaccacctaacggtgtcaatgaaactaaaaaagacaagtataaccctgtacacttgcccctacttttctaataggatttgtgtattttctaaaaaaatatgatcgcacttggacaaattttgaaagaacttcgatatcattgataggatttcacagaactttcaccaggtgcgaaaatttaccaaaaagatccatcgcattcaccagtaaaaaatcaccaaacaaacaagctcctcataaagtagcacaagatcggaaaaagaaaaagaaaaataagaggcggctgcagcacgaccggagtcgccgccttctcgtgcgatgccgctgctgcgggctcgcacgtgccgccgaagctgcctcctgcttgcggctgccgtcggagccgccgcctattcactcgctccgccgaagccgcggcttgctcactccgccaacaccccctactcgctttgctgatgtgggcatctgctgctgctcgctgggcatcacagccttgcccagccgccggcctatctcgcctgtgcacagccgccgacggtgccactagggttaggctaatcaagtaatcagaatggggatcgggtggtgggatgaaaaaggcaatgcagggtgttgttctttgcactggggtataatggtccattgtttttctcttagtaatttcatctatattttttacactcttattttgggtccaccaaacggtcatccaatataggggcaaacggcagcttcgttcgaaaaaaatgagggcaaaattacaaacaacagaaaagaggggtaaaattacaattagatatgaaagtaggggtaagaacacaattgccccttaagaggaatgaataggacgcatagaccttgttaccgattatttagaaatcagtttcatctttttatatttaaggtcaggcttcataggtgataattaaattagttatagtacagatcttctcatgatattcaaagtgtaggatcatgtaattttcagcatcattcaataaaacttatcctaggttctaattatgttactgtgccagaaatttttcagaatttatcctaggatctaattagcagttattcccagaacttttacattttagaatataatgaactgatttcagtatctgattcataaagttagtgtggtctgagttggccctcccaagtttcttttaagctgtttgtctcacaggtgtgcctttgtatttgtctagtgtgtactagaataatataagttggaccgggagcaacaaaatctctgcttttgacagtgtagcaatacttatgcctctaatagtatttctcaaaaacattgcaatcaaaagctggcattgtcttgtttcacaaaaaaatgttcatcttttggaagtgttataatttttcaattcaaatatgtttgttaagttgagacaactgagctggtatcattgagtagactggtagattatgcaaccatgccaaacttggcatatcttcttttttttatcatggtacagtcggcatatcatttaacattttctcttgtggtgatctagcagaacatagggttttatcttgagaaattctagatttctatctataagttcaataatctttaccacaagtatggattgaactagatgcaaattaattaagctgtggttgcaaattgaattatgtgagtgcatactatcatttagcaatgtcaacagattaaattttgagatatttggatgtagtattgaagtatcaattagtaatatagacaggttggattttcagatgattatgtggcatatcatgcattaacgaaaaaactattactcagcagtcgtattatgcttaaaattttcactattcaagattatcagtttacactcattactgctttcagcatgtttgcagagctgatacttcgaggctatctatcttctgttgtacagtgaagtttagtagtaattaagaaagtgtaagtcataattttttgaagttctctatttccattagctaaagctagcttcctctgtcgaagtatattgtagctgcacatatatgttaaactgattcatactagtcagctaaggatgcatatcttcctgccatgcatgtctgtttcatggcaaaagatatgcaagaagtaaatgagaagaagcagggcacgaccttgtcctcccactagtagacgaatttggctggatttggaatgtggttggatttggctgttaactgggttgtaagttttgtgttgtattggatgtttgtcgggttgtgttggatgctaattgtgctttgacctttgtgctatatgggttgttattgtgtttcattgttggccctctatgggcttagccgatactaatgtaaatgaatacaacatgacgggcagaaaatggtgtggtataatatttgggcctatatgggcttttgcaatggacatggcccatttattatttgatattaaagcaaatggatataatagaattgtgttgacaatatgctacaacatggatggactaggctaaaatctagtcgggtttgccattgggctaaacccataaacaaggtgctaaatacatgaattttaatgggtcatcagctattttatgacgttttttaggctagataatgaaaaatatgagcgtcacaaagctatgacgacggaaggattgtcactagattaatagaaaaaaatctttcgtcatagaacgctattagagatgcatgatatgtcatagcctgaattttcgtttcaggatttataaattatttaataaattattaatagaatttatattaaatgttcattaatttacaagtgaagttaaatgtgggaaataaaatttcctaaatataaagcatggttggatttaatttttgttaaattctccatgattaattatactctctggaattttctcggatttttcagagctcaattcctaattttaataatataaagaatatttcagtaattattcatattaaattaatcatttaatgagctggtttcaattttgttaaatacttagagtgtccaagtatgttcaagatttttcttggaattatttgagtattgaaagtatttttaacaattgaaagatcatctcattggttaatttatttggaaaagcaataaaatcttccttcctagtcttgggccgaattcagcccattctctcccttcctctcagcccggccgaaagtctgtttgtggtccctgccgctacagtactccatcttcaagctccagccgtctcctgcctgtgcacgctgtagcagagcccgatgccgccgatccccttccaaaattcggcctactcgttgctcctttttccaaattagtttcgggaatggaatcctctcaatctcctcttccttttccccaggaaatcccaaaagtttctatggaaatcctttccaatttcgcggttcaatttttcctttttccggcgagaaccctagactttcccgagtttttcccgtcgatgtgggcttgatcccgagctcccgtgcctcgtcgtcctcaagtcccgtcctccgccgtcgccggaaacgctctccccgcgctcgccttctctctccacctccggccgccgctccagccgcagtgcgccgtcgcctcggccgtcgccagtcagcgccgccacctccctcggctccgcaaagtcgagctctatcccggccgctggttgtttttcgccgaatcccaccggagattggccgtcatcatgaaccggagcgccgccgtcgccgccgtgcctccagccgagccgttcgtcgacgtccgtcgtcgccttcggtcgccgtcgtctccattggattcgcagctgcgaggagaagcccgtccgccatctgtcatccgccgaagatcgccggaaagccatcgccgccgtggacccgaacctcgccgccgtcccaatctcgtcgccggccatctccttcgccgttcatcgctgtttaagtgttggtaagcatcgccattgcctcctctttctcccggtgccctccatttgcattattgtgccgtggttcgccggcaaccgccgctcctatgccgttcccagtgtagtttatccctagggtcttaatcccatctaatctaatcttgtatggccctagcgtcgtcatcgtctccgtgtgttgccgccggttcaccgccgtcatctatctctctccgatcgctttggttcggtgggacgtctatccgtgtctccttggtttagatttcaacccatcggccgcgcttgccaagccgctttgtcgcagccgtagccgtgcccgttgcgttgttgttcgccgcactgctgccctagcctgtgcaccgtcgctactggttgtgccgctgttgcttgccgtcaccgctgcgctagtcgcctagctgccattgtgccgctccctgccacagtcgtgttgctgctgctgtgcgttaccgcttgccgctagctgctgtttggccgctgctcgtgtgtgccaagttgttgccgttctgctactgcaaccaccgagccactggccgctgtgctatgccgtgccgttgctgctgtaccgtgtcgcagccgtgcgtcgcttaaacctagccgccgctatcccgtgttgtcgttgttgtggtttgttcgctgtcgttgcccggtagccgagttgcaaagcctaaggtgcatcccttaattcctaccggcctatcgtttgtcgtaccgggactttatcgtgaaccgtgtctagctcaccggtttagtcgcagccgttattgagtcgttcgctcgttcgttcaaacgaggtgttccccttgcttcgttcgttcgtccgtgttgagtcgtcctttagtttagagccgttcagagctgccggttccgttcgccggtttcggttgatcatttgggtgatcccgtgtcacgtagaattgactcgttaagtcggtatctcgtgaggctcgcttgccagatcaatctaatccgttgaatcttggtcaactctatgtcaagattaatcttagccatccaaaatcaatataaatccgttctctcttttcaatggcatattagttcttttttatcatatggcatctaccaaatataatctaatctttttccggaggttgttttaatcttttatctcagttataaattatttgtaaattgtttaattaatttggaatagtcttttctttaataggtttaattggaattaatcttgtaaaattcataactaattcatatgaagtcggaatgaggccgttcaagtctcataattcatctaaaatcatgatctacatgtttgtttactttatgtgtactatttatttggtttttattagtctttttcctcgttttgcgtgttagcttgtcgtttccgtcgtttcgaaggatcgcgtgtgcgtcggaagtgttcaagaagattaattgaagacccactattgcaaggcaagtcacacagatcccaaacacaattcttttgagcatgttgatcctttatttaaattctctatttttttcaactgtgcatttattttcgaatgtcatcgggtggtgtgaaactgtttctttgttatggccaatttgcattgattatcctatttcttgattacctcggattataatttgactagttggatttatatcttggttcaactagatatattagatataattgcttagtcatgcttagaaatattagcacactattgggataactaatgtttcactattacttaatgatgtacatggtaaaggtagctcacgatggtcaatcgtgattggttaattaattaatgtaccaactaaaacttgataatggtgggttgtgagcatatggttttgatggtcgtgctcatgacaattaaggaccggttcacgagtttcgattgtgaaacattaaccgtgccaaccacaagctagcgtgggtaacagctttatcttttgtatagcatggttcattgcggggcaccagactgagaagtggcggagataagcccacggggtcgctgggaagtccatgccttgtttataagggggtgattatgatccaggaatggtgcgctgtggtggattgtattgtgcgaggggtactgtcacagctcctttccaaggaaccgtggtggtattgaggcgcatggtgacatgttgtggggctgtgtcttgtgggtacagtggtacacctctggccagagtaaaactattcgaatagccgtgtccgcggttatgggcgggtctaacaatgcctttcgtgattagtctcacacttctcaccataataaaagatgctataactggtaataatttgattagctcctggtttggaatggtatattcctggtttggagatagatctgtacagccaggtatggttgttcaggatggttgggcctgtgcagcagggtatgctgttcagtgttgattaatattgatgattaattactctactattttacaattctcaaatgtttgctaaatgctgcttttgcaaatgagccctatattatgccatcctttggtatccttgtgcacttgcatatttgctgtgtggcttgcggattattccatgtactcaccttgcaataatcaatcaaacctcagttgaagagaagtcgcaaaggagaagacgtttggcttctaccccagttgagctgcctgtgggagtggaaccggagcttcgctagaccgtaactccgctgttgttttctcttttcttttgtaagtatgtaacgttattattatgatgaatctgtaaattaaattgtcagtttgtgtacctcggctgattcctggatgaggattttgcacaaattagttcggaaattactagtgaatttctgggcgtgacatgataggtgacgaatgaatttttgtcacgcaagcgtcacatattatgaaacgtgacgaaattttatgtgtttgtgacgtaaatgaagcgtcatctatcataagatttcctgtagtgatcgccgctgctgcctggctggccggcctcccatcccgctgcctcccctccggccggatctggcggagggttcggcgaggccgccgccccacgcccggccgcgccggccggcttcccatcctgctggatctggcggaggggaggccgaggccaccgctgcggccaccgagacaagagagaacgagagagagatacagagagcagaggacagggagatcgacagagatcgggagagatagagagagcgcgagacagaggatcgaggagatcgagagaaaggcatgggacattataaataggtgggagagatttcttgtcacgcccagaaattcgctaacccaattttcaagcagaatgtgtattaaatctctgtccaggaccagtcagagtaaacaaacgacaatttgataggcagatccacgtcttacaaaataacaaaataaaactcacatacgcagcggaaaaacaaaataaactagacttaatcttcactaccaaagtgaagcttcctccgtaaaccacaggcaatcctcgacgtccgaaacaagctcaatcctcgaaaaactcaccatctgaaccaacctttacttctggggggcggggataaagcaagactgagtaccaatcaccgtattcaacaagtcataccaacgggaaggtacgatgcaaggatattcacaaagaaatggctcataggataatttgcagtaaagcaacatttataaatcatattttgaaatagtaaaaacaatatatatggttaaacagtattaaatcatcactgtccaacgctaaatccacgttgcaacaggcccaaccaaaaccacctgaactacaccaattctataagtcaaattattatagtgggactaatcacgttgagctggttcaccacccaataaccgcgggcacaactatttgaatagttttaactctgattagaggtgtacaactttacccacaagacacgattctacacatgttaccatgcctcgaagtatcgccacgataccgcaaagggggaaatcgtgacaaaacccgtcatataactctccctaaccaaacatacccacctcagatttcaccccctccttctcccaagttgggaagtcccctctcgtgcctaggtaaatccagctacagcagagaccaatgtccacgtccgaactgcaccattgcctctacccttgccatggtatgtcagctaggttaagttatactctagattcagcctagagcccacgctggtatgtggtaagtaggagtatatcttccaaggattcccgagaactggtacttaattgtcatgggcacgactttcaaaatcatgcatgtacccacgacccactattaaagtatattttagtttaattaaaccataaccatggtggtacaccaataataaaattcaggattaaattatgatgaatcccattgtaagctaattgatctaagcatggctaagcattcctaaaccaatcatctagtcaattataacccaagttatgatcaatgattttatgaaataggctcaatatgatcaatgatgtacgtatgacttgccttgctcttgagctgactgaaccttggcgaccacttcgaaataaactggatcaccagaactaacagaatctaaatgacaaacaaagcaaacaagaaatacaagcaataaggctactgaaacagcaaaggaaactaattttaatggattctaaacatttcaacaagttcactgcaatttgaatgggctaaaacggagcttggattttttagttatgaattttacaatatgagctacgttattactaataaccaaaaaaacttaatcaattattacatattaatgcccatagataaatagatcaatgtaaataaatctccggtaagcaagcctcacaaattaaccactcaacgagccaatcctttgtgtcacgggaccatccaaacagtcaacggaaccagcggcttagaacgactacggaaaactagacatggtttacggcagaggctcggtacggcaaacaataggccggaagggggttagggatgcacctacaggtttgcgactcggctaccgagctacagcacagtggcaaaccacgatgacgacgcggtagaatggcggcgatggcatctaaagcagcggctagggcacgtctcggctagggtggcaacagggcggcggaggcgcggcacagggcacggcggcggcggctagggcacggccggctagggcagctagggttttaccggggctaaacaactagggtttcaatgatgacactaaaaagaattaacaccctaatcaggagattatggataggttcctcaccaaaccgagacgatcggcaaggaggtgacggtgacgacggtccgatggcaacacgcggagacaacggtgatgttagatcgaaacctaggacggaaaaaaattagatccggatagataatggcgatagccatgacacagagagggaaaacggattaccggcgacgctagggtgatggcggcgacggcgggaggtggtggcactgaccggcggcggcggaacagcagcgggcagcagcgcggcacttgggctaggcggcggcagcggctagctaggactagggacaaaacaaaaacaaaaacgaaaatagggaggggctctaacttatatatgagaggggaaaaactaaaggagatggggccggaggggaggaggccgactcggactcgaacagggggagggcggcgcgcgcgcggggagaggaggaggtggcggccgagtgggaggaggagagggggaggaaaaataggaattgggaaaataggataaggactttcccaatggaaatgacgtgcggtaccgttttaggaaaagaatggaaatggatcccgcgaacgaaaacggacacggctcgtcatgcaaaacgaaaccgcgaacaaagggggcagtgaatagtgaatcgggcacgattcacgaccataggtgagagagaaaaaatattattactttaaaacttgataatttagattaacatcattaactccgatgctctgaatattctgctttaagtcctgttaatgattttagagcaaagagaattaaaaaaaaattctccttgacaattccgattattaaacatatcgttaatttatgttttctcttggttaaccaaagtaatttctataggcaattcattagtgaattagaaattaatgaaaaggggaaactccgggtgtgacatttctaagaaaatttggttgggctttttaatcgggacaaaaaaagatgttcagtcccggttcctattcaaaccgagactaatgtggtttttggccaacccagcaaagatggtttgttccagtagtgtctacctattgtgcaatagtgattagtaaggcataagatgccacgtggttaagctttaatgtctcatcacgttcaccacatgggcagccaaagttttccatgaaatgggagttacagtctacagaaggcagttctcactctgctggaatataattaagttagctagctaaatttgtattatctatgggtacaaccatctctaacttttgcgctgctaattttgtaatttctatgggtacaaccattcatggatgcactaaattagttttacatgaatctaacacacgtatgcttggttttgtagaggaatcggatgtacttgatttctgcaagctgggatgtacttcctccgtgtgcagcaccattaacatttgtaaggctagagaaaacatcaaacaaaattactcctgattttcaaagaaaatgtaaaatgtatttgttttatatacctagctaatgtatagaatcattttttttcagttgctgtcaatgaagaagggaatggtgccgtggatagttgcaacaatgcacgctaccgcttctgctccaaggaagctgaggtcgtcactgttgcttcctaagcaagtgcaagatgcaagcataaggtgcttcacacatcgaagcctatatatgcaaggctatgctatcctcgagagtagccataaataagttggatattatgatgcccaagccagtgtgccgtcaacctcttttgtcttgtgctcttttgtattccaataagccataataatcgcaatctgccatcttgtcttgaggatgtgaccatatcaagagtgacgatatcattggctaataaatatagcatctttgaaattggcccatcaaaaaaccagaaacatacattatttttaacgagccttttatgtatgggactgtttatatatctgttgactgaaaatctcacctccaatctttaaaaattttgactgttggatatgctttgagattcgtgcacagccttaaccctaactttttcctcccgttcctctcctccacgcgcattccgccgccgccgccgccaccgccactggcccaacgcgccgctacctgcctcgccggcgggccgaagggagtcaacggtgccggcgaggccgcccgcggtgcgcccgtcccgtggc

SEQ ID NO: 25631 - DNA, 7031 bp, Oryza sativa
gggttctccggcgccgaagaagaagaggtggtcgctggagttggaagaagagcacgaatcttgaagcacatccagttgccggagtttgggttcaccggcgccggagaagaagaggtggtcgcactagtacaaaaacccctataggtgctggttgggaactggctataggtgccggtttctttgtcggcacctttgtctcaactttctttgtgccggttctaaaacccgcacctatactattaaaaaaataaaaaaaatggcacctacactgccgccggccttctccaccgccgccaccaccacctcgcccggcctccacgccggcacctagccatgcccgcctccgtgccggcggccaccacccaacgtagtgctggaggggggaggtcccccgggagagagggggctggccagatccagccctcctccaccaccgccaccccagggtcagctgccgcgcccgcgcccgcgctggccagccctctccaacgccctgccgcgctggaggaggagagagcccgccccggccggccttctccatcgccgtgccagccgcgcccgcgccggccggccttctccaccgccgcgccggccacacccgtgccggccagccctctccaccgccgcgccggccggccttctccaccgttgcaccgccctggaggaggagagaagagggagggcgtccgggccagaaggccgccgccgctactccgtcgccgctgccgcgcaaagggagagtggcgagagagagaggggggttccaattatgatccgtcacagataaacataaccaacgatgagttaaaataactacccgtcacatatgaatgttacatacgacggattttggttacagtccatcaaggttaactcttaccattggtgggtcttttaatccagagttatcagtgatcacttatctgtgatgaggacctaacgcatcgcaggtaagggtatgagtccgtcacatatgacctgatcgtatagtgtgaggtcatcctctagtgtactgcacaggccggttccctcgtgggctgcttgtgaagtaaaacaatcgtgttaagcatagttttttggtagtgtgtttcatatttatttttcacgcgttgaaataggacaaaaagttgtttctcacattaattttcacataaattgtatttcactgtgattttgatccatatagtggttttcactaacatgaactcattgtgggcctgatcgattgagtgacctgtacaccggtaaaaaagggttaattggatccatgccactacaaatatgtgaaattagaaaaatgccactactattcacgatattatagttgggtgtcactgcaattttagaaaattagatccatgcaactccgtcgcgtttttccatccactctctgttaacaccgtctctccgcggtgccgcttcgcattttcctgtgtatggacgccgccgccgctccactcgatggaggtcaacctcgccgtcgacgacaccatcgcggagatcgaaggcggttgcggccggccggggcccggggtctggacgcagccatcgccatgtgggacgggaagacggggccgatggcggcggcggcgccgctgaccacgcgaagctctagaggtcatcgtcgctgccgatggcgccgccgagcagcctcgtggcggcgacggagtagtaggggaggccgtcctgttcgaatgaatcaatctccctgaccccgtcatgtcgcgcgggctcacgcccttcttgccgaatgccgcgacgatgttgctgttcaccgcagtgttgctcgccgtcatcgagttgcgccggcccggcgacacctcccagctgctcccgcgcaacaggacagagcacattagttacttgcgtgtgcagtgcagagcatcatggccatggagatgcatgtacacttagcgccatggccatgcaggtttatgcatgtatatatggaccggcgtgagcagcgagagcgaggatgtcaggaaggagaaaggagacaacgctggggcaagatgagcctgatagtcgccgccgtgagcgtgagagggccgcgacgctggtgactacaacgcccgtagctggagctcctcgtcatcttcgtcggttcatccgcctcctcgcgtcattgctgcagtgctggaagaggtcgatcggcgggcgaggtgcggcattcggctgccgcaccatgagggcgtcggacagtctggcgacagccgcgcgcgctgtcaaattggcttgcggccgtggccgtgacgaggcggccgcgcgggctagacggcgccgtggagtacgggctcaccgccgtggccgccgagcacggtgtcgattggccggaggtacctcgacgccggcctgctaccgctgccgccgccgccggcggcatgcggcgaggtgagatcgtgctcctcgtcctccacccaaggcgcatcgtcgccgcaccatgacctcccggccggcgtgcacgagccctcagggacggccagtgggcgcccgtgggtggcgtcgacggtgtagacgcagtcgctggcgctgcagtcgacgtcgtctgggaagtactcatcatcacaaaagtcgaggttgccggcgtcggagtaggcgcccgtggaacacaggaaggcaaagccaggagtgacgcagagagacggcgtcaacgtggagggatggaaaacgcgacggagtggcttggatctaatttactaaaattgtagtggcacccaaccgatatcgtgaatagtagtggtatttttctaatttggcatatttgtagtggcatggatccaattaacccgtaaaaatatgcacgacgctgtgtgtgtatttttcatttctaataaagccagggtggtacttatctcgatataaatatttggctgaaaaatatcgctgttttatattctaggattaaaaataaactttgatcaaaatttaacttgtaaaaaacagcgtactatataatgctaaattttctccgagagtaggcctcactacttagaaaaaagatttttacaagcggccaagatcattcttactatacggacggctgttccacctgtagggcctatgaaaattgacgattttcgcagacggtccgcctgggaagattattttcctaggtggattgtaccatgatgcgccacctgggaaaaaaagggagagcacacctgtgataagaaggagccgccaccttgggaaatatgcgccaacttttgatttttcccgccaaatttttaataatatttttttatcaataatgttgcaattaattaattaactaatgcatacacaatattaggaactaacaaacatttaataccgacaaaaatacatatattgcattagtgaaaagtatcgtgaatatgttacaacattttttacattgtcactgtggttttcactaacatgaactcattgtgggcctgatcgattgagtgacctctctatatatatatactcctagggaaatggttctatactcctagggagtacgtactcctgctctcatccaccgttcatcaaaagcagtaccgatcctggatgttagcggatgctattgttgaaacccgttttgattttcggtaaaaacaattcccgtaatactttaattatcccatgtttatcggatcatgaaaactgaccgcatatatcaaatgagtcccagccattcgtctttcaccggcgcgacgacgacggcaaaatctaggtgggcatctccatcgtcggtggctggtttgctgatcgccaccacgagcggcgtacccctcgtcgactctccacgacgtgcaggttcgtttgtttttaacgcgtttgttttcattcggaatttcggatgatcacccgatcgcttgttctgattccgtgccgtctcaggatcatggtcggggcaacgagacatcaggcgctggtgacatcctggcactgcttgtagcagaggcaacgggagttcaccccgatcgcagatcagagcagcccatccaagcggtggagaaattataagtagtgagggcaactccccacaattgtctcgatgatggtaagaacaagactttccagtccgatatttcatttcatattcatcaatggcggcgacgacaacacggcatcgatcgatttgcgaagcctatgcatcacggcatcatggtggcggcgacggcaccgccgcagcaatcgaaggagcagagaggcggctgcaccacagtgcgccgctacgactcctcgctaccgatgtggaagaagaatgatgaagctcctaattaactagttctttgctccatacagatgcatgacaaatacaccattgatggtggccaacaccgggcagtattcgcatagttgcatcgattagctgatgtagatgcagaaaatgtggatttggcagtatgaaaattctgtccaaagcagcttgtgcaggtcaagaattgggtgtactgtacattcatttttcttctttttcagaatggctaaatatgtatgaatccatatactgcctgcattattgcaagttctcttgtgatcagactatgcttcaatttaatctaaatcgaggaaagaactttctattctttaaaatttcatgttcacacctgaaatcagaaaatataatttgtggaagaaattaaatagtatatcagtacactcattgaaagaagagtagtacaaacttgtttagaaaagaactcgggatatactcgttccaagaaattaaatctagtatatactcagttccaggaaaaaaaaagtaagtatatcagtactctttgaaataacagtagtatatactgatactcacctaaaaaaatatactgatactaacataaaaaaaaggtactacttacttaaaaaggtatatactgctctactaatttaaaaagtacataccgttactaattgtagaaaaggtatataccgcttctaacctaaaaaggtatatactgctctactaattcaaaacagtatataccattactaacttaaaaaagtatatacttaacttaaaaaagtacatactgtactacatatatacatactggatattacaataaaaaggcatatactccagcaaacaaaaatctagtacatgctagatcataaaaaaaacaatatatactagatcctgaaaaagaaaaggtatatatatactccttcaaccttggttctggtacgtacataccgaaatgcatggatgaattattgactagatacggatgcacatcagctgatttatgtgccttcgttgcccatgcatgcgggaaaaaatattttgatttttgtttttcgaactagctcatcagttagctattggataatccactagggggagggagtacctgcacctgggtgtacagaagagtcatcatatatatatatatatatatatatatatatatatatatatatatatatatatatatatatagtaaatttgtttggtgctccatggtgcccgggcaccattgttgaaattgagtatatacccaattcaaatgagtatgaaactttttcaattacttaggtattaacattaactactttactaactagtttaaagcaagtttgaactgaatttgaacttgtttttgttagattttgattctaggtatatagcatccatacatataattagttaggtatgtaatcatggattgtgaaataaagttaaatttgagttgttttgttgataagtataggtatgaatcaaattattataactaggtatatactcacaatttgaaaattttgaaaaatttgagtgattttgtgcattagataccatggtgcccgggcaccatggtgccccatatgagtgtcctatatatatatatatatatatatatatatatatatatatatatatatatatatatatataaggaaggtgacaataggcatcgatccacagagagtaaattaacatgagatatgcatgcacatattaattattgatcagataggtagctgcaggccagcacgacacactcgatttgcatatgttctcgtgcagttgacggcactcctgatccaaagcactgtaagttcagacttcagagtatctatcgctagctaccagctccatcgtttctttttaaatatctgtggttcagctagctagaaagaaattaagatcgaagcccaagtaccgtatcgaatctgatataaggggggaaatcagtgatgcaggcgctgcagtcatttcagcgtgtctggtggcatatttgtaggtgtataactgaggtgcacatagtagttgcaagtttcttgcctggccaactatggtaattctccatggcatatctatggaaataagtttaaatgtgttcaaaacaacatgataagtatgatccatatccatgataagcttgtcaagcaaggcaaagtatttggcatatataaaaagataaatagatccatttgagtacaaacaaggtattctaattattccttcattagaattacatgtgcaaattttgtaaaacaacatgtttgccgaaagcttgagtttcaatatattcaaagggagggagggtacttgccttgattatgatccttaatcgggttaactatttactcaacctccttattgatgacatccactagtacagaaaccccctataggtgtcggttgagaaccggcaataggtgccagtttctctgccggcaccaattggttggcaccaatgacactaggttattggtgtcggttatagaactggtacctttgtgctctccccgaatttcttttaaaaaaggaaaccacctccaagccgagccaatgctttctatgtctcacatatcacagaacgtttttgatcctgaagatttaggccccgttcaaacattcgcaaccgaaacagcgtgtcagcttgagatgcttttcgctccatcttatttcaatatgatggagcatctgattgtccacatcgtccctcagattatcgaaattggtcccctatacgtacatcagatgtgggcgtctgagaggtacatgtcagttctgaaagggtatgtcagtaacccaggtcatcagaaggaattga

SEQ ID NO: 25632 - DNA, 7355 bp, Oryza sativa
atctatttttaatattatgaacactagacatgtacatatgctatgtaatatatatatatatatatcgatgtttctaattgtgcttgtataatttatatgtaactttacgattcaaaaatacacaaaaaataatgagtacgtacattttcccaaacggttagcaattgctagggtgactgcacgaatctattatcccgtgcggtcggcctagcacatgctagccgactaggataatagattatcctgtacggtcgacataactgaactgcacgggataatctactatcctgtacggtccacttaacataacgcatgggataatctattatcccaagaggtcctcttaactcgatcgcacgggataatcgattatcccgtgcagtccacgtaacccggccgcacgggataatagagtatcctgtgcggttgggctgcccgcacgcgataatgttgatttttgcaaacacctaggtgcagatggcgctacctccgcatggaaaaatcggttttgactacatggaaaaatcgaatctgtagtagtgtgacaacactctatttgctgcccgctttagaatctccgggtgcataatcggcagtgaaactgctactagcacctaatgttacagtactacaagaaaaatgttttgtaagagacatttttctagtataatagaggcacttttcaaatgcctttacaacaatatagaggcattttaaaacatgtctaataataagtgtcttatggtgaattctctctataaacgaagagagattttataaaatgtctataagattgtagaggcattttctagagacattaaattgtaccacaaccatataaaaccagtccaaaaaagagaatataataatatccttgcttttgtcaagccttgatctcttgggtaaatcattttaatcttcaatgcactaaccaactcacctccatgtcattacttgtatgtttgtttctttagttacacattatcattctaaaaagtatctctacatagtttaaaatgtctcaacaaaatgcctttacatattaaacgcattttatagtgccgaaagaatgcctctataagataagatctaacaaactgagctaaaattgtctctagagtaaaagttttctagataatttttgaagtgtctctacactataaaacttatgatcttagaagcaatttgcaaaactcctctacaaaagtgcctctatacgaggtttttgttgtagtgttaataccacttaagctgtgttcgtacatgtgagtttccatgcgcacgtttcccaaactactaaaaggtgtatatttttgaaaaaaaaaatcttgaaaagttgcttaaaatcatagtttttaaaaaatccattttagctgatacttagctaaacatgtgcaaatgagtcgctccgttaaatgtgcgtgggggaaaagttccctaagtgagctccctgaacgcacatatgataatttgctttccacaaacattaatacacattggcatatgtgaaatcaaagtgtgttttgattattatttcatgataaacaattggcacgagagataattgatactgatatttagagatatatggtgaaatggttttggtgccagtcacaccgggtgtcacgcccggaatttctatccaaaattccaaacgcttacatgtgtgtgaaccctcgtccaggaatcagccgaggcacacaataacaaattgataatagagtacaattattactctaattaataagcgtataaaatgtcattacagaggtagatagttcctctcaaacaataaagatctaagcagcggaaaataaaataaacggcgcagacggctccactccacaggcagcttgaccaaggctactcctaatcctccactccatcagcctcattgtagaactcttcctctgatgaatgattgcaaggtgagtatatgacatactcagcaagccacgtagcaaatatgcaagtgcacaggataacaaaggatggcataatagggtttcatttgcaaaagcagcatttagcaaacatttcagaatttaacaaaacagttaattaatttaacaatattaatccaacgctatacaacataccctgttgtataggcccaaccattctgaacaaccatcccggctgcacagttctatctccaaaccaggaatgtaccattccaaaccaggagctaatcaaattattaccaattatagcatcatttactatggtgagaagtgtgaaactaatcacgaaagacattgttagacccgcccataaccgcgggcacggctattcgaatagttttactctgatcagaggtgtaccactgtacccacaagacacaaccccacatcatgtcaccatgtgcctcaataccaccacggtacctcggaaaagagttgtgacaatacccctcgcataacacaatccactgcagcgcaccttcctggatcataatcacccccttataaacaaggcatggactccccagcgacccccgtgggcttatctccgccacttctcagtctggtgctccgcaatgaaccatgctatacaaaagataaagccgttgcccatgctggcttgtggttggcacggttaatgtttcacaaccgaaactcgtgaaccggtccttaattatcatgagcacgaccatcaaaaccatgtgctcacaacccaccattatcaggttttagttggcacattaattaattaaccaatcacaatcgaccatcatgaactatcattaagccatcatgaaataacagtgagtcattaattatcccaatagtgtgctaatgtttctaagcagggctaagcaattatatctagtatctagttgaaccaatataaataaagctcaactagtcaaattataataacccaaggtatcaaggaataaagtaatcaagaacaaaagggctataacaaagaataggttgattccacccaatgacattcgaaaataaatgcaatagttgaaaagaaacaatagctttaaataggatcaacatgctcaaaggattgtttgggatctgtgtgacttgccttgctggccttggaactcttcaaactcttctccggcgaaaacggactctccggaaacgacggaatctaagcagaaaagagcaaaatcaccaaaacagcacataaacaagcatgaacagtacatgtggatatttttaacatgtagatctcaattttagaaaaatttagagacttgaaccaactaaatcggagctaagatgaattagttatgaatttttaaagattaaaccggattaaaacacttaaatcggttaaaattgaattatgacgcaataatgaattatttttgaaaaggaaaagagggtttattgcgtcagcggctagggttttggtggaccgggcgcacgggcggcggttcacgcgaacggacggccgagatcgatccaatccaaaacggacggccgagatcgaacggtccacgaccggctcacggcggacgaccccgatgacgtcagcggtgacatcaccgacagcggtggcggctcggcggaacggacggctcgggcggcgcacgctcgccggcgaacggcggcgcgaggacgcaaacggagggcaccagcacgtagaggacgacgcggcgaacacaccggtgaccaaaacggcggcggaagaacaacggacgacgacggcgacgaggaggaaacggcggaaaccttcgggttgacgacggcgacgaagctccggcgatctccggcgacggcgaaggggcggacgaggacggcgacgacttggcgaccacgacgacggtcttcccgagcgacggcgacggctggagcgacggcggcgcacggctggagcggcggcggcgacggcaaagctagggcacacggcgctagggcttttccgacgacgagaggcgaaggcgaaagtggcgacgggtagaggagacaccgggggtccttttaaaggggctcggaggcggcggcgaaggcccacggcgacggcaacggcgaaggaaagctcgggaagaacaaatccgagacgaactcgaatccaactctttccaaagcgatttagccaaagattccaaaggagaaaaggtagaggagatcccggagaatgtttcccctctattgattcggccggagaaggaaaggaacggccggatttggaagggaaacggcggcggcgcgaaactagggtttcgggcggcggcggccgaaggtagacgacgactgacaggtgggccccacctgtcagcgacagcgagggcgcgcgcggctgcggcggactgggccggctgggccgaggagagagaagagagattttgggccgactttcagcccaaagccaaaagaggactttttaaaacttttttcaattaaaattatttcttaaatgcaattccatttattaaaaatactttcttagctcaaataaatcccagaaaaatctaggaattatagaattaagcaaagtatttaatgaaattttatctgggcccattttatattggaatttattaattaaaattagattttcttttcaagactttttaaaattatttctaaaaattccatttaaacaacaatttataaattttgaattttcagggtgtgacaaacctaccccccttaaacagaatctcgtcctcgagattcggaagaactggcgaacaattgcggatgagctgacttcaattcatcttctcgttctcaagttgattcttcttccgagtgattactccattggactttataaaaacggataactcgattcctggttcttctctcacttgtttccaagatacggattggtttctcaacataggtcagatcctcttggactcctatctgttcaagattagcttcttcggtaggtacccttaaacacttcttcaattgcgaaacatggaacacattatggactcctgccaaagattgaggtaactccaactgataagcgacttctcctcttctactgacaatcttatagggtcccacaaaacgcggtgccaattttcctttggtacgaaaacgatgaactcctcgaaaaggcgtgacacgaagatacacataatctccttcttcaaaactcaaatccctacggcgattgtcggcataactcttatgacgagattgagccactcgcaatctttcctgaatgattttcaccttttcttctgcttcccttaggatatccgtcccgaaaacctgacgttctcccgtttgatcccacaaaagcggagtgcgacacttccgaccatacagtgcttcgtaaggagccatctgtagactagcttgataactgttgttgtacgaaaattctgcatagggtagattcttatcccaacttccaccgaagtctaaagcacaagctctcaacatgtcttccaaaatctgatttaccctttcggtttgtccgtctgtctgcggatgataagcagtactaaaattcagcttagaacccatctcttcgtgaagtttcttccaaaaatttgaagtaaactgactgcctcgatcagacactatcttcttagggacgccatgcaaacacacaatccttgccatatacaattccgccaatcgacttccagaataggttgtctttaccggaatgaaatgagccactttggtaagtctgtcgactattacccaaatagagtcatggcctgatgacgttctaggtaaaccagtaataaaatccataccaatttcttcccatttccattcaggaatcttcaaaggctgcaacaaaccggcgggtttctgatgttccgccttgactcgctgacaaacatcacatactggtacgtactctgcgatttcacgcttcatacttgcccaccaaaatctttccttgagatcctggtacatcttagtactaccagggtgcatggagtataaagtatcatgagcttctttcagaattgcatctttcaaatctttgttatcggggacacagattctttcacccaaccatacagttccttgctcatcctccaagaaaccgatagcttttcctcttctcatattcttcttgatttcttgaatatcaggatcattaatttgggcttctctaacttgatcaattagagtgggcttcgcttctaaggctgcaacgaaacctctattgacaattcccaaatttaatctttcaaattccttgcataactccaatggcaactgtcgtccttctgtagcattgcaataacctttcctgctaagagcatctgctacaacattagcctttcctgggtgataatgaattcccatgtcataatccttaattaattccaaccatctccgttgtctcatgttcagatccggctgagtaaaaatatactttaaactcttgtgatcggtgtacatctccgtacgagtaccgaaaagataatgacgccaaatcttcaacgcatgaactactgcggctaactcaatatcatgagtagggtagttcttctcatgcggacgtaactgacgagatgcataggcaaccaccttgccatcttgcatcaaaacacaacctaacccaagtttggatgcatcgcaatacacttggaaacccttctttggatcaggtaaaatcaaaataggagctgatattaagcgacttttcaactcttgaaaactctgctcacattcttccgaccacttgtacttcacatctttctgaagcagtcgtgtcatgggcttagcaatcttggaaaaattctctataaacctccggtaatatcctgcgaggcctaggaaactgcgaatctctgaaactgtctttggttgtttccagttggttacggattccacattactaggatcaacggcaactcctccggctgagatgacgtgaccaaggaacttcacttcagacaaccaaaattcacacttgctaaacttagcatacagttgatgctctcgtagcttctccaatgcaaggcaaagatgttcttcatgctcttctttggttcgagagtagataagaatgtcatctataaagaccactacgaacttgtctaggtattccataaacaccttattcatcaagttcatgaagaaagcaggggcattggtaagtccaaaagacataacagtacattcgaacaacccatacctagtggtaaaagctgtcttaggtatatcttcctctttgattctcaactggtgatatcctgatcgaagatctatcttggagaaaacagtggcacctttaagctgatcaaacaaatcatcaattctgggcagcggatacttattcttgatagtcacatcatttagtgcacgataatccacacacattctctgggtatggtctttcttttccacaaaaataaccggagctccccatggtgatgaactcggtctgatgta

SEQ ID NO: 25633 - DNA, 7074 bp, Oryza sativa
cggatttgaaagggaacgccggcagcgcgaaactagggtttcgggcggcgcggccgaaaggtagacgacgactgacaggtgggccccacctgtcagcgacagcgagggcgcgcgcggttgcggcggactgggccggctggcccgaggagagagaagagagattttgggccgactttcggcccaaagccaaaagaggactttttaaaacctttttcaattaaaattatttcttaaatgcaattccatttattaaaaatactttcttagctcaaataaatcccagaaaaatctaggaattatagaattaagcaaagtatttaatgaaattttatctgggcccattttatattggaatttattaattaaaattagattttcttttcaagactttttaaaattatttctaaaaattccatttaaacaacaatttataaattttgaattttcaggtgtgacaccgggcaaatattgtgaacgctgatctgaacgcagccttagatgcatttttagcctaaacaaagcaaatgataatttgctttccacaaacataaatacacattggcatatgtgaaataaaagtgtgttttgattattatttcatgatgaacaattggcacgagagataattggttatgatatttagaaatatatggtgatgaagtggttttggggctgggcagactgggcaaatattgtgaacagatatctgacgatgaacaagtttttctgctggagtggaccggtcagacaggacccttgctaagcgagcgtagctcaactggttaggtttcttttagtggaaccaatccacccgagttcaaatcctagatttgatacgagtggttgcatttatgctaattattctttgtttctcaaaagaaaaaaaaattacaaaggcaccctgtaaacaaacctcaaaataatagtatgactaacctcaatattccgagtaaacaagagtaaagcaagtacattgcatctcaactattagttgatggagacgttggtcagttcaacatcatcttctctattaccacatgtatatatcaaacactaatttcttggtgcacaaaaaagtacactattttgctccgacataatgaaaataatttcctgttgcagtgtgggtgaactgcaatgggacatcaattgtgcagacatatatacacaatgcatgaaaatgtaaaataagtttcggttactgttgtaatgttactttaatcagaacatgtcatccaactttcaaaagaaaacatgatttctaaatgatttggatttttcccatccccaaggcttagtccgaaatagctgctcagaaaatccataactcatgtttatagatcacattagagactacctatatatgtatttttatatatgtatttgttgacaaattttcactactatgaaaaccgtttttgtaaacgggcaaaacgtatttccacagacgatggcatggaagaaaaggtctgcaaaaaacacaattttcgcatgtggacacttgagccggccgcatgcgaaaaggataaatcacgaaaaaaataaaaattccaaaaattgaaaaatatacccaccgccggtccgccgtcgtcctcctgtcctcatcctccagctatcgctgtcgttctcaagccgccgctgacgccggtggatctgggcagggagggcggcggccggcggatccaggcgggggagggtcgccgccggtagatcggggcgggggagggcagccgccggcagatctgggctggggagggccaccgccgtggccttcgcccagcgccgctgccggaatctgcgtcgcagggtggcatcgctaactcctggccgcccgcactgcagcggagcccactcccagcacttcctcatcggccgcgctgcccgccgctcctggccgtgaatgcagcggcggcgcccgctcccggtgccttcttgtcggcctcgccacccgtgatagaagtgagagaggagaggaagagaaaggccttcgttagttgctagacaaaaacttttcaccacgtcacgtcgaatatttggacacatgcatggagtattacatatagacaaaaaaaactaattacacagattacgtgtaaattgcgagacgaatcttttaagcctaattgcgcaatgatttgacattgcggtgctacagtaaacatttgctaatgatcgattaattaggcttcataaatttgtctcgcagtttacgagcagaatgtgtaatttgttttgttattagacaacgtttaatacttcaaacgtgtgtccatatatccgatgtgatacgcaaaaacttttcacccctgaacgaaacagggccaaagagagggagagaagagaatgaaagagagatagaggtgaaggaagagagggtggaaaatatcagaggggagagagaggagaggatgaaaggtgaaaaattttgaagcggtgaggaggaaaatttttttgctagcggacccttaaaagatctgcatgcaaaaataaattttcgtatgcggacctttaagaggcccgcacgcgataataggctcatttttatttgcagccccttaagaggctcgtctaagaaaatagatttttgcatgcgggtctattaagtagccgtatgtgaaaatggaggtcatttttgcagacgccgccaagggtcctcgtacagaaagtttgttgttgtagttgtgaatttctttcaaaaatttgacagatataaattatagtataattgtggtgtaattttattttaacttacatgcaattatatttgcacatgtaactacaatatatcatgtgcaaccggtaaatattttactcatggatatacccaatatataaatacacatgtactacaggtaaatgcagcatattaattaattgaacacggtgtgtgttataatattcatatagaccggcaactaatacttttattttacatcatgaagtgatgaaacacgcggatgggatttagaagtagatgggggtttcagaagtggggtaggatagacagattttagtattgtctataacaaacacacatagatttagtgatcaatggatatgatagtataacatatccagctaataattggctagatatttttattaacttggaagcatctagtaaatatcatgttagtataggtacatatatgtaaacatatcagtagcattagagcccactcgagcacaacagtagcgatccatgagaacatcaggattgggtatttgcaagctaatgcaggtttctgaccaacgtacaacttcttgtcatcaacaaactttataactggacgcggccgaatccttgaaatgtgccacgcactactagaaaaaatatttttcatggcggtactctatttgttttactggcggttatataagaaatctgcttgtgaaattgtaactaagagatggagagtttaggaccgccagtgaaaatgaattgtcgctagcgtttgcttaaagtccgcttgaaaaaatacctatgtttttacaagcgatctcttaaaagacagccagtcaaaatactgattttcgctggcggttactaggcagcatcgtccttaaaaaaaatccccgcacattaaaaaaaatcaccgtgcgcgtttcccttaaaaaaaattgccgcccacctccttatccatccactcgcttctcctcctcctcctttttttctggttcctctccatccaaatccatccactactctcctctcctcctcccaccccaccggcagcggcggctcacgtaggcagcggcggcggccccgacggcagcactcggcggcacggggcggcgggggagggggtggctcggctgcggcacggggtggcggtgctcggctgcagcggtgcaggggagggggtggctcagcagcggcgcggtgacaggcggccggcaaactgcgatggcccacgcctcctctccctccccccccccccccggtctcccaccggccttccttcgctgctggccgccacgacaacgggggaggctggatccaccgccgtgacgatgggggtggccagatccaccaccgcggcgacggggagaccggatcagccgccgcagtgaccgtggacgccgaatcagccgccgcgacaatgggggaggccggcggggagggcagcgacggtgacaggagggtgggtgcggatccggtggcggcgttgctcgggctgtccttcacaaccgtgaaggaggtggatccggcggcggctgccacaatgacaacgatgtctaccgcgccgaggacggcaaccacgataacgatggcaaggctattccaaccccctcccctctacggtttggaataccgtggtgcgggcttcggtaggcggcggccatggtgaggtgtcgcgacggcagccggcggtgcttccggctgtggcggccggcggcaccgattttgaaatttttttatacccaaaattgttttcactggcggtccattttatctagccgcttgcaaaaatggtatttttgctagcggttgtcttagcatatccacttgcgaaactcgattttggctggcgacgagccacccgccagcgaaaacacaatattctcactggactttactcatgtcgcaccataaaaatcttaaatatataaattgttgtttaattagaattattagaaatgaattttaaaagcctagaagagaagatctaattttaaataataaattccaatataaaattgggcttcataaaattttattaaatactttgcttgattctatagttcctagatttttctgggatttatttgagctaaggaagtatttttaataaatggaattgcacttcatgaataatttaaatgaaaaagttttaaaaatctctcttttggctttgggccgaaagtcggcccaaacctctctctctcctccccggcccaggtcagcccgcagccgagcgccgcccgcgcgcgcgcgtcccgctcgctgacaggtggggcccacctgtcagtcttcgtcttcctcgcgcagctgccacgcccgaaccctaaccgagccgcgccgccgtctcgttccaaattcgttcatccctttccttttccggtgaaattaatagaggggaaatgatccccgagatctcctctatcttttcacttttggaatcgtcggctaaatcgtttggaaatcggtggattcgatctcgaatcggattcctctctctctccgaaccctaacctttccatcaccgccgccggccgccgtgggccttcgccgcggccccctagcccctataaaaggacccccggtgtctcctctacccgccggcaccctcgccttcgtctctcgccgccggtagagctctagcgccgtgtagcctagcgccgccgttgccgcagttcgtccagccttgcgccgtcgccgctccggtcgtcgtcgtcgctcgggaaggccgccatcgtgatcgtcaagtcgtcgccgacctcgtccacccctccgtcgtctctgtaggtcgccgaagcaccgccgtcgtcgtcaagccgaaggacgccgccgcttcttcctcgacgccgtcgccgtccgttgatcttccgccgctactttggtcaccggtgagttcgccgtgtcgcccgcaacccgtaggtgccgtccgttcgcgccgccgcgccgtcgttcgccggcgagcatgcgccgtccgagccgtcgccggtgatgacgtcaccgctgacatcatcgacgccatccgccgtagaccggtcgtagaccgtttagatctcggccgtctgatttggatagatcgatcccggccgttcgtttccgtgagccgccgccgtgaaccctagccgctgacgcaataatctctttttccttttcaaaaataattcattattgcgtcataattcaattaaaatccatataaatgatttaatccgatttaatctttgaaaattcataactaatttatcttagctcggattttgttggttcaagtctctaaatttttctaaaattgagatctacatgttaaaaatatccacatgtactgttcatgcttgtttaagtgttgttttggtgattttgttcttttctctttagattccgacgttcccggagagtccgattttacaggggaagattttgaagagtttcaaggccagcaaggcaagtcacacagatcccaaacaaccctttgagcatgttgatcatgtttaaagctattgtttttattcaactactgcatttatttttgaatgtcattgggtggaaataacctattgttttgttatagccctttttgttcttgattaccctattctttgataccttgggttattataacttgactagttgagctttatacattggttcagctagatattagatataattgcacactagtgggataacttatgcttcactattatttaatgatggcttaatgatagctcatgatggttaatcatgattggttaagtaattaatttgccaactaaaacctgataatggtgggttgtgagcatatggttttgatggttgtgctcatgacaattaaggaccggttcacgattttcggttgtgaaacatttaccgtgccatccacaaaccagcgtgggcaacggctttactttctgtatagtatggttcatagtagagcaccagactgtgaagtggcggagataagcccaccggggtcgctggggagtccataccttgtttataagggggtgattatgatccgggaacggtgcactgctttgaattgtgttatgcaggaggtattgtcacaatctctattcgggtacttgttaagtatcgcgacgcatggttgacatgatgttgaggttgtgtcttgtgggtacagtggtacacctctggctagagtttaaactattcgaatagccgtacccgcggttatgggcgggtctaacaatgtctttcgtgattagtttcacacctctcaccgtaataaataatgttgtaattggtaataacttgtttagctcctggtttggaatggtatattcctggtttggagatagaactgtgcagccgggattggttgttcagaatggttgggcctatgcaacacgggtgtgttgtatagtgttgattta

SEQ ID NO: 25634 - DNA, 20789 bp, Oryza sativa
gggaaccgggagagggaatcacgggggtgattttccccctctttaatgcgcgcggggacggcggatgcggcgaaatccgcggcgccgccggcgttagggcacgggcgagcgccggctcggcgcgagaagaaaaacgacaggtgggacccacccgtcagcgagggcggcgggcgggcccgcctgtcagcggcgcgcgcgcgcggaagaccgatggtccgcgggggaagagagagagagggagggactgggccgagccggcccaagaagggagggggggaaaaggacttcttttagggatttttctttttataaaaccttttcaactttgtttatttcttaataattattatttgtgctctgaaaattccactaaaatttgagggctccttttagaccaaggagaatttaacaaaaattctccgggccacatttgaatttttcttgtacgtattttagtgtttgccaatttcttttcgaattttaattaattctattattccttttagagaatgaattttaattttgggatgaatttatcaggacgtgacaaatccaccccccttacaagaatctcgtccccgagattcgaggaggctagcaagaagataggttgggcggtcttctcttcttgtctgacttcttccgctccgtcttctataacaaacttgcctaacaaacttcttcactctggactgcttggctcgatctcctgttgcagatggaatcttctcttcacctgacttggaccagggtgcaccttttggctgactcagactaggttgcggtagttcagtgatgcttccgttccagaacttctcatgattcatatcttcggagtcaacctcagacaagttaccacttcacgtcatgcgtcaacactagcttgtcattactaggatactatgtttgtcatcataagaatatcatgcttgtcattcacttctaacttgccatcaactgtctcatattagctttcctggtctccggtgctaggtacttcggctattcgatgcaagggtcaaccactctaactataagttatgcttcccaagagaaccaatttatcccacttgacatactttgacgtcttctccaatggctttattgctggatttgttattgtctaatcattaccctgtcaaatctgaggcttcgttgttagatgtgcttttaatctgacctctgtagattatcttcgaacatatcacttgattcataactgggaatagccctcacgaacaagcaactcggattcactttctttacattcagtttacttccccttattatcttcaggttgtcctcagttagcattcaacgtattcctttacacctttaaccttgatgtgttctttcccattggatcatctcccaagtcatggcattgcctggtaaccggtgcttgcacttttcactccgtgtagcatctgataccgagttgaagatttcactctttgccttcataaaaacacttttacctaggtcatcttgcttacttaatgacaaggtgactgctgcggggcaattacaatcaggggtcttccttgagcggtgcagagcatgtttctgtttatcaatcacctttcggcctacttctttcatgctggagaacatctttgccaatctcttttatcaatcatcttccggcttatctctaacaggtggtattctttgatgtggattgcggacgcttctggggacgatgaggtcctttggcttgctgcctttccgtgaaaccttgatgtggttcgtcaaagactagactgacgattgttgcctttgatccgaagagacacatctgaaactcttagtccaaacaaatgcctctttggttgatcacttgattttcttcgccatcaatcgctagactatttgattcctaacagattttgggtttacggaaatgagaccctaggtctccctaatcaacaacaaaatgtgcacaactcacagcacttgcactcttaacatggatccttcataagcttatcaaactcattcattatctcatgtttctctgttattacatgattgacggggaacaactataaaacaaaagtatttgaacactgatataagagtattatggttgcttctgactagcgctaggcttatcaggtactgtatttgctccagtgaccacttggcgattggcatgtctgcttccttaacaggtactacagtttgtaacagacaataactttcttacgctcgggttcttcatcttgaacttgatttctttggctgctgtgctggaacatccaaaggtacaatgccgatactggcctctgtcttgtcaactgatggctggggctgaaattgagcattgacaacttgtggtaatgcactcgctggagttggagctgttgcaacgcggtctataggactgcttcgggatgcatggatgacaattcgctgaggagcaagcttctgattgcaaggagttgcgtggactgacgtgctggcagctatgtttctcggtctggggcacttgtcggcgaaatgacccattccttgacaattgaagcaacagatatcttcccggactcggcattttcttttctatcatcaggttggttattaactcgaggttggaacatagttcctttgaaatgagaccctaggtctcctttgacagtaaacacataatcccatatcagcatcttccgaaagaatcctcttagaacttgtttttattacaaatttctcccattttacatgaatacaaggcactgtcttaaacaaaaagggaaggtgcttaacatcggtacattgtatcctcaacaggaatcatccataaacatagcaagctcactgttttatagtcatgaatatatttatttattacatgattgctgcaaactttctattacacaatgataagtagcgaactgaaaaccacaaacggggctgctcattttgattcaggagagatatagctggcattgtcctagtgactgcatccttgattggttctgtgatgatgtggtaggactgcgtattgctatcattcacaggagaaaaattccttctgattgctggttgaagtgggtaacggtcttctgcttggtatcaccctcctgatgttgatttcccttcgctcggcctggagtagttcggggagagaaacaacttcttccatcgacgacaattcattgctgaggctgtcggtgccgagaatggttggtgctgaagggtattattgctatgatttattgcagagtcaggtgcagcaggaggagcattggtgctgtggatgatatcgtcgatattgctgttggagctgactagctgacgagacaatcgtagggtcgttcgttggatttctgcggtcttggtcaacaacacactgagttggcatccctgggcacatggtttgtaccttcgcatagaaaacatgtgaccttgcgggtggacactcccctggtggatggtcttcttcacaatgagggcagagtgtgagacacacgccaccaatgtgtccaatttctccacaacgggggcatgcttttgattccatctcttcctcgccgagatgtgggggggactcatcttcataatccgaggagacttgatctgacccttcactatcagatactctgccaccatggcttaggaggtgctgggtcaactgtcgtgcacctcggaaggtatttcctcattgacgtctaagaatacttatccctgctgtagccattcggtgctggtaatagtcatcttacgtacttcttcttcaattcgcatcggcgcttttctcttctgattcttactcttcttgcctttggcgtgcttaatacgtgaccccacatggtacgaaaggctaagaggagagcaattcccaggattcaatggattctcttcattgggctctctgctttgcacactatgctggaagcttgtcttggtgtgaggaggctggtttagcgatgtcttgcctgctaaaccaaaagaaggggcttctttggcatatacccatggacaactcagggcataatgtccttgttctctacaatcgtgacaaaaggggacattctcttctggcattggaagctcattgacctgtgtggcttatgctcgatcaaacacatactgattttggtcttgacttccaaccaatggtagctgtgaactaagcggcatgcttggaatggaccaagggtgtgccctggttaactctcttgaggccagtggtggattgagttgaaaacttgagttacttgaggcatacccgctgacattctttcctttttctctgttaaacatctgttacagggattgaggtgagagaggaaacaagccaggaaagaatagaccagaactagagacaggaccttaaaggaactaactcttcttgctgatgtgttgtttgtttcacttattctgcaagttgattaagcaatcaacctagcatggttacatcacaacccaccgatgcaaaccacgcgctacacacacaagcaaggaacacacgactaacaacactaccctacagggtggcttaggttctgcgacgggttcccaagatcttcactccttcacagctggcttcacttcttccttcgcttcgctagcggatcctgcagtcttccggagcttcggcaaacaactgacgacatcttcttcttcgcaaagctgaccatctagtactagttgaaatttgaagaaggaagaaaagggaataaacactttgcaaatagcacaggggaaaggaggaaaaagggactttcccaaatagtttcatttttaaaaaatggccttaagttttatccacttggcttatcctacagtcgagaaggctctgataccagcttgtcgcgaccgggaaaattgccttttcccaaacgctagtgtattaatccccggcccaggaaaagccggggtacaccacacaaacatgatataaaagacacatctttattatatcgataatatttacattattacaaaggcacttaaggcctgacaatcaaaaataaacagcagcggactagcgggcctacggctccatcttcacaggcgctcaactggggtataagccaggactccacctaagacttcttctccaaagcttctcttactgaaggggggagaaagatagagcaagaatgagtacaaccacagtactcagcaagccacaccggagatgcataattaatgcaagggagtacaaggggataataatataggggttgagttttgcagtaacagcctttaaaagtcacttagttgcccaaagccattttataaagacgatcctagagctacacagtattattaaacaaggccgtgaaccctcacgaacctgccttaacccaaggcctacgatgattcagaccgaactggcaacccgaccctgggtcccagctcgtcccaagccaacccaggccaaccattccacattttagttgttgagcaaattttaagaatttgaaacactgacttgggtacattgctcggcttgcccataaccgagggcgcggctattcgaatagattatactctgatcagaggtgtacatctttacccacaagacacatcttcctcacgtgtaaccacgtgccacataccaccacggtatacggacggaagacgtgacatagtttccaacccatcctagccatagacaagagtaccgacccaatcctgcctacggccggaacccccgggacaggcaggcaggactgagccccaagcagcagggcaccaaccctctgccatgacatctcgactaccgggccgcagctcgtgtagccttcatttgccctggagaatgtccatcgacccccgacttcatccatctccaatccgtgtacttttgtttataaccagactgagccacaaactaagccttacccactagacatgtggaagtacggtagtgctttgcaacagaggcccgagcttaatccttatagtacccgaggtacgactagcaaaacccaaccacgcacctcgagcccagcctaaaaccaatttggggattttgaatagaaggagcggtgtgaagccaattccacaataaccaaaccattccatagtgtccaggtgatatgaaaattcccaaagtctaaagttataaaattacctaatgttgcctaattaaattgcgaagcatctacctaaaattaaactagtggtgccatgagtagagtgtccactagttggggttttgtttactctagggtgaacaaggaaataataacaatagcaataataataaggtcataacaaaggtaaataggcatggctaaataaaacagtgataacgcgggaatttaaataaagcgataatgcattaatttaaattaaaaataattttgtaaactgggattcaatatgctcaaggatgatgtgacttgccttgctcgctttcccaaatgccggcttcaacttccacgaagagcggatcttccgaagctgcagcgtctacacgaccgacggaaaagaaaaggcttttacgctaataaactccacataacagcagaaacaaagcacaaaaatgggttcttgacttcttaaggaaaaattagagacttgaacggtccaattccgagttcaaatggccaagttatggccatttgaagtttatatgctctttaaatggatatttacgaatttcttcatttaaattttaattaaaaacccatttattgcgtcagccgagggagagggcgcgcggaccgggtccacgggagtggggcccacgcgtcagcctctcggtccacggtggaccgggtgcacgcggctggcggcggccggcgccgtgggtcccacgcgtcagccgcacccgcgggcgcgggcggctgacggccgggccccacctggcagccgcgggaggcggccgaaggcggcctcgccggctcgaccgacgggagacgcgcgcccgcgccccgatggtcaccgccggcgaccaccggcgcggcggagcggcgcccgagagagcggagaggagagggaagcgagagggacggtccacggctcaccccgggacaacgaggacggcggaaacgacggccggagcggaggaacgcggcggcgcggttcgggacgacgaaggcgacggagctccggcggtcggcgggcgaagcgaaggggcggacggggtcggcgacaacgcggcgaagccgatggaggtggcgccgagtcgggaggaagaccggagcgacgacggcggctaaccgaaggtcggcggcgacggcggagagagaggagaacgtcgcgagcacgaatccgaaggcgagagcgagcggcaagcggcggaaacggaagaacggagctcggggaacgattatatagcgccgagagggggagagcgcggccggagagggaggaaacgggcgcggagatctcggccgccattgattgcgccggcgaggattgcgggcgcgattcgaacgaatccgagggagagagagggaaaagagggggaaacgggagagggaatcacgggggtgattttccccctctttaatgcgcgcggggacggcgggatgcggcgaaatccgcggcggcggcggcgctagggcacgggcgagcggcggcgcggcgcgaggaggaagacgacaggtgggacccacccgtcagcgagggcggcgggcgggcccgcctgtcagcggcgcgcgcgcgcgggaggccgatgggccgcgggggaagagagagagagggagggactgggccgagccggcccaagaagggagggggggaaaaggacttcttttagggatttttctttttataaaaccttttcaactttgtttatttcttaataattattatttgtgctctgaaaattccactaaaatttgagggctccttttagaccaaggagaatttaacaaaaattctccgggccacatttgaatttttcttgtacgtattttagtgtttgccaatttcttttcgaattttaattaattctattattccttttagagaatgaattttaattttgggatgaatttatcaggacgtgacaccaaagtgctcaatcaaacctaatcttcaagccatctccaaaacactcctacactctcatctaatttcccaatctcacaagataggctctagatttgagtggaggaagcaaaggaagcttgggagtagctagaaaaccctagaacatgaaagaactgaagtggaatggaaaaagggtgacctggggatgaaatccatatatataaccgctaggtgacgtcatctagccgttactcacatgtttgaactggaaacctgccatgaggttccgggcaaaagtgccaggaacttccgggcagcacttaggaaaatttttgcaattaaacggcgcccggaagtttcggccagaacctccgggtagccctctctgtcctggggagaaaatcatttttcaaaaatgattccaaaaatcttttgactcatggatatgactaagagcactttgtataccatagaaccacacttgaaacccctcttaatagtacggtttttcctaaactcaatttcgaaagtgaaaaacctagtctaatcacctacggtgattttcgcacttaggaacattcgaattggggggtctccttgcattcttaaccatcacaacttgctttgggactaaactcctgtgaataaacttgataaacatgttagtcccctttaaccaccttgtcattaatcaccaaaacccactagggggtttaagtgcatcttcaatctcccctttttggtgattgatgacaacatggttaaagtacacaaaaaaataataggatttaaatttagaatgatgagagaagtgtgaagctccccctaaagatatgcatataatgaacttgaaatgaatacattatgcataagatgaaggaaagctcaaaagaaacttcacactatcctcatcaaataagagatgtagataaaagtgcttgaatgatgagtgatgcaaaaagaaagactagatgacaagccaatcactcaaaaagatgaaaagaacacaacatcacatcaaaatgcaacatccatatggtctaacttactgacataaacgaaaataaagcatctaatagtcattacatccaaccataatagaatacgattacatgtccatatagagagagataatagagaggaaatctgcctggccggaacctctggatcacaggacccggagcttccggccaaatgaccagacaatagtcaaggtagcaaaaggatttaaatgacccccttcaattcacaatttctccccctttggcatcaagacaccaaaaagcgagaaactatgagaggaagaggatcactcatcttcatctccatcagagggaacaatctcggtatcgccggaaagatgagactcatcggactgagcagcggtatcaccctcatcaacatcagtgggagcatcctcagcagctgcctcggtgtcaccctcatcaccatcatcatcattatcatcatcatcagaatgagaagattcttcattgaagtaggtggaaggaccttcaccagcaacgttgcgggctgcctcataagcctccaatggatcaacatagacctcatcctcagaatcatctgacacttctttgctagcctctcttctatcttccttctgacgcctttctatcttcttcactttcttggcagtcttagcacacatacagaagattgcctgaagtgccttcttgatgggagaagaactcgaggaacttggtgaggcactagaagaaagaccagctgaagtagaaggaacagatctaggtagcactggagaagaggaaggtggagcacgagggcgaaaaggattgtggcgcccatctttgatgtagaacaccctggtgactgtctcaatcatcttcataatgaaaggagcatagatgcaaccccgcttaggctcaagaatggtgttggctatctcataccaaatcaacttcatcacactgaagggaggctgatggtagcgtatgcgactgagaagatgagcatgcttggatgacaaagcagtagcatctccaacctttggaagcaaggaccaacgaaagatggaatacaacaccttatagttgggatgcaaaccatgagtagatcccatgcaagtcctaggagcatcctttgcatacatgaacatggtcttgatcatggggaggggtgcttcactatgaatgttgggcctattgagatcctcttcatctaaccccagcatctcagcaaactgtgccatggaaatcttgtgcctaacaccctcagtcaaccacttcacatatggggttcccttccttgtagtaccaaagaatgctgttgcatagaactgtgcaatgacctcctcattccaatcatactccaaggcaagaatatctccaagattcttgttgtgtgtcgcgaccgagaaaattgccttttcccaaacgctagtgtattaatccccgtcccaggaaaagccggggtacaccacacaaacatgatataaaagacacatctttattatatcgataatatttacattattacaaaggcacttcaggcctgacaatcaaaaataaacagcagcggactagcgggcctacggctccatcttcatggcgctcaactagggtataagccaggactccacctaagacttcttctccaaagcttctcttactgaaggggggaaaagattgagcaagaatgagtacaaccacagtactcagcaagccacaccggagatgcataattaatgcaagggagtacaggggataataatataggggttaagttttgcagtaaacagcatttaaaagtcacttagttgcccaaagccattttataaagacgatcctagagctacacagtattattaatcaaggccgtgaacccacacgaacctgccttcacccaaggcttacgatgattcagaccgaactagcaacccgaccctgggtcccagctcgtcccaagccaacccaggccaaccattccacattttagttattaagcaggttttaagaatttaaaacactaacttgggtacattgctaggcttgcccataaccgagggcgcggctattcgaataggttttagtctgatcagatgtgtacatctttacccacaagagacgtcttcctcacgtgcaaccacgtgccacataccaccacggcatatggacggaagacatgacatagtttccaacccatcctagccatagacaagagtaccaacccaacccacctacggccggaacccccggacaggcaggcagaattgagcccctagcagcaggacaccagccctgtgccatgacatctcgactaccgggccgcagcccgtgtagccttcatttgtcctagagatgtccatcaacccccgacttcgtccatctccatccgtgtacttttgtttataaccagactgagccacaaactaagccttacccactagacatgtggaagtacggtagtgctttgcaacagaggcccgaagaccggtccttatgtggccgaggtgctactaacaaaaccatgcaccccgagcccagcctaaaaccattttgagggttttgaatagagggggaggtgtgcatccaattccacaataatccgaccattccaatatgtccaagtgatatgaatattcccaaagtctagagttataaaaaccacctaatgttgcctaattaatcagcgaagcacctacctaaattcatactagtggaaccatgaatagagtgcccactagttggggttttgtttattctagggtgaacaaggtaataatatcaataacaataataaggtcataacaaaggtaaataggcatggctaaataaaacagtgataacgcgggaatttaaataaagcgataatgcattaatttaaatcaaaataattttatagactgggattcaatatgctcaaggatgatgtgacttgccttgctcacagagaacgaccttctgaaccttcggtgacgaccgcgaaccacgcttcaagaacctccggaacgacagaagctacgcgaagcacacaagcaaagctacaagcctataaagaagcaataacaatacataaaaagaaagcacacggttctttaggttataacaaacattaggagacttgaacgggtcgattcagagttcgtatgaccaagatatgatcatccgaagtttaatgctgttacatggagatttacggattattgtaattaggctttgcaactataaaacatgtgtaagcgctagtctggaaaagacaggaaggctgcgctgttgacatgcagaccccacatgtcaacctaaaggaccgtggtagaccgggtacacagagacggtccacgggtcgacagaagcagatcccgtgtgtcaaccgaggcgagtggccgacaaacgaactccactagacaccacacgggctgcacacgtggaaaccacgcggctaccgagcggacacactaacacggtcaccacacgcacaagcgaacgactgccgacaccgatacacgggtaccggggccgacaaccgcacaacgggcatgggcggcaccgaaaggacgaggacggggcagcgagggagagggatccttaccaccacgcgacgaggcatgggaacgacaacgacgaacgggcgcggcggagacagctcggggacgatggaggcgaacggcgagggaacgacttcggcggtgatccttggacgaaggcgagacgcggccggcacaaggcttgacgacgcggagccgaggacgaagacgacgacggggatgctgcacacttgacgaaacgcgggcggtgaacgcgaacggcttgacggaaggacgaacgccacgacgatgaggacaacaagaggaggacgacgacgacgatgaccggggccggcgaggaggcgacgagggcagccggcagcagctgcacagatgcgaggacggcgtggaacacgccgcagcgatgccgacgacggaggtggcgccacgagacgacgagccgggcgaccgacgggacgtcgacgacgagaacgaacggaggcgacgatgatggaccgcggaggggtttggatggaggggaagcgatgccgaggacgaccttgccgctgcgatgccggagaagacggcgacgcggtcgaccggggaaattccggcgaggaggatggagaggccggcgcggcacgacggtggtctccggacgaatcagagggcaggccggggtggaggtcgacgcggcgacgccgagggaggagacggcgcggccggcccgcacctgagcggcgcggcaggggcggctggaggtggtacagtggcggcaacgccactggacgacggcgggaacgcgcctccggcggtcaccgcgcgaaacggagggcaggccgggggagaggaggcggctgcgacgccggggaaggcgacggcacggccggccggcgcacggtcgaggagggagaggcggctggaggcgcccggcgtgggggaaagagaagggcgacggcagggaggggtggtgaggccacgggagatcgcgggagggggctaaaacgagagaacggagtgagggggttccattttataggagaggagagggagccggccacggggaaggtcggaacggaggcgggaatggcggccggcggccatggaaagcggccgggaaagacgcgtccgttcccgacgattgggggcgccattcaagggggaaattggggggaattgaagaggaaggaatggggattaattccccccaatcaatttggaaagaagggcattgattcgcgtggatttaggggaggaacggcgctaggtttccggggagagagagacgaggccggctgggggaggaagacgggtccgacaggcgggacccgcctgccaggcgcggtcaacgcgcgtgggcgcgtgcgtgacaggcgcgtgcgcacgcgggaggagggcggctcgggcaggggcgcggcgtgggccgggcggccggcccaggaggagaggaggggaggggggcccgggggagagagggaggaggagggagtgggccggggaaggaggaggcccaagagaaggagggagagaaggagagggagagaaagagagggaggagagagggacttcggccgcgggccgagagggagaggggagaaaccttgggccacacttggcccaaagggaaggggagggttatttttaggtttttctttttaataaactctaataattatttttgttgcttaataattatttccggtgctctgaaaattcaagtaaaatttgagggctctttttagaccaaggagaatttaacaaaaattctccgggccacattcgaatttttcttgtacgtattttagtgtttgccaatttcttttcgaattttaattaattctattattccttttagggaatgatttttattttgggatgaatttatcaggacgtgacattgtggcacacttgcatcacttggttgaacacttcattgtttttcttcctcatgtaagcccaatcaatacacttcatctcaaccactggattctctctagccataatcactgagttataccaatccaattgagtgaaagtcctgaagcgaggatcctgtgactccttgtcacgcccggaatttctacccaaaatttcaaacgcttacatgtgtgttaaaccctcgtccaggaatcagccgaggcacacaataacaaatcgataatagagtacaaataaacagctatttaatattcgcaaataataaattattacagaggtggatagttcctctcaaagaataacattctacgcagcggaaaaaaaataaaagcaaactacggaacaactatggagactccactccacaggcaacttaacccggaccaagcctagtcctccagatcaccttcactgaagtactcctcctctgatgaatgaatattgcaagaatgagcatatgacatactcaacaagccacacagcaaatatgcaagtgcataggataacaaaggacggcataataaagctcatttgcataaacagcatttaataaatatttatgagaatagtaaaccagttgaattattaagcagtattaaataaacaccatacaacacttccgtgttgcatgggcccaacctcatctgaacaaccaaccccggttgtacaaatccaaactccataccaggaatataccattccaaaccaggagtcaaattaattatcacaagtaccattaatgaatagtgtgggattaatcacgaaaaacattgctcaactcacccataaccgcgggcacggctattcgaatagttttactctgattagaggtgtaccactgtacccacaagatacaatcccacaacatgtcaccatgcgcctcagcaccaccacggtacctcggaaaggaactgtgacaatacccctcacacaacacaactcaccacagtgcaccactcctggatcataatctccccctctaaaccagaggcaatggactccccagcgacccccacggacttctcgccgcttcacagtctggcacaccataacgaatcatgccatacaaaagataaagccgttgcccatgttggcttgtggttggcacggtaaatgtttcacaacagtagctcgtgaaccagtccttaattgtcatgagcacaaccatcaaaaccatatgctcacaacccacctttaatcaggttttagttattaattaattaacataacacgattaaccatcgtgagctaccattaaatatatccataattaataatgtgatatatataattcatcccttaatgagctgatatttctaagcatggctaatcaaatatacatatagcatctagttgaaccaatccaatatataaggtccaagctaatcaaattataacccataggaaaataaagttatcttcggccattaattaattgggaaaaggttcaccacccaatgacattcgaaaataatgcataagttgaaataaaacattagctttaaacgggttcaacatgctcaaagggttatttgggatctgtgtgacttgccttgagcttccacaaacacctccgaaccttcctcaactgaaacgctctcctcgggaacgtttgaaactagagcaaaaaaataaaatcaacaaaacagtacaaaaacaagcataaacagtacatgtggatatttttaacatgtagatctcaattttagaaaaaatttagcaacttgaaccactcgaatcggagctacgacgaattagttatgaatttccgaagttttaatcgatttgcatctaataaagaaaacttaaaaaaaggtttataacgtcatcacgtcatcgtcgccggccatggctcgggcggcacaaccaccggcgctaggaggctcggccgggctattagagggcatctacgcgtagaggacaacattgcgaactcaccggtaccaacgaacacgacggacgacgtcgaacggcgaccggcggcgaggctcgacggcggctcggctcggacagcggcggcgacggcgctacggcggccggcggcgatggctaaggggcggccgagcttcccctcttccatgcgcacccgacggcggtgagaggaggtggcggcgacggctaaaacgacggcgcggcgcggctggacgtcggccggcggcggcggcggcttggttggcgcggtggcggcgctacggggcacgagagagctcgggagatggggcaaacgaaagagggcgactagggggtgctatttatagccttatattggagagatcagactccaaccgcgagtaatcggaccgagaaaaactaggtttaggttttggggataaactcgaaaacgagtttgattcgggtaagatacgaagcgattagccccgatttttgggggatagatagaggacaacaaggggaccaaaacccctcaaacaatcggactcgatcgcgaccgagggcggcggaatcggcgggggatggcggcggctcgggcttgggctggctggccggaggttgaagacaaccccgacatgtgggccccacatgtcggcggctgtgaggaggagagggggccggcggctgcttgggccgcttgggccggcttggccttgcgcggggagagaagagttgggcccgaatcggcccaacgacttaggggaggatttttaagactttttcaataaaaataatttgtgaaatgatgtttcatttattaaaaatacttcccttgctcaaataattcccagaaaaatctagaaaatagataaacaagcaaagtatttaatgaaattttatctagctcaattttatgttgataattttccttgattattagagtttaacttgtaggcttttaaaataatttctaaaaatgatttaaaatacgcattattaatttagacgatttttagggcgtgacactcctcaggctgtgactctggatcaatcaaacgatctcgtctacacttggcaagttgatgaaggtagttggacttgggtcttccaatgtggtgcataggagtggtgtcaaaaccaagagtcttgtagagccgaacgggattctcacgagatcctacagggaaatcatgagatgcccttccagccccagaactgcgaccaccacctctcccgtgacctcttgtattaggggcatcacttccttgaccactatcaacatccctaatctgaacaggacggttgctggattgccttgtaaatctgggagaagtacgagtgccactgccactgccgccctcaaccactttctctttacccaaacgaccacgaggataccgaataggaggactctcatcaccggacacatcctgagaggctttctgtcttttctcacgagtcatagtacttactgcaacaggaatcaacaaattggagtgcagtagttaggcaaaatttgagagaaacaagaatggcaggctgaatggacagcgcccggaggttccgggtgcaagaacaccggaacttccggccggcaaaaatgaagaacagaggtttcaaaaatagccagtgcatgtgaacaaatcctatagatcagtgatcaacaaggtagcagaaacaagactatccaagtggttttctcccaaggttcacagatttagagatcgggataaaaacacaatgaaccgagagagggaatccaaaagttctaccttgagagaagaaactgcgaatcgatcacagaaagaacctcccagccaccaatgtggatgaatccacggagaagaaacgaatttgattggacgaaagtgaaaatcgccactaggagcactatagcggcggctagggttggcgtcggggagagagaagaaatgaggagagagaatggggcttctaactccccctgagtatatatactccccgataccccgaggttccggacaaggaggcccggaacttccggcctgacagataaagggcagtcaggaccaaaaacaaggaagagatgagaattcaacgcggggaaatagggaactatggacatgcagagacttatgacgtatatgaccagcctacaatcaacattacataaccatggtcaatatacaccacaagaaggggataaaagccaaattttcgcaataaaaggcacagcaaggaatttgcaaaaattttcacaaaaggggtttttggatatagggtgaatgtttgagctttattcctggtatcaagaccatcttctaccaagaagtgatctcaggatgtcacaccctgaaaatttaaaatatataaattgttgtttaattggaatttctagaatttattttaaaagtcttgaagagaagatctaattttaattaataaattccaatataaaatgggccaagataaaatttcattaaatactttgcttaattctataattcctagatttttctgggatttatttgagctaagaaagtatttttaataaatggaattgcatttaagaaataattttaattgaaaaaggttttaaaaagtcttcttttggctttgggccgaaagtcggcccaaaacctctcttctctctcctcggcccaagccggcccagtccgccgcccgcgcgcgcgccctcgctcgctgacaggtggggcccacctgtcagtcgtcgtctaccttcggccgccgccgcctgaaaccctagtttcgcgccgccgccgtttcctttccaaatccggccgttcctttccttctccggccgaattgatagaggggaaatgatcctcgtgatctcctctaccttttctcctttggaatcttcggctaaatcggtttggaaatcgagggattcgagttcgtctcagattcgtttttgccgaaccttccttcctcgtcgccggccgccgtgggccttcgccttcacctccgagcccctttaaaagcctccccgagctctcctctacccgccgccaccctcgccttcgcctctcgtcgtcggaatcgctctagcgccgcaagccctagcttcgctgtcgccgccgccgctccagctgtgcttcgccgccgttccagacgccgccgtcgctcgggaagaccgccgccgagccgccgccgccggggtgacgtcatcgctgacgccatcggggtcgtccgccgtgagccgccgtggacccgatcgatctcggccgtccatcttggatcggatagatctcggccgtccgttcgcgtgaaccgccgccgtgcgtccggtccaccgaaaccctagcccgctgacgcaataaatcctcttttccttttcaaaaataattcattattgcgtcataattcaattttaaccgatttaagtgttttaatccggtttaatctttaaaaattcataactaattcatcttagctccgatttagttggttcaagtctctaaatttttctaaaattgagatctacacattaaaaatatccacatgtactgttcatgcttgtttatgtgctgttttggtgattttgctcttttctgcttagattccgtcgtttccggagagtccgttttcgccggagaagagtttgaagagttccaaggccagcaaggcaagtcacacagatcccaaacaatcctttgagcatgttgatcctacttaaagctattgcttcttttcaactattgcatttattttcgaatgtcattgggtggaattaacctattgtttgttatagcccttttgttcttgattactttattccttgataccttgggttataatttgactagttgagctttatttatattggttcaactagatattagatataattgcttagccctgcttagaaacattagctcactattgggataacttatgactcactattatttaatgatggcttaatgatagttcacgatggtcaatcgtgattagttaattaattaatgtgccaactaaaacctgataatggtgggttgtgagcacatggttttgatggtcgtgctcatgacaattaaggaccggttcacgagtttcgattgtgaaacattaatcgtgccaaccacaagccagcatgggcaacggctttatcttttgtatagcatggttcattgcggggcaccagactgagaagtggcggagataatgtcacaccccgaagttttcctcccaagccaaattgtaaattacaaatgaccccaagaaaatgcagaggaaatcaggataaaaccctaagaaaacaatgcaaataataatcggatttgacatgtggaatttttcttgaattctacatgtcgaaattcattaacaggatttttagtggaattttcagagctctagaaataattttaaccaattaaaaatcactaaagtgcaatttttaattccagggaaaatccttttcctttttctttttcttttccctccctttttcctcctttttcttttcggatgggccgccggcccattccccttg

SEQ ID NO: 25635 - DNA, 8346 bp, Oryza sativa
ggttatgggcggtcaaccagattcaccgtgattagtctcaccctagtgtaatctgttgaatttggatagtttaggtgaatggttgggcctgtcgcaaagtgggtaggcgttggacagcggatgttaaatactgttaattattacaactgttttcgcattcaattcctgtttataaatgccagtatttatgcaaatgaacctgcttagctatcccttgttaaatccctgcatcatacctctattccggtatgacttgctgagtacagtgggtagtactcagtcttgctctacttttccccccaacctcagagctcgagtatgtgtccgatggcaggttctccgaggagtaggcttcgtccgtgccgtcgaggatgcctgtggagtggtgttcccgctgcagttcaagtcaaggattagctccagttatcttttgttttccgctgcatttctgtaagacctttataatgtttgtaagacgtggatctgtatgtcaacattgtcgtttgtgtaccccggctggtcctggacgggggttttaatacacattctgcttggaattctattcgggaatttctgggcgtgacaagttggtatcagagccgaccttgaccgtaggacaagccaaatggaaagacctaagagccctctgaatccttttcattgcatatgttctttgcaattggattttgttccgggaaaatggggatctgttcttgtggttcaagggaaaaatcttggtcgctcgtttaaagtgagtttttcaaaacgagtcagtctagggttttagtaaaattattgggatttattcgtcagtcagttggggtttgaggggtgaaatgcattaggtcctagctcggtaacatgggttgcaaggtgtttatgctttgttcgttattattattatgtatctaatttcccattattttatcgttatgtgagtctgtcttatttattcgcgctcatgtaaaatgatctatgcataaaattttgctcttatttgattcctttatttgagtctttattgctttatttaaatttggatttgagcatgcattgatcctactcctttgtcttctctagatggccggtcacccacccaaccaccgcggagaaggcatgattgatttcgtggcagagttggcacgcatgaccctggtggtgggctaccccgacgcgccggagtacacgacgattccgccgctcagtggcgagcttcctcaccgtgtccgcttggaggtccatggttacgtggggacttgcctcgctaacatggcggtcgaggcatctggaggcacagcagatcacgcctgtcaggaggcagcctacttgatgatggccagactacgggagcgccacgactacatcttccacgacacggcgtaccgctaccacccccgtcgagcccatggtgatggcgtcagctccttccgtccgacagctggcgagaacgacaccaccttcggtcacatgtgtgctgtgatgaggggattggaccagatgcactcggacctgcacaaggcgaccaaggccttgaatgatgggaagctcatgaggatcgtcgctctgaaggacgagatagcgcgcctgaagaaggagaatgctcagttgaagggtcttccagcaccaggaggagtccggatccgcactacgccccgtaagaggacgactgcacccgtgcgcatccagcttgcgcccaggaacccacctccaccagcagctcccgcagcacctccagttccgcccgcagctccggcagttcccgcagttcctccagctccagctcccgcgttcactctctccttcgctccagcatcagccgccagaggtccagccagtggtaccggaggttggttgtccgctactcccagtggcagcggcgagactgatctgtcaggctccaggagtcgttcagagggaccaggtgacgagcaggaggacgctttcgactccaccggccgcaggagccgttccgagcattaggctcgttttcccattagtttatcgattgtctagtttctgcttgttagtttgtgtgtttaggttgcttgtttggggtcagtcgacggtcgatatcatgtgcctatgatatggctgtcttaataaggatttttgtttgctctttttaagtgttttaattcagatcagaacaattgcagttttaattcctatataataaagcttagttcttgagcatctgtttttcttcttctcccccgtctgcttttccctccagatggtctacaccaggactggcaaccgcacgacaggcgagggcagcaacggtgaagaacgcgctgatggtgtgcaccccaacagtgattctggcaatggtccgccaccacttcccgagaatccgacccttgcccaagttatggcacatcagactcagatgatggcagccatgatgcagcagatgcagcagcagcaccagcagatgcaccagaggatgatgcagcacgccgaacagcagcaccagcagtttggtccccctccccctcagtccaagttgccggagtttctacgtgtcaggccacccaccttctccagcaccaccaacactatggaggcaaatgactggctccatgcgatagagaagaagctgaatctcctgcagtgcaatgatcaggagaaggtcgctttcgccacacaccagcttcagggtcctgcgtcagcttggtgggacaaccacatggccacccgcccaccgggtactgaagtcacatgggcagagttctgccgtagcttcaggaaggcacaggtgccagacggggtcgtggcacaaaagaagagggaattccgggcgctccatcagggcagcaggactgtgacagagtacctccatgagttcaatcgcctcgcgcgatatgcaccagaggatgtccgcaccgacgccgagaagcaggagaagttcatggcgggtctggatgacgagctgaccaaccaactgatatctggggactacgccgactttgagaggctggttgacaaggcaatccgccaggaggatcaacgcaacaagatggataggaagaggaaggccgcgcagttcagggcacatcagggaagtcaccagaggccgcgcttcactcccgggcagcagggtggacctaccaccatgattgttcgtcaacaccgcccattcaaccccagcaacttccaccagggctccagtggcagccagaatcaccatggaagtcagcccaaccgcggtacagctccacgcccaccgatggcaccggcacagtcaggccagcccgcacaagccaagaaggagacgggagcaaaaccagggtcctgcttcaactgtggcgagcttggccacttcgctgacaaatgcccgaagcccaggcgtgccggaccaaggtttatccaggctcgtgtcaaccacgcatctgcggaggaggcacaagcagcaccagaggtcgtactgggtacgtttcctgttaactcaatccctgcaacagtactttttgattctggtgcaacgcattctttcatctccaagaaatttgtcgggatgcatgggttaataagagaggaacttagcacaccgatgcgggttcataccccagggaatagctccacttcggttcaattcagcccttctataacaatagaaattcaaaggtcacccggttttgccgagttcagtggagtcatcattcggaagaggaagcgacctgggaaagggaagatgagttgaaagccgcccatccgtacctcttcaccagctcctccgaatctcggggccgagattccgtttaaggggggtaggtttgtcacaccccgaagttttcctcccaagccaaattgtaaattacaaatgaccccaagaaaatgcagaggaaatcaggataaaaccctaagaaaacaatgcaaataataatcggatttgacatgtggaatttttcttgaattctacatgtcgaaattcattaacaggatttttagtggaattttcagagctctagaaataattttaaccaattaaaaatcactaaagtgcaatttttaattccagggaaaatccttttcctttttctttttcttttccctccctttttcctcctttttcttttcggatgggccgccggcccattcccctccttcctccccctcctccttgctgggccggccgcaggccgagggcccagcctggcagccgccgcccgcctcctctctcggggtcgccgacaggtggggcccacctgtcgggtccttcccccacctcccgccgatcccgccgcgccgccgcgccaaaaccgccgccgcgcccacgccttcgtctctcccgggccacgtcggccacgcccgcgcgtgcgccgcgtctcccgcgccctttcccctctccctcccgttcgcgcccgcgcccgagatggccgggattcgaaaaccgaatcccgcctctctctcctccccactcccccacgtcggccgtcgaatcccgccgctcccggccacgtccggctccctctccccctttttaagcatcgccgtcctcctctctcgctttttccccatttcgccgatctctcccgagctccccatcgcctccgcgccgtgcaaccacccgccgccgccgtttttgctactccgtccgccgctagccgccgctaggctcgtcgccgtctcgcgccgtcgccgccgttagcttcgcggggtcgagatctacctcggccgccccttccccgtcgaggttcgccgccggagacccatccccgtcgtgtgccggcaagtggcaccatggccgccgccttcggccggcgctctcgccctcccacgctctttcctctctctctaatccctctccttttgttcgttaggaggttccggagctcgtcccgccgtcgtcgtcgtcctccgtcggccgccgtcgtcgaccgttgtcggtgaggcttccccctcctctttctccttttccccgtaccgggtagccgcgtgcgcgccgcttagccgcgtagccgccgctcctcctctagccgccgctccccgccgccggtcggtcgccttcggtcgccgccttgcgccgctgccgcatgcgcgccgccgccgtgtgagcgccgcgccgccggcgccatggttgccgccgtctcgcgccgcgcccgcgcgccccggccgcgaggtcccgccgccgtccgatctacccttgggtagatcggggccgtcggttcggccgccacgtggcgccgccgcccctcctttcccccgtgccgctgacccgtgggcccgcgcgccgccaccccctttctctctctcccggtcgctgaccggtgggccccgcctgtcggcgccgcgccccctcgctgacgtcagccctggttaatattgcgcaataaattatttaaggatttcttttatagtaataaacacagtgaatcttctaaaattcataactaattcatccgagctccgtttaatcccattcaagtctcagtaaatcaagaaaaatgtgtagaatccattaaaaatggttttgttctctgtttcagtagtcttatagcctgtttgcaatgtttgcttggtatgtcgctagattccgatccctccgacgctccggtgtacttcgagatagtcgccgaggtccctccagcagcggagcaaggcaagtcatgcttgtcacttgaacatgttgatcctatattgcaaatgctctattgttttctttcaaatattgcattgttttataatatcactatgggatggatacctattgttacagccatgcttttggatatcatgctcctttgttagcttgggttataacatgattagactttggactaggaattgcttagccatgcttagttcaactagcacacattggggatctcatttaaaacctagactataggtttatatgataatgttggtttaataccaccgctctggtgttggttaaataaaatgaaccacatggtgggctgtgggtgcatggttttgctagtcgcacccatggcagttaaggaccggttcgcgggatgccctggaagaatttatcgtacttaccacaagccagcgtgggcaacggctgggcttgtagtgtagctttcctctagtcgacgcatccaggcaagggtgggcgtgatggagcggggcgggccctgcgacggcctctgtcgcttccggattcacctaggcacgagaggggactgcccgtcgcccgctggggacgggggtgaaacctgaggtgtggtgtgcttggctagagggggttatgcgaagggtcctgtcacggcctctttccggtatgtcgtggtggcatgtcggcgcacggaaacgtgtcgtggggctgtgtcttgtgggtacagttgtacacctctgatcagagtaaaactattcgaatagccgtgcccgcggttatgggcggtcaaccagattcaccgtgattagtctcaccctagtgtaatctgttgaatttggatagtttaggtggatggttgggcctgtcgcaacgtgggttagcgttggacagcggatgtttaatactgcttaattattacaactgttttcgcattcaattcctgtttataaatgccagtatttatgcaaatgaacctgcttagctatcccttgttaaatccctgcatcatacctctattccggtatgacttgctgagtacagtgggtagtactcagtcttgctctacttttccccccaacctcagagctcgagtatgtgtccgatggcgggttctccgaggagtaggcttcgtccgtgccgtcgaggatgcctgtggagtggtgttcccgctgcagttcaagtcaaggattagctccagttatcttttgttttccgctgcatttctgtaagacctttataatgtttgtaagacgtggatctgtatgtcaacattgtcgtttgtgtaccctggctggtcctggacgggggttttaatacacattctgcttggaattctattcgggaatttctgggcgtgacagataagcccacgggggtcgctggggagtccatgccttgtttataagggggtgattatgatccaggaaggtgcgctgcagtggattgtgttatgcgaggggtattgtcacaactcctttccgaggtaccgtggtggtattgaggcacatggtgacatgatgtggggttgtgtcttgtgggtacagtggtacacctctgatcagagtaaaactattcgaatagccgtgcccgcggttatgggcgggtcgaacaatgtctttcgtgattagtctcacacctctcatcataataaaagatgcttaaactagtaataatttgattagctcctggtttggaatggtatattcctggtttggagatagaactgtgcagccggggtggttgttcagaatggttgggcctatacaacagggtatgttgtatagcgttggattaatattgcttaattaatacctaactgttttattaaattctgaaatgtttgctaaatgctgcttttgcaaatgaaaccctattatgccatcctttgttatcctgtgcacttgcatatttgctgcgtggcttgctgagtatgtcatatactcaccttgcaatcattcatcagaggaagagttctacaatgaggctgatggtgtggaggattaggtgtagccttggtcaagctgcctgtggagtggagtcgtctgcgccgtttatttattttccgctgcttagatctttattgattgagaggaactatctacctctgtaatgacattttattcgcttattaattagagtaataattgtactctattatcaatttgttattgtgtgcctcggctgattcctggacgagggtttacatacatgtaagcgtttagaattttggatagaaattccgggcgtgacaactcactggcagcacctctggccagttggccgccagcgaaaactattttttgtagtagtcacaacagttcagattggttcactagctcaggatagctcatctgtaataggcgggaagcattatctgtgtcggcgaggggtactgtcacgaaccaaaggttattaatgtgaaaagtcatatgtgtcgggtcagccaccatcacggacgaccgtcatccttatcgggcctaaataaaagacccaaactcatctatgacgggtcatagttaagacccgtcacggataagagttatccgtgatgtttcaagctcctacttccaagaactgacttttttgtccccaagagtgatgtctggcttgccgccgattcgccgggtcgctgccattgacttgtctacggctatgttccgagctttgagtgacaacatcaggtgttggcgtcagaacccgacatcgtcaaaagcctcgtgcgtcgtcttaccggtggtaagccctttttctcatttatactttgt

SEQ ID NO: 25636 - DNA, 2140 bp, Oryza sativa
cggttctcacatgggtaaggcatatgtctcctttggtctcatgatctctcaaaaagtggtagcgaatatctatttgtttggttcgtgactgttgaacgggattattggctattttgatggcactctcattgtcacataggagtgggatcttggtgaagttgtagccaaagtcttttagagtttgtttcatccaaaggagttgggcacaacaagaaccggcggcgacatattcggcttcggcggtggataatgcaatggaattttgcttcttggaggaccaagaaacaaggaactgcccaagaaattggcaagtcccagttgtgctttttctatcaaccttacacccggcataatccgaatcggaatagcccaaaagctcaaagtcacaacccttaggatatcacaagccaaggttaggagtatgaactaaatatcttagaattctcttgacggcaatcaaatggcactctttaggctccgcttgaaagcgagcacacatgcaaacactaagcatgatatcgggacgagatgcacataagtaaagcaaggatcctatcatggagcgatataccttttggtccacacatttaccattatcgtcgaggtctaggtggccattggtaggcatgggtgtcttgataggtttggcatcctccatcccaaacttcttgagtatgtctttcacgtacttggtttgagagatgaaggtgccctcttgtgcttgtttcacttgtagcccgaggaagaaggtcaactcgcccatcatagacatcttgaaacttttagtcatgatactactaaattcttcacaaaaagaggcattagtagaaccaaatattatgtcatcgataaaaatttggcaattgaataaatcattttcaagctttttagtgaagagagtagtgtccgccttcctaatttcaaaaccatttttcaaaaggaaatctcggagacattcataccaagctctaggggcttgtttgagcccgtaaagacgtcttgtggagctgtacacatggtttggcaactttggatcctcgaaccccggtggttgctccacatagaccaattctgagatgggtccattgagaaaggcactcttgacatccatttgatataacctgaaatcatggtgagcggcataggctaaaagcatttggattgactcaaggcgagcaacgggtgcgaaggtttcaccaaaatcgagaccctcgatttgggtgaacccttgcgcaactaaccgggctttgttccttacaaccactccatgttcatcttgcttgtttcggaagatccacttggtaccgatgacattttgcttgggtctctccaccaaagaccatacttggttgcgagtgaagttatttaactcctcttgcatagccatcacccaatccggatcaccaagcgcatcttccaccctggttggttccaaagaagagacaaatgagaagtgttgacaaaaacttgcgacacgagagtgagtagttaccccttttcttatgttaccaagtatgttgtcgacgggatgatctctttggacaatgtgatgtatccttggatggtgcactggggggacctgagcctgatcagtatgctctaaagtgcccggaacatcgatcccatccacttgcgccgttggcacgtcttcactaccgctggtccggaggttccggactgtagaacccggaacttctgggcctggagatgtccggaggttccggtcaataggacctggaacttccggctcagcagacacagcacttgtagggctattggatgtcgatgacggaggttgatccctatcttcttggtcatcctgcgtctcgactagtcgtatatctccaatagccttagtacctatagcttgacttggatccacatcacctacaacatgtacaacaacttgctctccttaggagccattagattcatcaaatgtaacatccctagtgacttcaacaataccggatgttttgttgaagatacgataggtatgtgcatttgattcatagccaagtaagaatccctcatccaccttaggtgagaacttagatgagcgaggcctcttactcggaataaagcatttgctccgaaagacacaaaaatatgaaacattaggtttcttaccgctcatgat

SEQ ID NO: 25637 - DNA, 765 bp, Oryza sativa
acttgcctttgaatacaacggagtcatcccttctaaagacggtcacatcctcatcggtaaacaagcaattgtaacccaacttacacaattgagaaacggattataaattgtatcttaatgaattgacaagaagaacattacagagagattgattattggagatggcaattttacctagaccaattacctttcctttaccatcatctacaaacatgatattctcacgagttccgttcttctcatcaaaacttgtaaacatactcctctctccagtcatatgattggtgcaaccactgtccacaacctaacttgaaccaccggaggagtatgcctacaaaagaaatcaagcttgggatttaggaacccaaacttgtctaagtttgggtcccttgatgttagttaccaaagcctttgtcacccacacacaagtgcggtactcatcattgtaattcccattaaaataggcaaccactttgccctctgaatttttggaaattacatatgaatcatagtaaaaaccctctggccggaacctcctggcattgtgaccggaacttccggtcatatcgtgtgcacggccattggcccggaacttcctggtgggaaattttgagagacaaagactcccacccggaagtttctcccggtttgtccggatgttccgggtccctggcagctcacaagactagtcacctcacttgcttgtggtgcttaacgtaccttttctcacaaacatcaagcattctttcccatttaccatcacac

SEQ ID NO: 25638 - DNA, 1316 bp, Oryza sativa
  unsure (1)..(1316): unsure at all n locations
gcggaccccacatgtcaacctaaaggaccgcggtagaccgggtacacagagacggtccacgggtcgacagaagcagatcccgtgtgtcaaccgaggcgagtggccgacaaacggactccactagacaccacacgggctgcacacgtggaaaccatacggctaccgagcggacacactaacacggtcaccacacgcacaagcgaacgactgccgacaccatacacgggtaccggggccgacaaccgcacaacgggcacgggcgacaccgaaaggatgaggacggtgcagcgagggatagggatccttaccaccacgcgacgaggcgtgggaatgacaacgacgaacgggcgcggcggaggcggccgggaacgacagagacgaacggcgaggggacgacttcggcggcgatccttggacgaaggcgagacgcggccggcacgaggcttgagacgcggagccgaggacgaagacgacgacgggggctgcagcgaccttgatgaaacaccgaggacggacgaggacggctcgacggagggacgaacgccacgatgaccgggaacgacgaaaggacgacgacgacgacgccggggccggcgaggaggcgacgagggcagctggcagcggctgcacggagacgaggacggcgtggaacacgccgctgcgatgacgatgacggtggcgacgcagcgagacgacgagccgggcgaccgacaggacgtcgacgacgagaacgaacggagacgacgatgatggaccgcggaggggtttggatggaggggaaacgatgccgaggacgaccttgccgctgcgatgccggaagggaaggcgacgacgtcgaccggtgcactagcgaggaacagtagccggccgggtgaggggatgtactggatgccggcgaggacttcgttccggcgagatttgggcaaggaggaggtgaggacaggggagtggacaacgtcacagtgccgagggagtggtggcgacgtcngccggcgcacgggagacgcggcagaggcggccggaggcggaacagtggcgttgccgccactgtcgccggtgggggcgcgtctccggcgatttccccacgaatcggaggcggccccggggaagaggatgcacctgcgaggcccagggagaagacggcgcggccggacggtgctcgggcgaggagggagaggcggctggaggccggccgccgccggagagagagaatgagaaggcggggagaggtggtgcggccaccggaagacgcgggaggaggctaaaatgatagaacgcaaagagtgggttccattttataggatgggggagggagc

SEQ ID NO: 25639 - DNA, 1173 bp, Oryza sativa
taaactcaccaacttcctaacactcaaaagcaaacaaacacatgcaattacatcccaccactgatgtaaatcacatgcgagccacacacaagcaaacttaaagcaaacaaactaacacaacgatctaagacaacgacttaacaagtcactctagttcttccaagcattggaggtcgattgaaggctcgttcggctcgtcttcatcatcttgggttgcgacccactcaatcttggaatggttgcgcttggattcttcttcttcatcacttatgatgatgaccgaggatccgcttgggatggggcaacttctttctccaccacacggacctttggcgccaattgatagcgagggacaaataaagctctcttccttgcggtaagacgaatcctggccttctgcggcggtgcttctccctttaacgcggctaattccttttccaaacgatccaccttgtcttctaacttgcaaatcttaccacgattccggtcttcacgatcttgagccgctaacacagtctccgcacgaccttcatccatagcccacagcatctcaaccaaatgccttgtggtagcatcattctcaattccttcagtctaagtagctgccacggtcacttccctggggttgacgaggatggtagcgatactcagtgtcggccaactgatcactatagcgatcacggagctctcctatggcaatccttgccacttcctgacatgcatggatgtagtttcttcctccagcttcgaacatcactgaggggatctcttcactattgctgttcaaggtgactttgactcggcacttctcttcatgacgatcatgaggaatctgggcataaaaaggggcagtcccaaatccaatggcaaaggacatcgtacgcaactcctggacaaaaccctcaacaccaaacaggtactcaagcttgtagcgcggcatctaaagacaagtgaaaggagggagttaagacctttatccattaatagcacaagtttttggattaatttgaataaagtttagaaattcaaagtaaaaggtaagtgaataaagtaaaccaaacttgcaagataatttgaaatagttgaaaacaaggttacaaattttgtactttttaacaacaggtttcaaaagaaagttataaaatcaacatgctaaatttattttattgcagc

SEQ ID NO: 25640 - DNA, 2205 bp, Oryza sativa
ttgggcactaccgcctgcagcgcatcgctcaacgcttgacgatgcgtttggccacgcaccatggtggtcgcttaccagtgttccgagcaaagtgtagttgtttgtatccattatgtcaaccagcctgtgtgcaatgttgattgcatctagagaccagtgatagtggtggagcacaggaaccattatctgtccattcagtgtttggaagtaaagaaacgaaacttacaatagcattgctgggtttaaaagatgctcgatgcaggggaaaaaagtagacatggcattagtctttatgcaaaaattaataactaaccaatgctggatgtagtcgcgcaagtttccggccaaagcatcagtggaaaatttgtatctttccattttgtttgataaaatcaatgttcaggagaaactgcaaaaaaaaaaaagtgtggccatgtgttggtgtgaaccaaaagagtcacatctcgcgaaaaaaaagaacagaaaaacaatcatgttgctgcaccgtacgaaaaaaaggaatacagtagaaattggcgttattcacgttactgatatggaagtcggaatgaaaatcctttttccataattatctagcctgtacttcatgtcatccttgaatagaatcgagctgaacacgtctatgaaaagctcctctgtcaggctcccgtcggagaacgattccagcacattgtttccatacgcaacagagctgtcgatctctagcagtttcacgctgcaagcataccagaaatattaacatgtaaacccgtaatctaagcaaggaaaaaaaaggtggtccgcgaaaaaatatgatgcaccatatgcacatcatcaaggtgatgatgaacaccaacctgtccatacgaccaccattggtcagtaagaagtgcctgagctggatgctaagcgacacgtccgatgacggcataccggggccaacaaccaccggcgaaacaaatattgccggctcttgtatgaaccgctttggcagagaccatggcgttgaatttacgtcgttggtgtcaggcatggtctcgggcaaaagctgccaaaaaaacacaataattgtgtaaggggaaaaaatgttaaccgaaagtagaggacgatcggacaaagtataattttaactgccatctacctgtgtatcgctgtatgaaccatcaaagcacagcacaatataagagttgactgctcctttgatatgtagcaaaaggacagatagttgtaaacttgggtaagaaaaggtttgcagttaaaagataactaccagctgtgtcattgtgataagtatagtacagagttttcctggtattagttaattttttcctttaatttttggtagattgtgctatagcagataaaagtttgtgatgatcctaacaaaaataatgaactaaagagtttagttcaaattttactcataatgatattttcttgatttctcatccatttccagtgaggttgtttatttgaaccactagcttagtggttccttgatcagtgaagttaataaatgactatcttactgcagtttgcaactggagaaaacacctcacatattgcctcagaattaaacttttggtgcgtactgtttgaccaagcagacaatccctaagtgctcatgctcaagttgatgacaaaaaaaaatgtgtccagaggaaacccaaactacgagaatatgatttgatgcaatgaagcacaagtgaactcgacgaatgggatgtttgagaatacaaccacggagaatgtaggagccccctcgagcctgcaaatctccttgattttctcgttcacttgtgtgtcgatcatgtccgtgtccggcggtagaacaaatgacggtgacggcgtgacggaaagaaattgcgaggctgcgaagtaatgaaatgtactacaaggatatcactttgctgatgtatgtataacgatataatgggtaactaattctccttacatcgcgtggtatcttcggcgtggggcagctcagttgtttcctccgtcgggtgagattgttggtcaccggcactagtagcatgttccatatgaatgccggttgaagcaactggatcaataccaatcgcacacacagcctcgacgcctagtgtgtcttcccggtgttctggcgccttggatcttgagcggcaatttcctcattgtgaggggtgcgctgtccgtgggggtggtgtgcgctgtgtcagaaccggt

SEQ ID NO: 25641 - DNA, 1310 bp, Oryza sativa
aaccgaacgacatcaccgtgaattcatacagttcgtatcgcgtggtgaatgcggtcttcggaatatcttcttcacggatggcaattggtgatatccggaacgaagatcaatcttggagaatacagtggcacctttaagctgatcgaacagatcatcgatccggggaagagggtacttgtttttgatagtaacttcattgagagctctgtagtcaacgcacatcctcttcgtcttgtctttcttttccacaaaaatcacaggagcaccccagggggaagtactcggccgtatataccccttttctttcaactcttccaactgtttcttaacttcggccagttcatttgctgccatacggtagggtcgtttgtacaggggagtggttcctggagcaagatctatccggaactcaatctctcgattcggcggcataccgggtagttcttccggaaacacgtcttcgaactccctgacgatggggatttctgacagtccaatctgatgaagttctgaacttctgacagaggttgggggtgcaaagaaaacaaccggttgttccggccctcggtacagagtgacagtgcgtctcgtgcaatccactactccttggaattgagccaaccaattcatcccaaggatcacatccaagttcttggtgtctagaagaatcagatccgagggaaaaggaatcccctgaatgtccatagggacggcagggctataatactttgctgtcataacccctccaggggtggtgatgagcagagggttcctaagcctttctaccccccattgatttcttcccacgaatggcatagatataaacgagtgggaagctccagagtcgaacaaaattgtagcagggatggaatgaccgaggaacgtaccaacgatgacgtctgaagttgtcagcacgtcctcggccgtcacgtgattcacacgaccccgaatgacatccttcccccgttgttgcagcgggagaagcttggccttgctgacgccttggctttgggcatttatccgcaaagtgcccgggctcgaagcagttgaagcacagacgctgctgaccttgagcgtccctgcggccttgaccagccggcacagttggcgtaggaggacggggcgcacgagtcccttgttgattctgctgttgctgcggctgtgggacacgcaccacgaattgaggtcgaggcgctgggcgaggttgctgctgctgttgttgctgctgcgaggaggatccccctggatagggattggtgtagcggaccctctggttagcaccctgttgattgcggaaattcgccaaacgg

SEQ ID NO: 25642 - DNA, 787 bp, Oryza sativa
cgatgtagccagccgtgaagaagatagcatcagttggcgttataacaggccagccgtgcaggcggtgacaccagtcagcggcggatgcggcggccggtcggtgaagacgtagacgccaaacaacggcagcataaaggccagccgtgcaggcggaaacaccagtcggcggcggcgaaggcaagccggtcggtgaagacgtagacgcccaacaacggcagcataataggccagccgtgcaggcggaagcaccagtcggcggcggacgaggcggccggtcggtgaagacgtagacgcccaacaacggcggcataaaggccagccgtgcagacggaaacaccagtcggcagcggcggaggcaagccggtcggtaaagacgtagacgcccaacaacggcggcataaaggccagccgtgcaggcggaaacaccagtcggcggcggcgaaggcaagccggtcggtgaagacgtagacgcccaacaacggcggcataataggccagccgtgcaggcggaagcaccagtcggcagcggacaaggcagccggtcggtaaagacgtagacgcccaacaacggcggcataaaggccagccgtgcaggcggaaacaccagtcggcagcggcgaaggcaagccggtcggtgaagacgtagacgcccaacaacggcggcataataagtcagccgtgcaggcggaaacaccagtcggcggcggcgaaggcaagcctggtcggtgaagacgtagacgcccaacaacggcggcataataagtcagccgtgcaggcggaagcacca

SEQ ID NO: 25643 - DNA, 9822 bp, Oryza sativa
aagtagccgatgtgggaacgaaacagtccatcaataacaatgaggacaccagtcggcggcgacgaaggcggtcgacggtgaaagcgaagatgcccaccaacgacgacataataggctagccgtgtcggcagagacaccagtcggcggcggcaaaggcaagccggttggtgaagacgtggacgcccatgaacggtggtgtgaccaaccaaccgtataggcgaggacaccagtcggcggcgacggaggcaggccggtcggtgaagacgttgttgctatcagcggcggtggcaaaggcaagccggttggtgaagacgtggacgcccatgaacggtggtgtgaccaaccaaccgtataggcgaggacaccaatcggcggcgacggaggcaggccggtcggtgaagacgttgttgctatcagcggcggtggcaaaggcaagccggcggagtggactcgcggccaattgaccgaatagctgggacgtctcgagtccatgaccagcatagatcacctagcaaagtcgaagattaaatcattcaactcgccgagtgtcgaaacatgaattcggcaataataaaagggggtagcgcacgagatctaaaagtggatggatgcggagacaagggatttagacaggttcaggccctctcgatgagaggtaataccctactcctgtttggggatttgaatccgccgagtgtgtattgatctgacgatcaggttgtctcatgcccctagagggggctccctgccctccttatataggttggggggcagggttacaagatagaaaccttaaccaatacggtatcggtttcctaaatctactttacaatcttatcaaaccaggactttaggccgttccataatatacagggaaacgtaatacccaagtcatgatctgttacatatttcatatatataagttatcccctataactagtcggataatcatgccgtgtgggtatggggtacccataatctccacagtagcccctgagaccttcacagtcggaaagataatcttctctcgaactagattactccaaagccgagtgcttcaatcatcttcgccatgatctcccgagtactttttccaaatcagaagactgtggagggctgaaaaaataaagtcagatgcatcgactagatgcacctaataggtgtaacccccgactatgtggttaattgaacaaaccaaacatataatcaaggaataaataatctaaccaaccgagtggtttcgataattgtagtcaaccaagcgacttaatattaatatgtagcatatgcggtgtgaatccctgaataatatgatccaagtgatataccgactgctttgtaaaatatgatgagtgtaacctaaagttggctacatcattgaaaattcacatagcaaaacagctataaagaagcttgtatgttgtgaataaagaaatttccatagtattgggcatacgccatgcgcacactgctttaacagatgtgcttaagtccctagaagacacatggttccaccacacctggaaatatatggcatatgtggtataaaatccgagtaaataaactcataaaggattcaccaaccgcctgaaaaatgaccacaatatataatcagcctaagccataatattggtcaataaaaatgcacacttacgtggcgaaaagcaatgatattgtatccaatcaattgcttaaaaacccaaacagcaccatgactatataaaaaagtcagcgggccagctatataaagctttactgtttgacaccttttaagatgcattgtaccaactcctaaaaagttgagtaactgcggtataaaaggattttaaggtattgggcacttgatcacgcgcactttggcctaagcaaaaagtgcctaagtccctaaaagaacgtgacaggccacacctgaaaatatgggctgcagacatattaggcctaggccaaaaaatatgccttcgacaccctttaaaggatgacgcatataacatgctcccgagtaataaatcttccgggtaatatagaccaagcgtagctcatatgaatagcttctgatctgagtgattatcccttatgggatactccaaaatagatgtaacaattgaatcccgactggcgcaagtattcagttgataacccttacggggaataataaatagtccagtctttgagcatataaaatagacccatgatcatgaattcatgttgcatgtatccggagcaagtccaaattgaagatataatacttgtatttgagctagtaagcccctgagcacgtagtcacaattgttcatcgatggtagctgacgcagttggcatagagacaagacgaccaatatagagataatattgcccaacagaggtggcaaaaatattggtggtagtgaagatagtgataccaatcaaaagtgatgaagttgcacagccgtggaggcgaagaaaccagtcggcggcagacagatcaactaacaatgaagatgaagaaaatagttgacgacgacaaacgcaaccgacatgatgaagatgatgatgtcggcgatccagtcaatagcagtgtcgcaaccaatgataatgacaaagacgctcatcagcatttgcatagtaggtcaaccgtgaaggtgaaataataagtcggcgaaaacataatcatccattagcaacagcggagatgtcagggccgatgaagcagaggtgctggtgatgatgtcagtgacaataatccatcaaattaatgttatggctgttgtagatgcttcacttggaggagagttgatgttgttgtctaactcgtccaaaccgaaatatttgaagttgttgaagtagaatgtctgctccgaatcaaagatgaagataatgactcctggagttgactcgttggttgatgaattgatttcttcagcttgacataaaatttggcaaattttgagccttatatttgtgtagcccccgactctttggttagttgggaaacaactgaacatagagtcgagaattatagcttcttgtcgtcgagtagtcattgcttgattgaagatatgtgttgaagatgtccaagtagaaatcctgaatattggagagcctcttgttgtagtaaaacaacatggcatcgcatgccgagatgtcgaggcatgatgacaaagttgcattgccgtgatgaagtgaatacgagtcggcggcaacagaagcaaactggtagtgaagatgcgcagttgtgaagataaaagcaccagtcggcggcggcataatcagtcggcgacagaagatgatgatgtccatcagtagtggtagctgtataaaccaaatgtagaggcgagggcactagtcagcagcagacgagacgaccggcgatgaagatggtaaggccaatcaacactggcagaatcatgcagccatggaagtgaagaaaccagtcggcagccatggcaaacgtaggcagcttgtgttgaagatactgatgcctattagtagtgacagcgatgtagccagccgtgaagaagatagcatcagttggcgttataacaggccagccgtgcaggcggtgacaccagtcagcggcggatgcggcggccggtcggtgaagacgtagacgccaaacaacggcagcataaaggccagccgtgcaggcggaaacaccagtcggcggcggcgaaggcaagccggtcggtgaagacgtagacgcccaacaacggcagcataataggccagccgtgcaggcggaagcaccagtcggcggcggacgaggcggccggtcggtgaagacgtagacgcccaacaacggcggcataaaggccagccgtgcagacggaaacaccagtcggcagcggcggaggcaagccggtcggtaaagacgtagacgcccaacaacggcggcataaaggccagccgtgcaggcggaaacaccagtcggcggcggacgaaggcaagccggtcggtgaagacgtagacgcccaacaacggcggcataataggccagccgtgcaggcggaaacaccagtcggcggcggcgaaggcaagccggtcggtgaagacgtagacgcccaataacggcggcataataagtcagccgtgcaggcggaagcaccagtcggcggcagacgaggcggccggttggtgatgttctgactgatccattcctggagtgtaagagataagcttaaagccatgaatcccttttatgcatgtctggatctggatcctgcagaacaaacatataggatgagtagtatctgatataaatataatactcgagaaaaaatcaagtattttaaaatattgataaatatgtatttctcctcttgtcaattttgatttccccgagcagatgactctgtacgtttaaacactctgtccgactagtcatagcccccaagcatcgggagtcggcctaggcatttcccaaacatgcatatgagtgacatgagttcgtcattaatggaacaaagtttcacggatcagaatttactacttaggtacttttgcaattattaagagcagaaaataaatttatctcatctctatgcttttgatttattccgaataatacttagcaccttgcgttactcggtccatccaacgagcccccgggtgctaggaatcggcccaaaggcaaccatccattggcaaaccaaacggaaagcataggaagatagaactccataactcgataggtacttttgtactcagattacatctcaagcaatcaagataaatattataaaaaatatgatataacatctgtagcccccgactcactactcaatggaagaccaattggtgtagtgaggcagaggaaaaggaaaaatatcatataaagaataaaataaatgatgacttagctttgtcgtattccctcggtggcagcagaagtagccgatgtgggaacgaaacagtccatcaataacaatgaggacaccagtcggcggcgacgaaggcggtcgacggtgaaagcgaagatgcccaccaacgacgacataataggctagccgtgtcggcagagacaccagtcggcggcggcaaaggcaagccggttggtgaagacgtggacgcccatgaacggtggtgtgaccaaccaaccgtataggcgaggacaccagtcggcggcgacggaggcaggccggtcggtgaagacgttgttgctatcagcggcggtggcaaaggcaagccggttggtgaagacgtggacgcccatgaacggtggtgtgaccaaccaaccgtataggcgaggacaccagtcggcggcgacggaggcaggccggtcggtgaagacgttgttgctatcagcggcggtggcaaaggcaagccggcggagtggactcgcggccaattgaccgaatagctgggacgtctcgagtccatgaccagcatagatcacctagcaaagtcgaagattaaatcattcaactcgccgagattgatttcctcgaccggactcactccgagacggagaaaattggtcgttggtgttgcactgtgtcactaggactaatcaagcaatcgacactgagatggtgaggcctccctgcagcagtagaagcagccagaagaatcggccagccagccaaaaaaacccagattgatcaaattagtagcaactacagaaacaactcaataagtatatatgttgatcgatgcatgcatgcaaatatgcaacatgggtttatccatcctcttgcaggtgctgaacgtgcatgcaagtcaaccctgtaaagaaccaatagtctttgaccagggccagggcgagcacacagcggccggctggactcctgacgtgatgcagtgcacccggcggcaactctcgcggcgccatgtagatggaacagttcgccatgcacaaaatcgatgcgatagcgatggtgtgcccacgtgcgctgttgagcatgtcatctcgcaaaacaaatcatcgatcaatctgttgttagaaattaatctaataataaaataaattggagcggcaaacccggatgaagatcaaagatttgacgagccattgaacacgttgaaattgatctcaacgtttcttttgaagttaattccatcgcacttctcgacgggtaatacgacgcaacccctacctggcgcgccaactgtcgaaacatgaattcggcaataataaaagggggttgcgtacgagacctaaagtggatggatgcagacacaaaggatttagacaggttcaggccctctcgatgagaggtaataccctactcctgtttggggatttgaatccgccgagtgtgtattgatctgacgatcaggttgtctcatgcccctagagggggctccctgccctccttatataggttggggggcagggttacaagatagaaaccttaaccaatacggtatcggtttcctaaatctactttacaatcttatcaaaccaggactttaggccgttccataatatacagggaaacgtaatacccaagtcatgatctgttacatatttcatatatataagttatcccctataactagtcggataatcatgccgtgtgggtatggggtacccataatctccacacaaagcaaagcaaagaaaagacggcatcaacactgtgattgcaatttagcaattatgtagtactgttaattaatctgttttttctccataatttacctctacagaaaaaaaaaaggatggtgagggaggggtggttggtgaaacactgaaaccccaaaacggatattaactgaaagaaaaaaacatggaattgaacaattttgcaggaagcgtcacatcagctgccgctcccctccgccgggtcgtcgtcgcggcggccgaggaggagggccgcgaagctggcggcggcgcagagcgcagcgactgcgttgccctcgcgcagcaagacgcggagcgcgagccgcgcgatatcggccgtggcgcgccgcccctctgcgaccagcgacctccgcggctttccggcgaacgcgagtagcaccaacacggtgatccatgtgatgagcatggccggcgccgccacggctaacgcggctcccatcgacaggagcccgaagacggcaccgtacatcacggacgcgtagaaagccgccggccacgccgcgacggcgccagccccgccggccgcggagtagtaccaggcgcgcacggactccaccaggcgccacgacgagcagagcagagaggcgtacacggcgaggaagagggccgcccaggtgcgccgcttcctcatggctcggaggaggagggaggtcaaggggggccatgccgacaagccccatggctcggccacatcctgatctgccatggattgaccacggattgttgattccttgctaggcgatggtaattcctgaggttttgtgggttcgattttgctgggcatgcttcccttgcttttcctgggggtgggtcaaggcctcaagggagagtaggagcaatggggaggcatggaagggagcctgtctgtctgaatcgtcgtttgcttttacttttcctttcctttcttttctgtccttcgtttttttctaaattagtactccttttactccatattataattgctttgaatatattttaacaacatattcgtttttttaaaatactactatatttattaaaaacttaattaaacataaaacaatttaactggaaaaataattaaatcgaattataatatgaaccaaagagagtaataccagtcgttagtctgtggcatacatggaataatctcattaaccataacattaaaatttcaatcgtatgctagtcctggccgctaccgccgctccaatcgctgccgctttgcaccaccgccaccactagctccgccacccctcgccgcacaccggcctttactccatttccctgtatcctcgccggaaccaccatttcactgtgaacccgagctctaccaccgctttgacgactccggtagcacaccaccgccgccatagccgttgccacgtagcgcctccaccaccatcatctccaccgcgccccactgcccctcggccgtccctccgccgtcgcagttagtcactgaagcgccgccgcctccctctgccctgagctccgctggccgactccctccgtcgccgcgcctctcggtgaaccgccctccctcctcctcctctccatttattcccctccttccccgtttcccgtgccgccgctcggtgctagtgtcgtcgccggcggtcgccatttggccacgcgccgccgcctcgagttggtcggcgagccaacccgcacccttgccatgccgctcgtgttggtagcctgtggaccaccccgtggtcttggtccatggtgcgccgcccctccccttttggctgacgtgtggggcccacctttggtggactcggtccacgcccgccccactgctgagccaataacttttgttttcctttaagaaaaatatataataattgcgcaataaatcaataataattctagaaattcatttaaatggctcgaaacttctaaaatccatatctaattcatacaaactccaaattaaaccattcaacttgcaaaattcatctaaaattgagctctacatgtttgtttactttttatgtactgtttacttggtttttattagagttttttcctcgttttgcgtgccagcgagtagtttccgtcgttttgaaagatcgcggttgtgaggaaaatagttcagaagatcaaagtgaagaagcaaggcaagtcacacattctccttgagcattttcatcctaatttataaatgttttatcgtttgcaaataaaaattgcatgtcttactaattgcatgtgatcagggtttacctatctgctcgcttttgccatgtttacttgatatctatcctttgtcaaccttgggtaataaatcgactagctcatgttacttatgtgacctagctagaactatatgcttagccatgcttaattaccactagctcatttgatgggataattgcagtattagacctttcagtatcttgacgagctgcgtgctcgagacatctggccatatttcatggtcgtaattatccaactaaaatgcgactgaatggtgggttgtgggtgcatggttttgctagtcgcacccatggcaattaaggaccggttcgcttgaaacccttgaagacacacagtgcttgccacaagcgggaataggtaactgcctgacttgaagtatagctgtcacaccccgaagttctcctcccaagcctaaatttaatttataaacaaccccaagaaaatgcaggtgcaatcaagagaaaaccctaagaaagtaatgcaaataataatcggatttggcatgtggaatttttcttgagttctacatgtcgaaattcactaacaggatttttagtggaattttcagagccctagaaataattttaaccaattaaaattgagcaagcaatattttaattccagggaaaatcctttttcctttttctttttctttttcctctctttttcctccttttttcgaatgggctgccggcccattctctcctttcctcccccctccctcccccctccctgctgggccggccgcaggccgaggcccagccaagccgcgccgccctcctctcccggggtcgccgacaggtggggcccacctgtcgggtccttcccccaccttccgccgttcccgccgcgccgccgcgcccgcaaccgccgccgcgcccacgcctccgccttctccgggccacgtcagccacgtccgcgcgtgcgccgcatctcccgcgcccactcccctctctctcccgctcgcgcccgcgcccgagatggccggaattcgagttttgaatccccgctctctgttctccaccactcccccacattgaccggcgaaatcccgc

SEQ ID NO: 25644 - DNA, 6717 bp, Oryza sativa
ctcttcctctcaaatctctttcttttcgttctttaggtcgtcccggtcgccgtccgccgcgtgtcgacttccctccgtcgctcctagtcgccggtcgccgccgtccccttcggtgaggactccctccccttttctttacttccccgattccccgtgcgtcgccgccgcccgcgctcgccgtcgcctttggtcgttgccgccgtccgctgccgccgctttcgcgtcgcttttgcgccgtcgcctctgccgccggttgtcgtcgccggcaacgcgttcgcgcgtgcgccgtcgccgctagccatagccggccggtcggctttgatgccgagccgagccccgcggccacctccaccgccgcccgtccgattggcccgagggcgatctgggccgtcggtcccgtggaccggcggtggaccacccgcgtggtcccggtccacggtgaaccgctccccctgagccgctgaccggtggggcccgcttgccggcgccgcgccccctccgtgctggcgtcagccctgggatttattgcgcaataaatgatttaaggtttttcttgtatagtaataaacacagtgaatcttctaaaattcataactaattcatccgagctccgtttaagcccactcaagtctcagtaaatcaagaaaaatgtgtagaatccattaaaaatggttttgttctctgtttcagtagtcttatagcctgtttgcaatgtttgctttgtttgtcgctagattccggttcctccgacgctccggtgtacttcgaaatagtcgccgaggtttctccagcagcagagcaaggcaagtcatgcttgtcatttgaacatgttgatcctatattgcaaatgctctattgttttctttcaaatattgcattgttttataatgttactatgggatgtttacctattgttacagccatgctattttgataccatgctcctttgttagcttgggttataacatgaatagactttggactaggaattgcttagccatgcttagttcaactagttcacaatggggaaaatcacattaatgtttagactgttggttctaatggctttgttggattagtgacaccgctttggtgttggttaattaaaataaaccacatggtgggctgtgggtgcatggtttagcaggtcgcacccatggcagttaaggaccggttcgcgggatgccctggaagaacttatcgtacttaccacaagccagcgtgggcaacggctaggcttgtagtgtagctctcctctagtcgacgcatccaggcaagggtgggcgtgatggagcggggcgggccctgcgacggcctctgtcgcttccggattcacctaggcacgagaggggactgcccgttgcccgctggggacgggggtgaaacctgaggtggggtgtgcttggttagagggggttatgcgaagggtcctgtcacggcctctttccggtgtgtcgtggtggcatgtcggcgcacggaaacgtgtcgtggggctgtgtcttgtgggtacagttgtacacctctgatcagagtaaaactattcgaatagccgtgcccgcggttatgggcggtcaaccagattcaccgtgattagtctcaccctagtgtactcttatgaaattggatagtttaggtggatggttgggcctgtcgcaacgtgggttagcgttggacagtggatagttgatactaattaattattacaactatttaaatctttcaacttctgtttataaatgctcgctttatgcaaatgaaccacttcagctcttctttgatgattccctgcatcatacccctattccggtatgacttgctgagtacagtgggtagtactcagtcttgctctacttttcccaaccccagagttcgagttcgggtcagatgaaagtttctccgaggagtaggcttcgtccgtgccgtcgaggatgcctgtggagtggtgttcccgctgcagttttagtcatggcttagctcctgttgtctttcttttcttccgctgcatttttgtaagacttttatgatgtttgtaagacgtggatctgaatgtcaacattgtcgtttgtgtaccccggctggtcctggacggggaatttaatgcacattctgcttgaaattctattcgggaatttctgggcgtgacaatagctttcctctggctaacgttcctaggctagggtgggcgtgatggagttgggtcggctggggtgttcggttgatcggcttccggattcactgtggcacgagggggggctgcccgttgcctgctgggggcgggggcgaaacctgaggtgtggtgcgattggttagagggggttatatgaagggtcttctcacaatcactcgacgtggtgacctgttcatcatgggcacatgatgacactgtgacatgccggtggattgtgtcttgtgggtacagttgtgcacctctggccagagtaaaactattcgaatagccatgcccgcggttatgggagatcgaccagattcaccgtgattagtctcacccctagtaaatcgactcaatgcacttattagttcaggtgggaatggttgggcctgttcaacatggtgtagcattgttcagtggagatttaatataaccttaattactctattgttttactgttttgctcaataaaatgctttacaactgcctttatgcaaatagccacaagccgtccttgtatccccttgcacgtctgcatcattagtgtggcttgctgagtacggtggttgtacttagtcttgctatggttcccccttttcagaagtgtagtgcttctgagctgaagacgaagttagaggaccaaggctcagaccccagttgagttttgcctgtggagtagagctgaagccccgctaggatcgccttttccgctgctgtcattctatctcagtgtgaggactaagtgcctcttctgtaagtattttacgctttatttacgtttggatatgtatatttacttgtcgttttgtgtaccctggctggtcctggacagagatttaatacacaaaatagtttggaaatttgggctaaatttctgggcgtgacaacaagcttgccagcaaatgattggcacaaagaaagagtaaacattccgtagtttacaatgacattaatgcacatgttgacaagagtcaatcaaatcccactcacctctttgctgcccaaaattcacacacactacacattagcgccacaaatacagacaacagttgttcaaaatttaaaacttgatgctcagaaccagcccaccattttcactcccttgctctcactcacaggtataaaaaccaaagctctcaattatactcatattagcaacctattacaccaagagagaccctcaactaatccatggaagaagaggaatatgagattcctgatctcaaccttgatcctggtgtgcaaaaagtgctgcaagatgaaggtgatgggatccctgaccttaacttggatcctgctgtgaaaggagaagatgccttccaatatgaagatgaagagcttcctgataaccaatgttttgctgctcatgaagatggacaaccagaccctgccatgcaagtagttgaactctccaatggctggagtgcacaagaaatttgtcatctaaacatgtagccaggtacggaatcataatcttaatgcaaagcaagttatcctctcttctgctgaaataacagaaatataaatgttgaaagtagcaaagtttgtatgatcaaattttatgaacaaattcataaactaacatgcccaatattacttctttgcataacacagagctttgcagctttgttgttcgtgtcagtcagttgttttttttgactgaaagtactgctaggtctttgcccaacagtgtgattttcatttattgaaggaataattataggtaatatttacaggaagaaacaagagaaaatgtaaaaaaaccctataaagattgtaaccaattaacaacagatcgcttcaggggtccttcattatgtagagatgcagaagaatctcatttgtaaagagagacttccaagaatggaaggttggctgcaaatttctgaagatgagcccatttcgttgtttccaaatgtgccaggcagccatgaagaagatttcctgaaaaccaggctgattgaactgtcatcttgcaaaagctattctttagtaaaattctagattagcattccatgaaattcccagaaattgccaacaagctgtgctaaatggacagttaaagaagagatgatctctggtttccctttggttagtgttgcacagtacacatgatagatcatcatcttgtttggcacagtgcctcctatccaacatatctcttgtattcaatctgtcctagaagaatagccaagcaaagacttttattttcatgacacacttggtcttccaaatccaaatcagaggtctgggtgcttgaattgcagcaaaattgagtttgtagaatcttttgggggtaaaacagctgttattccagatgaaacaccatgaatctccccttccttgttccaggtgaagatgtgtcagttcatcttgaaggttgagatactcacaataggcttgataagagagttgtaacatgaaagaatcttccaatggtctggcacacatagcttgtactgaatcgtctttgtgtagagatgaagcataaagatgctgatattgctgacatttgaattgatcattccacagatctgtccagaatagtactgtagtgcctgtccttatgttgcatttggcagttcctctaaaaacatcaaccaaagcaataatgtcctttaaccaaaaggatcctttgtttattacatgagggactttagctgccaggtaggaattagccacaagattaacccagggaatgtcagctgcagagtaaattttaacaagatgtttcataagcaaggctacattttggacttttaggttaaccatacctaacccccccttttcttttgggttaaaaactctttcccatgaggccaaaggttttctggtggattcagggcagtttcctctccaaagacaattccttcttgcagtatcaatggccttgaacacagtgacaggtaattgtagggagcacatgtagtatgtgggtattgatgataggacagaaattattaaagtcaatctatctccttgaggtaagaacattgaactagctgttagccttctttccaccctatccacctaggggggcaaaatcaatcactcttggccttgtagttcctaggggaagccccagatatgtgaaaggcagttttctaacagaacatcctggaagtcttgcaattagatctgtcttttcttagaaagattgagtggataaagacttgattttgcataactaacttttaggccggtcgactgagcaaacatgtcaagaagttccttgaagcagaagatttccttttgtgaagcttttaacatgatcaaagtgtcatcagcatattggactgaaaaccctgtttactattctttaacatgatcgggaacccacttccatcattttcattaattggctttgaaattaacccaagattgaaagccctgtttactattctttgcaagagttcagcccctagaacaaaacgaagtggagacaaagggtctccctgtctaactcttctcttgcagttaaaagaagtactaggaaccccattcaacagaactgcagagcttgccgaggagaataccatttgcacccaattgagccatttttgtgggaaccccatgctttgcattacagataagatggctgtgtgttcaattgtatcaaaagctttttcaaagtctagcttgaggatgattatttctctttttgactgctaacattgatgaatgtactcaaaagcccatgctaaacaatccttgatggttcttcctttgatgaatccatattggttttcactaaccactttgagaatcacaccttgcaatctgtcagtcatcaattttgtaagaaacttaagacttgatcccattagagaaattggtctgaaatcattaactgtttccggagagggtttttttggcacaagagtgataaaagaataattcaggatctgtaaatctgtagactcagcatgaaaatgagctgcaagtctgtagaaatcttgtgcaatgatatgctagcatttttccatgaaataaccattgaaaccatctgggccaggggccttgtcaactgggattatagagatgagattatcaatttcttgtgtgtagaacatgtcaatcaagcactccaaatctattctaggaacaaaaagctcgttcaaattgaaatctatagttggggagcaagagatacccatcctattcttgaaactttgatagaacaagtttgccttttgatcatgcaggttaactatctgaccactttgattcaaaacttgagaaattgtgttcattctgtacctttctgtggcaatagattgaaacaaattggtgttttcttctcccagcatcatccatctattagtacaatgttttttccaatatattttcctgtattccaaaagttttaagatatgatgcttaactgcctcctgaaattccactcaaataaagagaggcttctgtcttcttccagaagatcatgaaaatcgatcactttatttgagttattcaagagaagcatgattctggacagattcttactccagagcttaagctttttccccaaaattttcaacttgaaggag

SEQ ID NO: 25645 - DNA, 8647 bp, Oryza sativa
  unsure (1)..(8647): unsure at all n locations
agaatacagtggcacctttaagctgatcgacangatcatcgatccgggaaagaagggtacttgttttttatggtgacttcattgagagctctgtagtcgacgcacatctcttcgtctgtgttttcttctctacaaaatcacagaggcaccccatgggaaagtactcggacgtatgtaccccttttctttcacttcttccagctgtttcttaacttcggccagttcatttgctgccatacggtagggtcgcttgtacagaggagtggttcctggagcaagatctatccggaactcaatctctcgcttggccggcataccaggtagttcttccggaaacacatctccgaactccctgacgatgggaatttctgacagtcctatctgatgaagttctgaacttctgacagaggttgggggtgcaaagaaaacaaccggttgttccggccctcggtacagagtgacagtgcgtctcgcgcaatccactactccttggaattgagccaaccaattcatcccaaggatcacatccaagttcttggtgtctagaagaatcagatccgagggaaaaggaatcccctgaatttctataggaacagcagggctataatactttgctgtcataacccctccaggggtggtgatgagcagagggttcctaagcctttctacccccaattgatttctccccacgaatggcatagatataaacgagtgggaagctccagagtcgaacaaaatggtagcagggatggaatgaatgaggaacgtaccaacgatgacgtctggagttgtcagcacgtcctcggccgtcacgtggttcacacgaccccgaatgacatccttaccaccgttgttggagcggggaggcgcttggccttgctggcgcctcggctttgggcatttatccgcaaagtgcccaggctcgaagcagttgaagcacagacactgcggaccttgaacgtccctgcggccttgaccaggctgcacggctggcgtaggaggacggggcgcacgggtcccttgctgactctgctgttgttgcggctgtgggacgcgcaccacgaattgaggtcggggcgcggagcgaggttgctgctgctgttgctgctgctgtgaggaggatccccctggatagggattggtgtagcggaccctttggttagccccctgttggttgcggaaactcgccaagcgacgcttgtgcgactctagttccttgtgcttggcttccaagcggatgctcttgtccaccagacgttggaaatccggatagtccccggagactagacggacggacagctcagggtccattcctgccaagaacttctcttgcttctcctcatcttcccgaacatcctccggggcgtaacgggccaggttgttgaactcatgcaaatactccatcacggagcggttgctttgcttcaactctcggaattcccttttcttaagggccacgactccggcgggcacatgggttcttcggaaagcggcggtgaagcgggcccaagtaataggttgcccctctggctgcgtagcctggaaatggtcccaccatagagatgcgggcccctgcagttggtgggcggcgaagatgactttctcctcatcgctgcactgcacggtgtctagctttttccccacggcatgcaaccaatccaacgcatccacggggttgttggagctagagaaggtaggtgggcggatgcggaggaactcggcgagtttagagtgttggggaggtggtggtggagcattatgttgtggtggattttggaggtggtggaggaaagcattcatcatgttggcttgctgggcgaggatttgggtgagaatggcgttggtgtctggtggtggtggtggaggcggtggtggaggtggaggtgggttgccctggtggttgcggttgctgccttcaggttggttgccatcaccggtattagcatttctcctggtcgtcaccatctgaaaaccccacacagaccagcaaacagagagagctgacaattaaaactaaccacccacgactaccataattcttgaatttattactgttattaaattggttcattaaagttcaagttgcttaagcaaataaaataaagacaggctccgacatatttataccacacaccggcataaccatgccccatacgactctagcagaaaaacaaacaagaaaaacacacgcgcaagcctactaactgcttgtctacagctgcgataggccaggacggaaggtgagcatcagtgctgccaacgccggaggctccatcctcctgaggaaccacgggcgcgggctcggcacgaggggtctcgacgaaacaggtccacgccagggactgacgaacaagctcgggcctggaggtactcttgtgagcggtgatcttctggctgcggcagacgcggcgacgcttggggcgacagacctctccctgggcgatcttgagctgacgcagctgcgcctccactgcgtctaggtccttcttcagctgcagattctcctgacgcagctccaggatcttcatgttgttctcgaccaacccgcgacgcaccatctgatggaagtcgatacgagccgcgtcgtacgcctccaccatgcgcgctagatgcatgatggtagcgtcatcctccgagctagcatcccggaaggtggcgtagtcgcgggctcctccgcgacgagggtggtaacggtagggcgagtgctgcaactcgtccgggtagcgctggtgaagagtaccgatggtgaggagtgcggcgttctggcaagcggcggagaaggaatctccacccgcggtgactgccaacgaagtcctctcgggtgagccagtgaggatcactgcagtaacctcccaagcagcgtggggctctgcatcgtcaccctcctgctccgagagctgcttgccctggtagtccactccatgcggataccccaggacaacgcacatgccccgcagctccaaaacgaagccagtcaggtccagaccaccacggttgatgctgccggccatctacaaacaaaaacaaaaagaaaagcaacattttaaaggtcagattttgacgataaatgaagcagcaggacagagagagactagaggattttcacaaataagacaggatttttattttgaaaatattgctaaggcttgggatctacggctcgtcctagggtcaagggggctctgataccaacttgtcacgaccggaattaacccaacgggcgttccttacgtgcgtgtattattccttgtcccaggaggcaaggtacaccaagagttgatacatttcagagtttatcaagcggaagcgtaaatagttaatttattacatgggcagcgaaggcccagcacacacaaagacaaacgagaaacaacggaagactagggcgacgaccacaggcgcttgacggcaggcacgagctagacaccaaagccttcatcttccaggggctcctcttctgggtttgggaaaaattgagcaagactgagtacaaccaccgtactcaacaagacacacccacaagggcagaataaatgcaagggagtactagggagttataatataaagggttagggtttgcagtaaacagcattaaaagacacttagttgctcaaagctattttgtaaatacggtcctagagctatacaatattattaaacaaggccgtgaacccacacgagcctgccttaacccaaggcctacgatgattcagaccgaactggcaacccgaccctgggtcccagcttgtaccaagccaacccagggcaaccattccacattttagttgttaaacaggttttaagaattaaaacactaacttgggtacatgctcggcttgcccataaccgagggcgcggctattcgaatagattatactctgatcagaggtgtacatctttacccacaagacacatcttcctcacatgtaaccacgtgccacataccaccacggtatacggacagaagacgtgacatagtctccaacccatcctagccatagacaagagtaccgacccaatcccacctacggccggaacccccgggacaggtaggcaagactgagcccctagcagcaggacaccggccctgtgccatgacatctcgactaccgggccgcagctcgtgtagccttcatttgtcctagagatgtccatcgacccccgacttcgtccatctccatccgtgtacttttgtttataaccagactgagccacaaactaagccttacccactagacatgtggaagtacggtagtgctttttgcaacagaggcccgaagaccggtccttatatggccgaggtgctactatcaaaaccatgcaccccgagcccagcctaaaaccattttggggattttgaatagagggggcggtgtgaatccaattccacattaatcaaaccattccatagtgtccaggtgatgagaaaattcccaaagtctagagttgtaaaactacctaatgttgcctaattaaccagcgaagcatctacctaaaatcatactagtggtaccatgagtagagtgtccactagttggggttttgtttattctagggtgaacaaggaaataataataataacaataataaggtcataacaaaggtaaataggcatggctagataaaacagtgataacgcgggaatttaaataaagcgataatgcaataatttaaatcaaaataattttataaactgggattcaatatgttcaaggatgatgtgacttgccttgctcgctttcccaaacgtcggcttcaaccacgacgaagagcggatcttccgaagctgcagcgtctacacgaccaacggaaaagaaaagacttttactctaataaactccatataacaagcaggaacaaagcacaaaaatgggttcttgacttcttaaggaaaaattagagacttgaacggtcaaattccgagttcaaatggccaagttatggctatttgaagtttatatgctctttaaatgaatatttgcgaatttcttcatttaaatttaattaaaaaaaggtttattgcgtcagccgaggggagggggcgcgcggaccgggtccacgggagtggggcccacgcggcagccccacggtccacggtggaccgggcgcacccgggctcacaccggccggcgccgtgggtcccacgcgtcagccgcacccgagggcgcgtgtcacatcctgattttttgtttcaggatttataaattatttaataaattattaatagattttatattaaatgatctttaatttacaagtgaagttaaatgtgggaaataaaatttcctaaaaataaagcatggatggatttaatttttattaaattctccatgattaagtcaactctctgaaatattctcggatttttcggagctgaattcctaaatgatacaaagaacagttcagtaattatttgatcaataatgatctaattataattgttaagtgcttttcttgtttaaaatccttaaattataaattgttgtttaaaagggattattagaaatgattttaaaagcttcgaagagaagatctaattttaatttgttaaatctcaatataaaattgggctagataaaattttgttaaatactttgcttaattctataattcctagatttttctgggatttatttgagctaaggaagtatttttaataaatggaatttcatttcatgaataatttaaattgaaaaatgtttttaaaagtccgttttggctttgggccgaaagccggcccaaaacctctcttctctctctccctcggcccaagtcggcccagttcgcaatcagtccgagccgccgctctcctctctctctcgctgccgctgacaggtggggcccgcctgtcggagccgtcttcctccttcggccgccgccgcccgaaaccctagcgcaagccgccgccatctccttccaaattcggccgcgtctttccttctccggtgaaatctttagaggggaaatgatcttctcgatttcctcttccttttctcttatggaatcaacggctaatttcgtttggaaattcgtggattcgaggtcgattcggatcggtctctccctcccgaaccctaatctttccttctcgtcgccggccgccgtgggcctttgccgccgcctcctagcccctttaaaaggatccccggtgtctcctctacccgccgccacccttgctttcgcctctcgccgtcggaagagccctagcgccgtgagacttcgcgccgccgtcgtcgccgtcgctccagccgtgcgccgccgccgtttcagtcgtcaccgtcgctcgggaaggccgccatcgtggtcgccaagtcgtcgccgtcctcgtccgccccttcgccgccgccgaagaccgccggagaaccgtcgccgccgtcgacccgatctccgccgccgcttctttctcgtcgccggcgctgtctgttgcttttccgccgccgttttggtcaccggtgagttcgccgcgccgcgctctacgtcctggtgccctccgttctcgtcatcgcgccgtcgttcgccggcgagcttgcgctcccgagccgccgccggtgatgacgtcaccgctgacgtcatcgtcgccgttcccgtgagccggtcgtggaccgattgatctcggccgtccgttttggataggatcgatctcgcccgtccgttcccgtgaaccgctgccgtgcacccggtccaccgcaaaccctagccgctgacgcaataatccttcttttccttttcaaaaataaatcattattgcgtcataattcaattaaaatctatataagtgttttaatccgatttaatctttcaaaattcataactaattcatcttagctcagtttaatgtggttcaagttgcaaaaattgtgtaaaataaagatctacatattaaaattgtccataaattgaattaaatttatttaattctttttaaatgggctttaattagatttaatcttgtaaaattcataataaattcatatgaagtcagaatgaggccgttcaagtctcataattcatctaaaattatgatctacatgtttgtttactttttatgtattgtttatttggtttttattagtctttttctttgttttgcgtgttagcttgtcgtttccgtcgttgcgaaggttcgcgagtgcgctggaagtattcaagaagattaattgaagaccgattattgcaatgcaagtcacacagatcctaaacacaatcctttgagcatgttgatcctatatttaaattctctatttatttcaactgtgcatttattttcaaatgtcattgggtggaattaacctattctttgttatggcccttttgttcttgattactttattccttgataccttgggtgattataattggactagttgaactttatatatattggttcaactagatatcagatataattgcttagccatgcttagaaacattagcacactattgggataacttatgactcattattatttaatgatggcttaatgatagttcacgatggtcaatcgtgattggttaattaattacttgccaactaaaacttgataatggtgggttgtgagcacatggttttgagagtcgtgctcatgacaattaaggaccagttcgcgagctactattgtgaaacattaatcgtgccaaccacaagccagcgtgggcaacggctttacctttcgtatagcatggttcattgcagagcaccagactgagaagtggcggagataagcccacaggggtcgctggggagtccatgcctctggttttgagggggtgattatgatccaggaaaggtgcactgtggtgggttgtgttatgcgaggggtaatgtcacagctcctttccgaggtaccgtggtggtactgaggcacatggtggcatgttgtggggctgtgtcttgtgggtacagtggtacacctctggccagagtaaaactattcgaatagccgtgcccgcggttatgggcgggttgagcaatgtttttcgtgattagtctcacacttctcacaataattatggatgttatacctggtaataatttgcttagctcctggtttggagattagatctgtacagccgggtatggttgtttcagaatggttgggcctgagcagcatgggcgtgttgttcagtgttgattaaaatttctgattaattactccactgatttacttctcttaaatgttttgctaaatgctgcttttgcaaatgagactatattatgccatcctttggtatccttgtgcacttgcatatttgctgtgtggcttgctgagtatgtcatatgctcaccttgcaataatcaatcaacctcagttgaagaaaaaggatccagaaggagaagacgtttggcttataccccagttgagctgcctgtgggagtggagccggagcttcgctagattttatttttccgctgcagttttcttcatggtgaggactaagtgcctcttaagtaagtatttagcgttttaattaatttgatgaatctgtatattaaattgtcagtttgtgtacctcgcctgattcctggacgaggattttatgcacaaataagttcagaaatttattagtgaatttccgggcgtgacagcgcgggcggctgacggtcgggcccacgcggcagccactcggtgcgcccggaggcggccac

SEQ ID NO: 25646 - DNA, 1737 bp, Oryza sativa
cggcgcggctcgggtggacggggtcgacggtgctccggcggtcggcgaccgaaacggataggtggacgaggtcggcgaggatgcggcgaagccgaaggaggcggctccgaggtgggaggtggtccgggtcgacgacggcggcggaccggagctcggcggtgacggtggagagagagagcgacggcgcgagctcgattccggtggggagagagggcggtgagtggcggaaacggtggtggggagctcggggagggtttatatagggttgggagtgagagagggcggccggaagagggggaacgggcgcgggagacccggccgccattaatggcgtcggcgacgttaggggaggggtttccaaacgaatccgggggagagagagagaaaaatggggggaaaggggagggaatcccggggaataattccccccactttattgcgcgcggggacggcgggaggcggcgggattcgcggcggcggcggcgctagggcgcggggaaggcggcgggagcggcgggaggaaggggatgacgggtgggccccacccgtcagcgagggtggcgggcgggcccgcccgtcagcggcgcgcgcgcggggaggaggccgaatgggccgcggggagaggagagggagggggaaggagatgggccgagccggcccaagggggagaggggcggaaaggactttttttagagcttttctttttataaaaccattttaactttgtttatttcttaatatttattatttgtgctctgaaaattccactaaaatttatttacgcattttagacttttaggaaatatacaaaaatcctccaagccttatttgacttttaactttgcacattttaattgttggaggctttcacacggattttaattattctatgcataatttagaggatgtattttagagtcgttttggaacgtgacatttatagacctttcgagtgtttttcacttgggtttctttatatattttttcttggtatattaaagctaaagcagtcggctggatgttttattaaacgtcacatctgctcagctacataatcactcggattggatgatatttgttgcttgactatatgtttagtttttaactaatcacatagtcgggggctacacctaattaagtgcatctagccgatgcacctgactttttctatttttcagcccttcccagtctttactcgggagatcaatgcagaaggaattgaagagctcggattatcatttcgtcgactgtaaaggtctcaggggctactatgaagattatggataacccatacctacacggcatgtatagtccgactggatatggggtgccatgtatagatagaatatctttaagaagacttgggttaaattctaaacttgtatatcaaggaaatacccaaaatcctagtcggttacgattgtattttatctgtaactatatattctgttagggatatggactgtattttgtaatacggaccccttcccctatataaggaggggtccgggtgcctctagaggcacgatttttctcctagatcatacaatcaataacacactcggcggatcaatccccggacaggagtagggtattacttcttgaataagaaggcctgaacatgtataaaattccttgtctcttaacacatccacttttccaacttgatagccaccccctttagtattgccgaaatcttgtttcgacagtcggtctcttttccttcgcccaagcaag

SEQ ID NO: 25647 - DNA, 782 bp, Oryza sativa
atatgcattctcattaatctttgctaacactttaaatggtccatcagctctaggcatcaatttagattttctcaaatcaggaaatcgttgttttcacaaacgcaaccaaaccaaatctccaggttcaaaattcaagccccttctacctttgtcacccgcaaacttatacttagcattcatgcgctcgatattttctttagttgtctcatacagttttaacattagctcagcacgttgcttagcatcaaaattcagtgtttcagaagttggcaaaggcatcaaatcaatcggagcacgaggcaacaaaccatacacaacctgaaatgggcacatctttgtagtagaatgcaaggaacgattataagcaaattcaatatgaggcaagcattcttcccacatcttaatatttttcttcaaaacagccccaagcatagtagacaaggttctattcaccacttcggtttgtccatcagtttggggatgacaagtagtagaaaacaaaagcttagtccccaattttgcccacaaagttctccaaaaatggctaagaaatttagtgtcacgatcagaaacaattgtgtttggcataccatgcaagcgaacaatttctcgaaagaacaaatcagtgatatgagaagcatcatcagttttatgacatggtatgaaatatgccattttagaaaatctatccacaaccacaaaaatgctatcacgccccctcttggtcctaggcaatcctaacacaaaatccgttgaaatatcttcccaaggaacagtaggaa

SEQ ID NO: 25648 - DNA, 954 bp, Oryza sativa
aggtcactgcagtgatcctcgctggctctcccgagcggatttctgtggcagtcaccgcgggtgagaattccttccccgccgcttgcaagagcgccgctctcctcgcaatgggcactcttcaccagcgctacccggacgagttgcagcactcgccctaccgctaccaccctcgtcgcggaggagcccgcgactacgccaccttccgagatgctagctcggaggatgacgctaccatcgtacacctggcgcgcatggtggaggcgtacgacgcggctcgtatcgacttccatcagatggtgtgccgtgggatggtcgagaacaatctgaagatcctggagctgcgtcaggagaacctgcagctcaagaaggacttagacgcggtggaggcgcagctgcatcagctcaagatcgcccagggagaggtctgccgccccaagcgtcgccgcgtctgccgcagccagaagatcaccgcccgcaagagcacctccaggcccgagcttgttcgtcagtccctggcgtggacttgcttcgtcgagacccctcgtgccgagcccgcgcccgtggttccccaggagggggaagcctccggcgttggtagcacggaggatgcgctgttgctcaccttccgccctggcccgtcgcagcggtagacgagcagttagtaggcttgcgcgtgtgttctttctcgtttgtcttcttgttggagttgtgtggggcatggttatgccggtgtgtggcataactatgtcggagcccgtctttatttaatttgcctaagcaacttgaacttcaatgaaccaatttaatagcagtaataaattcaagatttatggtagtcgtgggtggttagttttaattgtcagctctctctgtttgctagtctgtgtggggttttcagatggtgacgaccaggagaaatgctaataccggtgatggcaaccaacctgaaggcag

SEQ ID NO: 25649 - DNA, 1484 bp, Oryza sativa
atgataaatgtaaaacttaggcctgacaacaatactgaatcttctgtcattaattatcctccatgtttggcctggggatcttctgtcttctttcaccccccaagctggatttagccacctcctcaggagagaggctgcacatgtctacccccatcttctgtatgaccgaaagtgaacaattagagggagaggagtcagagttcatatcactataagaagtttcattgaaatcagactcctacatactgctatcaataaagagttttgcaatacctgcaaattccttaatctttttaacagactttccccttggcttcccaatgcccattcttgggtccatctgcaattctttggttgcattaccctgcagaagtcttgagctttgtcttctgtagggactatagagaatggccttcccatctttcctctttgcaggtgccttggggggaagtagggcaacaggggccacactgattgggctagccacactgattgggctagatgggggcctcacattgattggtagaacatcctcaaccacccttttcggctgagggggtgaaatagactcaaaaggttgcaaaacccattcaggttcatgctggcccactgaaggagaggaatcaaagatggacttccttggcaggagcaatgtggagaaatagttggacattcttaaagcagcaggaataggcttgccctggatcaaagtctgcatgatgccctttgctttacagaggaagtcaatcttgtccaatattcccttcataggataaaagtaggggtgccttggagcttcatttctggcaattctattcagccgagctagaaattcctggacttgggggtctagaacaggatcctggactgatgtcatcctagctgaagggagaggtgtggccatctgctgaggtagaattagttgtcctgggttttcctcaatctgccccattggatggtcttggccccaggcatcttcttgttgttcatttgcagcctgctgttgctgcactgcctcatcccattctcgagccccctggttcccagggttgccaaactgccagacattaccatcatcggggtcttcgtcagctgcatcatcaggtcctggctgcggaccggcatgggggagatcctcttcaggggggaaatttataaaatccacctgtagcatgaaaaccgagactgtccaagattcatgtcacgaccggaaataacccaacgggctttcctgacgtgcgtgcattaatccttgtcccaggaggcaaggtacaccaaaagttgatacaaatcagagtttaacaagcggaagcgtaaatagttaacttattacatgggcagcgaaggcccagcacacacagagacaaacgaaaaacagcggaagactagggcgacgaccacaggcgcttgaccgcaggcacgagctagacaccaaagccttcatcttcaaggagctctcttctgggcttgggaaaaattgagca

SEQ ID NO: 25650 - DNA, 12542 bp, Oryza sativa
acgccatgagactcacgatcctagcgaagtagagctcggctagtttgttccctccataggtggtcttcacaggaataaatcgggctaccttggttaatcgatccacaactacccatatagaatcatatccaccttgggtttttggaagtccggtgatgaaatccatcccaatttcatcccatttccattctggtacttggagaggttggagaagtccggccggtcgttggtgctctgccttgacacgctggcacacatcacatagggccacgaactctgcaatttcccgcttcatactaacccaccagtatttctccttcaagtctaagtacatcttcgtactgccagggtggatggaataaggactttcgtgagctacctgaagtaccagctgtttaagttctctgttatctggaacgcatacccgatttccgttccatagggttccgtgttcatcctctgtgaaaccagcggctttaccctgtttcatattcttgaggagtccatgcatgtccggatcattcttctgagcctcgcggatttgatcgagcaaggtgggcttggcttccaacgtagccaagaatccgcgaccaactatgcttaggttcagggcttccatctgttgattaagttcgggcgggatgccacggacgttaagagtgttgcaatggctttttcgacttagagcgtcggcgaccacgttggccttaccaggatgatagtgaattcccacatcataatccttgatgagttctaaccatctcctttgccgaagattcagatccgactgggtgaagatgtatttcaaactcttatggtcagtatatatttcacagcgattcccaatgagatagtgccgccagatttttagagcatgcaccaccgcggctaactccaagtcatgggtagggtagttgccttcgtgagtccgtagctgacgtgaggcgtaggccaccacatgaccgtcctgcatgagcacgcaccccaatccttggcgcgaagcgtcacaatacaccatgaaatccttgcgagtatccggcaagattaacaccggcgaggaaaccagcttttctttgagagtttggaacgccttctcgcattgcgggctccacacaaatttctcttctttcttcaacaactgtgtcatgggtcgagcgattttggagaagttctcgatgaacctccggtagtatcctgccaaacctaagaaactgcggacttgagtgactgtcttaggttgcttccaatcagtgacagcggtcactatttcggggtccacagcaactcctttagcagatatcacgtgccctaagaatttgacttcggacaaccagaactcacacttgctaagtttggcatacaattgatgttcccgcagctttcccaacaccagacggagatggtgctgatggtcttcctctgattgtgagtatatcagaatgtcatcaatgaaaaccacaacaaacttatccaagtattccatgaacactttgttcattaagttcatgaagaaggcaggtgcattggtcaaaccgaatgacatcaccgtgaattcatacagcccgtatcgcgtggtgaatgcggtcttcgcaatatcttcttcacgaatacgtaattggtgatatccggaacggagatcaatcttggagaatacagtggcacctttgagctgatcgaacagatcatcgatccggggaagagggtacttgttttttatggtgacttcattgagagctctgtagtcgacgcacatcctcttcgtcttgtctttcttctctacaaaaatcacaggagcaccccatggggaagtactcggacgtatgtaccccttttctttcaactcttccagctgtttctttacttcggccagttcatttgctgccatacggtagggtcgtttgtacagaggagtggttcctggagcaagatctatccggaactcaatctctcgcttgggcggcataccgggtagttcttccggaaacacgtctccgaactccctgacgatggggatttctgacagtcctatctgatgaagttctgaacttctgacagaggttgggggtgcaaagaaaacaaccggttgttccggccctcggtacagagtgacagtgcgtctcgcgcaatccactactccttggaattgagccaaccaattcatcccaaggatcacatccaagttcttggtgtctagaagaatcagatccgagggaaaaggaatcccctgaatttctatagggacggcagggctataatactttgctgtcataacccctccaggggtggtgatgagcagagggttcctaagcctttctacccccaactgatttctccccacgaatggcacagatataaacgagtgggaagctccagagtcgaacaaaattgtagcagggatggaatgaacgaggaacgtaccaacgatgacgtctggagttgtcagcacgtcctcggccgtcacgtgattcacacgaccccgaatgacatccttcccgccgttgttggagcggggaggagcttggccttgctgacgccttggctttgggcatttatccgcaaagtgcccgggctcgaagcagttgaagcacagacgctgctgaccttgagcgtccctgcggccttgaccaggcggcacagttggcgtaggaggacggggcgcacgagtcccttgttgattctgctgttgctgcggctgtgggacacgcaccacgaattgaggtcgaggcgctgggcgaggttgctgctgctgttgttgctgctgcgaggaggatccccctggatagggattggtgtagcggaccctctggttagcaccctgttgattgcggaaattcgccaagcggcgcttgtgcgactccagttccttgtgcttggcttccaagcggatgctcttgtccaccagtcggtggaaatccggatagtccccagagactaggcggacggacagctcaaggtccattcctgccaggaacttctcttgcttctcctcatctccccgcacatcctcggagcgtaacgggccagattgttgaattcatgcaaatactccagcacggagcggttgccttgcttcaactctcgaaattcccttttcttaagggccacgactccagcggcacatgggttctccggaaagcggcggtgaagcgggcccaagtaatcggctgtccctctggctgcgtagcctggaagtggtcccaccagagagatgcgggcccctgcagttggtgggcggcgaagatgactttctcctcatcggtacactgcaccgtgtctagctttttccccacggcatgcaaccaatccaacgcatccacggggttgttggagctagagaaggtaggtgggcggatgcgaaggaactcggcgagtttagagtgttgggaaggtggtggtgaaacattctgttgtggtggattttggaggtggtggaggaaagcattcatcatgttggcttgctgggcgaggatttgggtgagaatggcgttggtgtctggtggtggtggtggagaagaaggtggaggtggaggtgggttgccctggtggttgtggttgctgccttcaggttggttgccatcaccggtaacagtgtttctcctggtcgtcaccatctggaaaccccacacagaaccagcaaacagggaaagagctaacaattaaaactaaccacccacgactaccattattcttaaatttatcactgctattaaattggttcattaaagttcaagttgcttaggcaaacaaataaagacaggctccgacatagttatgccacacaccggcataaccatgccccacacgactccaaaaagacaaacgagaaagaacacacgcgcaagcctactaactgctcgtctactgctgcgacgggccaggacggaaggtgagcaacagcgcatcctccgtgctaccaacgccggaggcttccccctcctagggaaccacgggcgcaggctcggcacgaggggtctcgacgaagcaggtccacgccagggactgacggactagctcaggcctggaggtgctcttgcgggcggtgatcttctggctgcggcagacgcggcgacgcttggggcggcagatctctccctgggcgatcttgagctgatgcagttgcgcctccactgcgtcgaggtccttcctgagctgcaggttctcttgacgcagctccaggatcttcaggttgttctcgaccatcccacgacgcaccatctgatggaagtcgatacgagccgcgtcgtatgcctccaccatgcgtgccagatgcacgacggtagcgtcatcctccgagctagcatcccggaaggtggcgtagtcgcgggctcctccgcgacgagggtggtagcggtagggcgagtgctgcaactcgtccgggtagcgctggtgaagagtgccgatggcgaggagagcggcgttctggcaagcggcggggaaggagtcgccacccgcggtgactgtcagcgaagtccgctcagaagagccagcgaggatcactgcagtgacctcccaaccagcgtggggctccgcgtcctcaccctcctgctccgggagcggcctggcctggtagcccactccatgtggataccctaagacaacgcacatgccgcgcagctccaagacgaagccagtcatgtccaaaccacgacgggtgacgctgccggccatctaaaaacaaagaaaagaaaagcaacattttcaaaggtcagatttttggcgataaatgaagcagcaagacagagagagactagacagttttcacaaataacaaaggatttttatttttgaaaatattgctaaggcttgggatctacggctcgtcctagggtcaaaggatgctctgataccaacttgtcatgaccggaaataacccaacgggctttcctgacgtgcgtgcattaatccttgtcccaggaggcaaggtacaccaaaagttgatacaaatcagagtttaacaagcggaagcgtaaatagttaacttattacatgggcagcgaaggcccagcacacacagagacaaacgaaaaacagcggaagactagggcgacgaccacaggcgcttgacggcaggcacgagctagacaccaaagccttcatcttcaaggagctcctcttctgggcttgggaaaaattgagcaagactgagtacaaccaccgtactcaacaagacacacccacaaatgcagaataaatgcaagggagtacaagggaattataatataaagggttagggttgcagtaaacagcatttaaagacatttagttgctcaaagctattttgtcaacacgatcctagaactaaacagtattattaatcaaggccgtgaacccacacgaacctgccttaacccaaggcctacgatgattcagaccgaactggcaacccgaccctgggtcccagctcgtcccaagccaacccaggccaaccattccacattttagttgttgagcaaattttaagaattataacactgacttgggtacattgctcggcttgcccataaccgagggcgcggctattcgaataggttttactctgatcagaggtgtacatctttacccacaagacacatcttcctcacgtgtaaccacgtgccacataccaccacggtatacagacggaagacgtgacatagtttccaacccatcctagccatagacaagagtaccgacccaatcccgcctacggccggaacccccgggacaggcaggcaggactgagcccctagcagcagggcaccaaccctctgccgtatgacatctcgactaccgggccgcagctcgtgtagccttcatttgccctggagaatgtccatcgacccccgacttcatccatctccaatccgtgtacttttgtttatgactagcctgagccacaaactaagccttacccactagacatgtggaagtacggtagtgctttgcaacagaggcccgagcttaatccttatagtggccggggtgctacttcccacaactggcatgcacccaaaccccaccgaaaacaggttttaggggttttgaaagaggaagagaggtgtgtgtccaattccaacataagccaaccattccatagtgtccaaatgatatgagaatatcccaaagtctagagttgtaaaaccgcctaatgttacctaattaaattgcgaagcatctacctaaaattaaactagtggtgccatgagtagagtgtccactagttgaggttttgtttgctctagggtgaacaagggaataataataacaatagcaataataaggtcataacaaaggtaaataggcatggctaaataaaacagtgataacgcgggaatttaaataaagcgataatgcaataatttaaatcaacataattttacaaactgggattcaatatgttcaaagatgatgtgacttgccttgctcgctttcccaaccgacggcttcgacttccacgaagagcggatcttccgaagctgcagcgtctacacgaccaacggaaaagaaaaaggcttttactctaataaactccacataacaacagaaacaaagcacaaaaatgggttcttgacttcttaaggaaaaattagagacttgaacggtccaattccgagttcaaatggccaagatatggccatttgaagtttatatgctctttaatggatatttgcggatttcttcatttaaagttttaattaaaaaatctcatttattgcgtcagccgggagagggcgcgcggaccgggtccacgggagtggggcccacgcgtcagcctctcggtccacggtggaccgggcgcacacggctgacggcggccggtgccgtgggtcccacgcatcagccgcacccgcgggcgcgggcggctgacggccgggcccacttggcagccgcgagggcacgcccgaaggcggcctcgccggcacggccgacgggagggggacgcgcccgcgccccgatggtcaccgccggcgaccaccggcgcggcggagcggcacccgagagagaggagggaagggggaagcgaatggagcggtcttcggctcaccccggtcgacggcgacgacgggaacggcggccgaagcggaagaaggcggcggcgcggttcgggacgacgaggatgacggcgctccgtcggtcggcgagcgaaacggaggcgcggacgaggtcgacgggaacgcggcgaagccgatggaggtgacgccgagtggggaggaagtccggagcgacggcggcggcgaaccggagcttgtcggcgacagcggagagagaggaagatggcgcgagcacgaatgcgacggtgagagcgagcggcgaacggcggaaacggaggagagaggcacgggagacgtttaaatagggccgagaggaggagagagcggccggaggagatggaaaccggcgcggagatctcggccgccattgattgcgccggcgaactttgcgggcacaaaatcggacgaatccgagggagagagagaggggaaagtgggggaatcgggagagggaatcgcggggaatgattcccccctcattatggcgcgcggggacggcgggatgcggcggaatccgcggcggcggcggcgctagggcacgggcgagcggcggacgcggcgggaggaaggcgatgacaggtgggtcccacccgtcagcgagggtggcgggcgggcccgcctgtcagcggcgcgcgcgctgggaggagccgttgggccgcggaggagaggagagagagggagagaagtgggccgagccggcccaagaaaggaagggggggaaagaggacttcttttagggtttttctttttataaaccttttcaactttgtttatttcttctcaattattatttgtgctctgaaaattccactaaaatttatttacgcattttaggcttttaggaaatatacaaaaatcctccaagccttatttgacttttatctttgcacattttaattgttggaggctttcacaggaattttaattattctttgcacaaatttcgaggatgtattttagagtcgatttgggacgtgacaattcacccccacccccagcactaagaggatcaaagaggacaatctttctcggcacagaatcctggtccctgtacttagccataacaaaaacccttcccaacattctgtcagcatcctcccaaaaagtttacttaccaaaagaggtaactgcctggtgcacatgatggcgatcaatgaaatcaagcgggaaatctaggaacatgaaccagccttctctatggtagttagccgccctccaattaggacattggtcatgattaacaaaaataacagagtgaaccccatcatagaactcgggcggggagaggaccagagcatccctattcatggcagacctcatctggaagaaacctactacagacgggtaccagaagctgttacaaacctcatagtgtagctcatcttgaacgaagtttgcaatgagggcccgatgatgatcccagtcctgctccaaggggattggctctacaatggccacatagaagtcttcatggcgccgagcagggcgttgcgggacagtgaggtcaacccgcgggatgcggaagtcacctccagcatgaacaacaagaccatgcattaggaagcgcagcggattagggttgagattggccattggggtggagggaagctttgggtgggaagcactgtgcgtttgggagaagaagggtttcggggggaagaagacgagatttccggagaaatagttttagccttccaaacagcagtagtccgagccgacggtttcggatttttagggtgcggggcttttgtgggcttagtggtcaaacaataacgggctaaatggcccggcaagagacaggctcgacatctaagcggcccagaacaagaagcccgagaatgacccttttccaggcaacggccgcaaggagtgttttccaaatttgaattgggcgacaaattaggatcccgcatacctttggcatgcgtaattaactccattgccggaatgaacgacggcgagacgttagccaccttggaggttgccggagaagtgactgaaaccgttttactctgcttaaaccactcttgattacaaaggttattccagctattgcctcttgttgaccgagagaagatgtagggaagaccatttggattcagcaagacaatgcacggacacatattctaccaaacgacgaagcatttgccctcacggtggcccaagtaggctattgacgagtgttaaatgtcgattctataccgccaacatctgcataaagatcagataataaaacatccaacatagtgataggtgcttaatctcacatattccacaagtgttggtctatatttgtatgcagataataaaccctgaagttgggaggaaaattagactaatgtgaggagaattatgtaatcatacaaggaggggttgtgaacttcatcgaaacattagtgaatcaacccaaaactccgagaaatggacagaggagagcctagggagtccaccgactgaaggctaggccaggaggggccagcccaagttcgaccgaaccacctggttcgaccgaacccccctgatcaccgctgatcctagggtttggcgaggacgctccagatgctctcccaatgacggttgaggggcagttcggacatttccccttcgcgaaccgtcatacctacccctatataaggacatcatctcactcacttcaacacatacttccaagcttgagctaaattataagaggctttattgtactatattgtatactaaaataggaagagcgtagagtaggagtcggaagaattccggagttgtcggtaatcttctcctatttcttttattctatttattactctgaatttaatataatattcttcttgagtaatttagatttatcttgtgagaattatctcttggttagttcctaaatagcatacggaattattgttcactgtaatcaactaaaatatagtgattgctttgctgagttataaacactaaagtagatagtaattgcttagacgtggtgtttaggtaattgttgtccagtaattgctgcgtataccacagtacgttgaggtgggtgtagaggtggtgacaaccctcgagatcactgaagtcctccctgtccgggtacgtagtagagcgacatctgggaacagcgggttgccagttcctgaagtactgcgttaggattaaaattaagctttctctagacactgtttctcactaataaatcctctctatcctagcctatcatttgcttggtgtccttggatgaaccggaggaagctctgatcacacacgttcccttggattcgatacccttggaatacaccgtaggggaagtgttacatcggtatatctgtgcacttacggattttatctgtaaccgtatcaaataccaagaagcatttctagcaccgttgctggggaacagttgctgatcatttccgaacccagttcatcctcgtatcttttttcattttttttattctaccttcacccctgttatcctagagaagtattcttgtcaactcttctcgaccatggagcaacctctgtttgagttgtctactcctcggggcgaattctatgagccacctccttcatcggagcccatttgtacaactggctatgaaattcgtcccgagctaattagtatggttagggaaaatcctttttctggttttgatctagaaaatccctaccatcatctgcgagactttgaacaagtccgctcatgccttaagattcgtggcatgagacaagaaactgtgtggtggaaattgttcctgttctctcttcaagagagcaaagcaatggtacacctctaccgttggatgtgtaaatggtagctgggaaaagctgcgagacagattctgttttgccttcttcccagttactcgtatcactgcccttcgaatagaaattctcagtttcaagcagatcgaaaacaaatcaatcggtgcagcttggtccatattcactaatttagagcagtccggaccaaccctgtccttacccgagtatgtgcttctccaagatagaggaacctctaacaatcgagccacttgctgaaccatccacttctgctagctcaattgatgagaaggttcccgagcagccgtccatcgagaatgaagaaattcagactccggattgtgccgcaattatgttcagggacggttttgacgaagactatggcaataccctgaactattttagcaagaggaaaccacccgttcctttgtcacctcccgatcctatggaactcgggttcctatgagaaattgtccgggaattgacatccataatgagcaatgaatggctaagggaggcagagctttcatccgaagtaattcggataaatactgctccccgaatcattccttgccatctggaagggaacgatgtcggtattctctatagtccaactgtcggggccaaccttgtctctgagttttttgcattcgcttatttaagtgataaggcagtgacgccgacaaacaaattcttcaagcatccaaatggaaatatcatcgaaggatttgggattgtacaagatgtgcttgtctgctttgaagacagggaggcgatcttggatttcctcatctttgaaatccaagactttgatatcctaatcggactgcccattgagcaacttctcatcaactcaccccgattaggtagcctcaaaataacactaggagagaatgaattctcaattccattttcgcgggcaaggttcaccttgaccgaccctctcccagaaattgagtcagtggaagaggttactgcattttttcctcatgagtctcccgaggcccttctggaagatgaggtccccgaattcatcaaggaagaagcagatcccggtgagactctcgacctgccaatcatggaaccgccacctcgacctccgcttgagcttaaacctctacctctaggcctacgatatgccttcctacacaatgacagagaagcccctgtcatcatcagtgataagctctctgaagacgagactcaacgtcttctcaccgtgttagagaagcatcgttctgttcttggctactcgcttcaggaccttagggggattaatcccgcgctttgcacccatcgtgttcctattgaccccgagggtactccctctatggaacctcaacgacggctcaataatgcaatgcgataggttgtaaagacagaagtcttgaaactcctgcatgccaggattatctatcccgtaccatacagtgagtgggttagcccagtccaggttgtgccaaagaagggaggaatgacggtcattgcaaatgctcaaaatgaactaatttcgcaacgaaccgtaaccggatggaggatgtgtatcgattacaggaaactcaacaaggctacgaaaaagtatcttttcccgctacccattattgatgaaatgttggaacggctggcaaatcattccttcttctgtttccttgatgggtattccggataccatcaaattcccatccatccggaggaccatactaagactacgttcacacgtccatatggcatctatgcgta

SEQ ID NO: 25651 - DNA, 9328 bp, Oryza sativa
gtcattgtctgcagaatctagacaagtcttacaccaatccaagaaaatgacctcgtgcttaattgggaaaagtgccattttatggtctgtgaagtgatagttcttgggcatcaagtgtccgaacgaggaatcgaagttgatcgtgctaaaatcgatgttatagatcaacttcctcctcctgtgaacatcaaaataatccgcagcttcttgggtcatgctggcttttatagaaggttcaccaaggacttgtctacaatcaccagacccctgaccaatctgctagccaaggatgcaccctttcagttcgatgacgcgtgcctaaaatcttttgaagttctcaaaaaggcactcgtctccgctccaattattcaacctcctgattggactctgccctttgagattatgtgtgatacaagtgacttcgctgttggtgagtcttgggccaaaccaaagataaaaagcatcacgcaatctgttacgctagcaaaactctaaccggagcccagttgaattatgcaactactgaaaaagagctgctcgaggttgtttttgctatcgataagtttagatcttacttagtaggagccaaggtgataattgatactgatcatgctgctttgaaatacctgctcaccaagaaagatgctaaacctcgtctcttaagatggattttgctgctccaagaatttgacttagaaattaaagataaaaagggagtagaaaattccatagcagatcatttgtccaggctgcagatcactaacatggaggaacagccgatcaatgatttcttaagagatgatatgctgatgacggttcgcgactccaacccgtggtatgccaacatagtgaactacatggtatccaagtgttgatgtaaaaacacgaggcctgggagatctgcttaactccagtgcaagtccaaaacttgccttcgggtatgctagcgtgacagttgatttgatcctgcaatcaacaagaacaaggacaaagaaaccgcggttaaatccataaacgatagccgatcggccaggtgccgatgacatatcatttatcttcgagccgatgtcatatttgcatcgatcggcaggcattaataaataaaacaaaactaaatctactcgatcggctgtagatattaatgatatataatccttatatcgatatatacttaaatcaagtgattgggatagatcagtcgccatgccgagacagtataaatcacttagatcgaagtatatattaataatgagattatatatattcgtaacatagccgatcagatagatctagcatgtatcggctaatactctgatactgctttatactaagatatcaaagcaaatagaatatatcaaacaaaggcctaatatacttaaatgcaacaagatcttaacataaagggcagattcaacatatcaatgaagcacatagggtaaaaagtagttaaatcaggtaagatcggctgaaaccccaatgttaccctaatcggcaaccaagaagcaggctagaaattgagattctaatcacgacttataggatcaaactgaactgatgtagctataagtatgaaaaatagcacaatatctagacaatcaagccgttggatgtgtcatagagtggtagataccttatataatctaagccaacatcaatatttaacagaggttagccaattatagggtagatagcgatattgccagagattatgtaagatatatgataactcgacgaattacataaacaagattagagtgtcatgaagatggaagcactaatcccgagaacgcaagccgccataacaagttttacctcttgttgaagatcgaaaccgatgcagctcaacccaaaagcaagaactcgtcgaaacaaaacgaaagtaaaatgggtggcgatgtgctgagattgtattgaacgtgtgttaattcgattacatgggggctcggggtctatttatacacgagaattacaaaacatgtccatatcggacatgactcttatctctaacaaactctaagataccataagtctttgcagcagacttttgcccaaacatatctctaaggaaattacataaaatatcctaattaatagatacaattgccttcttaggactctatccatgtgtggcaatcatcttgaaacatatcaactcaacctgatgatgtataccgagttgtattgtcggaatcgactgtatcggcttacctagtctgactcggacacagccgatcctgatcgtagccgatttggactctagccgattcttactctgtttttgaaatgatcttcgtctttgattccgcctcgatctaatcttcatctccaatgctgatattaccaaatttggtcgataacaccaagtacataccaccaggggaaaatcaatgaaaactgaagtatgaaagtcgccgtcacatatgggatgagccatacctatatcgggtctgctccaatggcctactacgaagatgtgtgccaactaaagaaggactggagatcatagaacgatgccatgcctcaccttatggtggtcattacggtgcattccgcacccaggccaagatttggcaaagtggtttcttctagccaacaatgtacgaagactcaaaagaattcgtcagaagatgcaccagctgccagaggcaaggaggaatcactgctcgcgatgcaatgcccctcacatacaatctgcaagtcgagatattcgatgtttggggtatagacttcatgtggcctttccctaagtctcgcaactgcgagtacattctggtggcagtcgactatgtctccaagtgggttgaggctatgccgtgcagcgctgcggatgcgaagcatgccaagaagatgttcacaaaaatcatcttccctagttttggtacccccagaatggtcataagtgacggaggttctcacttcattgacaaaacctttcgagacctcctacaagaaatgagagccaaacacaatgtggccactccttaccatccacagaccagtggacaagcagaaacatcaaacaaacaaatcaagaatattctgcaaaagacgatcaataaaatgggaacaggatggaaggatagattgccggacgcactgtgagcatactggacagcatacaagacacccattggaatgtccccatatcagatagtttacgggaagccatgccgactacccgtaaaacttgagcgcagagcatactgggccattaggaattggaacatggattttaagcgagctggagaatggagaaaaatgcagatcgctgaacttgaggaatggagagaaaaggcttaccacaacgcaaagatatacaaagaaaggacgaagcgcaggcatgacaaaaggataaagatgaagaaatttaagccaggagacaatgtactaatgttcaactccagggttaagctttttggccacggaaaactgcgcagcaaatgggaaggaccgttcgacgtcatcgacacctctttgcatggggcaatcacacttcgcgacgaataaggtaacatatttaaggtaaacggtcaacgcctaaagattttccttgagccaaatgaaactttagatgaagaagtggatgttactgaattaatttattatgaaccatgatgatctcatctattgcatgcttaaaaccctgtatagttgtcatttttgtacttaaaataggttttagtgggcctatgaaaaatttggtggcatgtcgaacccaccattgttcagccgaacatgatggttcggccgaaccagggcggcgcccgatcagccccaattttgaacctcagtctcccccgctcgtccctagtctatttagatgcgtgtttggaggtagaacgttcggatcacaccagaacactccttcctcttttcctccacatttgcacactctcctctccaattcaacacaattcctcgaatttccactcatatccaccaatggctggcaaatccctaatcccattcatcggcccttcctctaattccacttataacctcaccggagagccgacaccagcgaatcaattgatcccgatggaagaatacaccatggaaggggtaattgcacagtgggagcagcccctcgcagcagtgctgggctcccctgcgaatctggagcccgtcggcgagctccttggttcggccgaacccttctcggccccaatcggcctcccgttcggcagcgcgatccctctcccctcgctatgttacaagaacaaaaatccggggggattcgcctgcacgacggccgactacggcagaactcagcttgttaaaggcacgatgtcttttccaagatgacgggaaggccgcaccgcctcccgccgagcgctatgtgggcgccctcttcaccaaggcaggggatgaggtgctccacaagtataccacacccaccgctactccatccaccccaaaaggggagcgtttctgcattcagggagtgtgaactcccggcggtgggtatggcaaaggtttactccggcctttgatggcatcggagaaggagagggcagcggaatcccgtagccttccacctaagaaggtgaagtatcgtttgacgccccctccaattgtgagggctctcggccaattcctagaggatgaggtgaagtcaccggagccctcgatccacaagctcgccgctcaagtgaagaaactccgcaaggagaacgtagagcttagggattgcaatgcggagctaggggtagaacttgctgaaattagaaataatttcgatatccttagtcgcggtttgtgcgctaagatcaagcgtgcgttcatagagatgggaaaggaaaataagtattatgctaattagatgtttcctttcccatgaataaaatagtagtaggtgcttagttttatttttgcaatcatgtaagcacttgctatgaataatgtggcacattggtgtttaccccaatgtttgccaaagtttgttttttgtttaataaaattcaggttttgaataagtgtgggggcgatatcccagcttctgacgtgcatatgctctgaaaattgttgaaatatctgaacacctggaagcactcaactctgcagaaaattgcagaggaatcgggcaccagagtggttcggccgaactaccaggttcgggcgaaccagtgctggccccagtccctctcatcttcacaggtaagcaggtgagcacgtcctttatctgtatatctccaccatggtatagtactagagctgcaaatttagaaacaattggttcaagcataagtgaaagataaaatttccaactattgaaattcttcatgtgattgatcttttatattcattattctcagctgaatttgtgcttgtgaacaccatccatgtttagggaaccttatacatctaggtaattgctttatgtgagatgattaagatgaaaggactccttgtaactttgttgtgactcttgggaatttgttttcaaaaataaactgttttaaaagctctatcctccaattgactttaccttatacctaccaaggccatatgcaagcggcggggaaggaatctccacccgcggtgactgccagcgaagtccgctcgggagagccagcgaggatcactgcagtgacctcccaaccagcgtggggctctgcgtcgtcaccctcctgctccggaagcggcctggcctggtagtccactccatgtggataccccaggacaacgcacataccccgcagctccaagacgaagccagtcatgtccaaaccacgacgggtgacgctgccggccatctacaaacaaaaacaaaaaggaaaacaacattttaaagatcagattttggcgataaatgaagcagcaagacagagagagactagacagttttcacaaataacaaagaatttttatttcgaaaatactgctaaggcttgggatctaaggctagtcctagggtcaagggggctctgataccaacttgtcacgaccggaactaacccaacgggcgtttccttacgtgcgtgcattaatccttgtcccaggaggcaaggtacaccaaaagttgatacaattcagagtttaacaagcggacgcgtaaatagttaacttattacatggccagcgaaggcccagcacacacagagacaaacgaaaaacagcggaagactagggcgacgaccacaggcgcttgacggcaggcacgagctagacaccaaagccttcatcttcaaggagctcctcttctgggcttgggaaaaattgagcaagactgagtacaaccaccgtactcaacaagacacacccacaaatgcagaataaatgcaagggagtacaagggagttataatataaagggttagggttgcagtaaacagcatttaaagatatttagttgctcaaagctattttgtaaacacgattctagaactatacaatgttattaatcaaggccgtgaacccacacgaacctgccttaacccaaggcctatgatgattcagaccgaactggcaacccgaccctgggtcccagctcgtcccaagccaacccaggccaaccattccacattttagttgttaagcaggttttaagaattaaaacactaacttgggtacattgctcggcttgcccataaccgagggcgcggctattcgaatagattatactctgatcagaggtgtacatctttacccacaagacacatcttcctcacgtgcaaccacgtgccacataccaccacggtatacagacggaagacgtgacatagtttccaacccatcctagccatagacaagagtaccgacccaatcccacctacggccggaacctccgggacaggcaggcaggactgagcccctagcagcaggacaccggccctgtgccatgacatctcgactaccgggccgcagctcgtgtagccttcatttgccctggagatgtccatcgacccccgacttcttccatctccatccgtgtacttttgtttataaccagactgagccacaaactaagccttacccactagacatgtggaagtacggtagtgctttgcaacagaggcccgaagaccggtccttatatggccgaggtgctactatcaaaaccatgcaccccgagcccagcctaaaaccatttttggggattttgaatagaaggagcggtgtgaagccaattccacaataaccaaaccatttcaaagtgtccaggtgatatgaatattcccaaagtctagagttgaaaaaccacctaaagttgcctagttaaaagcgaagcatctacctaaaatcatactagggataccatgagtagagtgtccactagttggggttttgtttattctagggtgatcaaggtaataataacaataacaataataatagggtcataacaaaggtaagtaggcatggctaaataaaatagtgataacgcgggaatttaaataaagcgataatgcaataatttaaatcaacataattttacaaaccgggattcaatatgttcaaagatgatgtgacttgccttgctcgctttcccaaacgtcggcttcaacttccacgaagagcggatcttccgaagctgcaacgtctacacgaccaacggaaaagaaaaggcttttactctaataaactccatataacaagcagaaacaaagcacaaaaatgggttcttgacttcttaaggaaaaattagaaacttgaacggtccaattccgagttcaaatggccaagttatggcatttgacgtttatatgctctttaattgaatatttgcgaatttcttcatttaaattttcaatttaaaatcagatttattgcgtcagccgaggggaggggcgcgcggaccgggtccacgggagtggggcccacgcggcagcctcacggtccacggtggaccgggagcacgcggcttgcgccggccggcgccgtgggtcccacgcgtcagccgcacccgcgggcgcgggcggctgacggccgggccccacatggcagccacggggcgcgcccgaaggtgacctcgccggcacggccgacgggaggcggcgcgcccgcgccccgatggtcgccgccggcgaccaccgacgcggcggagcggcgcccgagagaggggagggaagggggaagcgaaagggtcggtccacggctcaccccgggtcgacgaggacggcggaaacgacgaccggagcggaggaaggcggcggcgcggctcgggttgacgaggacggcggtgttccggcggtcggcgggcgaaacggaggagtggacgaggtcggcgaggacgtggcgaagccgaaggaggcgatgccgaagcgggaggaggtccggggcgacgacggcggcggaccggagctcggcggcgacggcggagagagaaggcgacggcgcgagctcgaatccgacggggagagagagcggcgagtggcggaaacggtggagggaggcacggggagtttttgtatagtgttgggagggggagagagcggccggatgagggggactcggccgcggaagatccggccgccattgatgcgccggcgaagtttgcgggagtgtttccaaacgaatccgagggagagagagggaaaagtgggggggaaagagagagggaatcacggggagtgatctccccctctttattgcgcgcgggggcggcgggatgcggcggaatccgcggcggcggcggcgctagggcacgggcgaggcggcgggtgcggcgcgaggtaggggatgacgtgtgggccccacccgtcagcgagggtggcgggcgggcctgcccgtcagcggcgcgcgcgcgggggaaggccggatgggccgcgggggagaggagagaggggggggaactgggccgagccggcccaagagggggagggggggaaaaggactttttagggtttatttcttcttaattattatttgtgctctaaaaattccactaaaatttatttacgcattttaggcttttaggaaatatacaaaaatcctccaagccttatttgacttttaaatttgcaccttttaattgttggaggctttcacatggattttaattattctatgcacaatttcgaggatgtattttagagtcgttttgggacgcgacaaacctaccccccttaaacggaatctcgaccccgagattcggaaggactggcgaagagatcgggatgggctgccttcagctcgtcttcacgctcccaagtagcttcttcctcggcgtggttgctccactggaccttgcaaaaacggattacccggttcctggtcctgcgctccatggtgtccaggattttcactggcctctccacgtaggtcaagtcttcgcgaacttcaatttgctctgagtcggcctgctcggatggcactcgaagacattt

SEQ ID NO: 25652 - DNA, 22900 bp, Oryza sativa
gggggggggaactgggccgagccggcccaagagggggagggggggaaaaaggactttttagggtttttctttttataaaaccattttaactttgtttatttcttcttaattattatttgtgctctaaaaattacactaaaatttatttacgcattttaggcttttaggaaatatacaaaaatcctccaagccttatttgacttttaaatttgcaccttttaattgttggaggctttcacatggattttaattattctatgcacaatttcgaggatgtattttagagtcgttttgggacgcgacaggactcatggaaataaagtttgctctcaaaacatcaagcaaagaaaatatagccaagccccctccacaatcatgccaagagaaccaatttggagagaaagtgtaggaaaaaggaggatcatttctttattccataattccacaaaatatttgacttttccattttccaccgtaaataaagacccttgatctaggagtatgactaatgatcttcttgagtccatatttttggctttgcaatatatatgatgtaggcatgtcaccagtttatccctaccaagcttcacatatcagccttagaataggggtaaattcttgcacactttgcgttggtgaggatccaaatgaaaatatacatctttgagagataagagagaaagtcaaatatgaggaaaagagatagtttgcgaaaattcataaaaatcccatgagtttgacagagaagcaagaaggactgaaatcaagatcgttccatcccaaaaatccttcttttatttattaggagagggcatgattacattttttttaacattatgctcatgcttgatggagcataaattctttttttttcataaccatgcctttccctcctttctttttttttctttcaaaaggatttttctttttttaggagaagaaagcacatgaaagcatggagaatttattttggtggtaatatgcatatggaatggaatattgcttagctcccagtgtaggagtttagcatgtgcatatatgtgggtgtatgatcttgatcatagagcatgagaagtatctacacaagtcataagagtttgacaaagttcaatggaaagtcaagcaaccaaaatgtatatagtttaatcatgatagcatatttttggctctggtaggaatttatatcaaatgaggaactttcaattttatcattttgaaaacaaatcatcggaatttaagtcaaactagtatcaggatcatagctactcttatttactatctcatatctcacaatagcttggacttaaatcagcaagtgcagcccatttaccttaggttcccggataattattggctacttatattcaatctttgagagagcacttaccaagaacccatatataagagatataaaacagagcaacaattcatcatttcaacaaagagaactagctagtcttacctagcatgactcaaacctatcctatctttttggtattttctattttgcaaatttttatgttttttttgagttttataagatgcaattggaaagcaagtatgcaattggaaagggaaatatgcaatgggatacaagttaccttagtggggggagagatgtctccctccaagcttgccttttgctcagggtccttgataaggattgaacccctgaaatcgaaagtacgcgtgaaggtcatcatgatgttactgcatcatgttgttgatgttggcgaactgagcattagcagattgttgccattcttgtgtttgagctatgtgttccgtgaggttgtactggatctcccctgtctgcacatcaagggtgtccattgtcctagtgatttcacccaagtcccaacgagaggaacttgagcaccattcacttggagatggaggcacaccacttgatctagagggttggttgtccccccagtggatgtcatgaggcgcatgccaccggtcctcactggcgcttgaccaggttgagactccgatgctatggcgtggagcttggatccatccaggtgcatccctagttggtgcccaacctgcctcatacatctgcacgggtgtcgaggatgatgaactttctcgttcgttccttgtcatgttgcgcgtctccctgtatgttccacctgcacgagattcttctatggtctgcaggggaatggttagttcatggcagttgtacaaatgataccccgcatttggcaacaggatttcatttgttaaaccggggaaaaagtatatcaaaaatccatctgctccatgtttcaaaatatgcccttgcactagataggcctcatcaatacgcggacgagcggctgagataaaagcaatttggtcgctaacgacccctagcacgagcctaagtgtaggattatggatatcatttgttgtcaaagccacaactgcatacgtcgaaagacgtggttactcaacagtagttggaaaagaagtaaaatgtattaaattgagaatttttcttgggatccccctattacatggccctatggggctagttatagccccattacaggttcttactactagggttttggttatatagggaatttacatggttgcccgtatgaaagggacatttacacgggtacacagtgtaattgaggttcatgggcccctaacgggccgttaggcgatcgtcgacccaattagcccctaggcttgatgggccaggatggcttcttcggtcctcccggggccgaacttgctacggcaaagtcgtctcccttcggcatatactcttcgccctacatccttcgcccaggaggcctctggcttggtgaggtacccgtgcgattccctgcctctcgccgtcgttgtttcatagtcttcgccatgggggacttcgccctgactaaccttgacgtctcgggcttgaatccccactggtcgcatggtttcagcaggtttggtcaaagggcctcatgccatatcgccaacaagcccctcacgggcaagggtgagataggagcttcggccgagaccgtgcaaaccatgtggtatggtatgtggcgccccctttcgactggtgctcctgccccccattctctttttcaccgccacacttgtcattttcaccgcgcgcgctttcttcctctgttcttcctctcacggcgccccttggcccttcagacctttcactcgctctctctgttcgcaactgcacactcccttcgccatggctccccgcaagcctaacccctcttcggcgaaagggaccgaccccggccggattgacgacgacaccaccgcctatttggggatttctctgatagacaacggcgagttggcaaagttggtcagctctagggcgttggttgagggacaggctttcgccctggggaaagccgttgtaccgaagcccgtcgacaaccggacggtggtgttcgccgtgttttttgaggcggggctccggtttccatgcaactcgttgttgccggagatcctttgccttttctaggtggagctcccacagttgagcccgtcggcgctggtccggatcactatcttcgactgggcgtgccgaacttccgggtttgagcctaacgccgaactcttcgatgccatatttttcgccaccgtgaattcgaagacggtgattaccccggccgggatgaagaagacagtgttcgggagcgtgaactttaatgttcgccccgagcactccaatctctggccggtgaatgccgccatgtcgaagtgggaccgccattggatggcgaggtggtttttccacatcatccccttcgaggctggttccgagtcagcgaaggccctccggtgccggcgcaaggcgattgcacctaactggaaacccaagatcgccgtggacggtgctatggaggcgtggttcgctctgctgcgtaaggtttgttcccgccttagctgtcatgacttggtggagactgcatgcttcgcatctttcccctctcccagtcatggcaagtcgcggttgaccaaggcgaagaggttgatggtctgtcgaagttggttctccctaaggggacgaatggtaagactgcactttcactacgcattcctgttcttggttattttgcttcgttcgacacttaatgtggctgcaccctctattttttttgcagtgttgaccctcaatcaggccgacgccgaagcccggaagatgatcggcgacgtgtcggtcgtcgagtatagccagctcctgacacgataggcggtcggccgggcgaaccgggtttataacggcgaattgcctcccgggcgaacccccacaaggccgacgacgatgcagggccttcgcgaaagtggacgcgcggacaagtgaagcttgcccctaggaagcgaagggttcctgcttcctccgattccgacgccgatgatgaggacgacgtcgaagagcgtgacggcaagtaggaaggggaggaaaaagaggaggcggaggccgtggccgaaaaggccgcggacgaggcggtcgaaaaccgcgtcgacacccctggctacactcctactccaagtccaggtcacaacgagactggggtggaatcgaatagctcccttcttcatcgaaaggatttggagggggcgaaggcgctagtagcgttttcggcaggcaaggcggcgaagggaggcccagttaaaaagatctccaaaaagaaaggactcgtcgatgtcgctcgcgttttcagcgacgacgagtcttctgacgagactccgacttcgcccgctggccacagcttgtacctttcgaccgctcccattcttccgctcgacgctagtggggcaggtggtagcgccgccgctggggcttcaacctccgctgaccggatcgtgatggctgcggcgagggttttcggaagccctctgcgtcagccggttgtttcaccgctagtaaaggcgaaggggaagggggctgccgtcgaaacatctgcctcggagtactccctcgtggtgccccacttcgcccctggtgatttcgagacccgggcggatcttattcccttcgtcgagggagtaagcaatcttgtcttacctgcctgcacccagagcctattcaccgagttgaacgagttcgatgaagggtgttccgctattaaaagcttggcggttcgggtacgccttttcgctctctttttgattttcctctccttttttacatgtcccataattaacatttattctcctcgcccgctcctgtcttggatctagattcttgcggcccactgttcgacagagcgaactgtgcgggcccatcttgatggatttaagaaccgtcttcgggccaaggatgacgaaataggccgcaagagcttgaagatggaggccattgccaaaaccctcaaagaggcgaaggccgaaaacaagtggctccaaaccgaattggagaaaggaaaagaggctagggccgaggtcgatcgcctcaaggccgaactggagaaggggagagaggccagagctgaggttgatcgccttcaggctgaactgaagaaagaaaaagcccattccactatgctgaccgactattataacctcactaagccgaagatggaggctcttcgtctggaggtcagcaaggctgaggcgagcactgtggaggagtcacagcggttttcacgggagatggcgaaagccaccgaatccgcaagaacggcgtgccaaacgctccgccttgcccttactgacatgggtgcaagggtgcgaggagtccctgccgaagacgcctcagccttcaacttcttcgagtggactcagcaggctggtggtgcggtttcgaactgcgccactacatacagcgattgttgtgtgcacgtatcagcggccttcactatgggccttatgtagcagttcggctgtgagcacgtcaccgagttccctaactatacgaagggggactgggaggtaagtgcgcagaacgtttcgccgacgctccgtgtgtggcgaaagcagttctggcagaacgacggccgatccaccgccaaggcgcgcctgctggagcaattggcgaaggcagaggcggcagaccggtgtgaagaagaggacgcggcggccgaagggggtggaggcgatgcccaggatcacctagaggtgtgaggccctccgccctttccttagatttttgtagtttttcttcttccttttgtgtttgccgagagaggcgaatgatgtaaattcggcgggctggccctaaccctccttattgtagccgaaaaaggccccttggatatttggaatgtttgactcaatcttagccactttttatggtcgatgcctttggcgtatatgattacgccactttcgcattatgtaatatttgctcttttttcgcccattcttactatccaattcgtcttttgccctttctgcattgtctaccagggtgtttgctgaaaattgtgcattcggcccccttctgggagttggcgaagcaaaaacgagaaatttgtggcgttgaaggatctgctaaatgtacgatgcccgtttcggcatgtttatcgcgagatggtgataaacggccacagctataaggtttttaaggttgctggctggctacgggcgcaccccgggcgaaccttagaagattatgatcttgttcattcaaaacgtttggaggatatggctagcttttggcaaaaccatcagaagactgatcggcaggaggcgatctcccagcgtcgttacagtctagtctgtgtttcgcccccttctcctcttagggtcgtgtatgatattagtagtgatgacgaacccagttcgtctgaccattccttagagagagagagagtgattgtgggggcgaagatgtaatttatctgtaagctgggctgtaaaaccattgctttttcttttacttgtaccatatttttctttcgaagttaacaaagatgtgttttatttccttttcgctatgcattgtcactttgcgtgctttcgttgggtcagaacgtgttggccctttgcgtatattagcgaaataggttttggcttttcagctttcggcttccgttttcgatccattttgttctacattgtaggaagcactcgtgcattccttttgatcgagtgtaacggtgttcggttagttgttccccgaaacaagctgttgcggtttcaacgttcggcgagcgatgcttcgaccgatttgtttcgcccccatggcctttttcgctgatcaggcgtttgccttggggtttttccacaaattatcaatcacacaaataaataagacgaaggtggaggacacagagattttattatggttcaggcctccatggtagataatagccctacatccagtttttcgtctttttacattttcctcttttttttctttttttccttttttcttctttgccgaaaggtttacatagtgtcgaagggcttacataacgatacatacatttttacaatttggcgatttgggtgccacccgttctagacatagaaaagcttgagagaggcagcgttccaggaatggtcgaactcttcgccttccagtgtcaccagtcgaaaggatcccatactggacttgtccttgatgaggtacggtccttcccacttcaattcaagcttgccaacagctatcgggttcgcctttggcaaaggagatgcagcgaagcaagggttggagcaccccggagcaatatagctggctcttcgcttctgcttcatcctccgggagccaaccgttcttgaggtattttacgaacggggttcaccagtcctttaggtcttcacacagctctgcctggtcgattgccatgatgtccaggatctctatgggcacacttggtgcgtacaggacctcaaaaaagatgtctggcgaatgcgggcctccacaagcagtagatttcgccagggcgtctgcttcttcattctggcctctaggtaagtgttcgaccgttatgccggcgaaacacttttccatagatcgaacagcctcaagatacctcttcatcccttcttcttctgcctcaaaggatttgtcaacatgacttgccaccaatttggagtcagttcagatgagcaagcaccgaacccccaaagctttcgccttttttaggcccaacagtatagcttcgtactctgccgtgttgttggttgtgtcgaactttagccttgcggtgtactgaatcgacacgccccctggcgaagtgagcactgccgcaacgcctgcccccttgtgtgaccatgagccgtcggagtacatcacccaaggttgttcgacaggctagggttcaagggcgaatgtcggtgtccattcggccacgaagtcagctaggacttgggacttgatggcagtgcgggcgacaaaatgcaagtcgaagggagataactccgctgcccacttgctgagccggccagtaatttccttgccccggagcacttcgcccaaaagatactgcgatggcaccgtgactttgtggccctgaaagtagtgttggagcttgcgcgaagccatcactagggcgtaagcaagcttttccatttcgatgtatcgtatcttcgccccttgcaaagtttcgaagacgaaatacactggtttctggcctgactctgtttcttgaacgagggctgcagtgaccgccactggcgaagctgctaggtaaagtagcaattcacttcccagtgctgggctgaccaaagcagatgtgctctgtagatattgcttcagctcgtcgaacgctgcttggcattcgggtgcccaggtaaattttcccgcgcccagagggtcttgaagaagggcaaacctctttcggctgcttttgagaggaatcgattgagtgccgcaattcggcctgcgagcttttgtacttcacgtacgctcgacggggggttcatttgctgaatggcatcgattttttttggggttcgcctcgataccccttttagaaacgagaaaacccaacaacttgccctcgcgaacgctaaccactcagggtggtcgatctcctggatcaccctagccttgcacagcatttgcacctcggctttcgctgcttcttggcgattagcggacatcttgcgcagcttttgtttccttggcttggcatccggcttgcccgccagatgatgcatgatgaggtctgtcgaaacacctcccacctcgtcggggccccaggcgaagatatcaatgtttttcttgagcacctctaggatgatctcagcttctcttacgcccatgtcaccccccagtgatacaagtcttgtgggataggcgtcgtcgacctgcaccttgatcaccctgccgtgaggggcgggcttcggcacgtgcttcacccggtcatgcggttcggcctcaacattgtgcactgctctgttgattacggccaaatcgccctttgatgtagccgaatgttgaagccccttgaccacgatcactccttcagggccaggcatcttgagcttgagataattgtggtcggagatggcttcgaacttgttcaaggttgcgcggccgaagattgcattatagttgtacgggatgtccacgacgtcgaacagtatttgctcttcgcccctgttttcacctgtgccgaaggctaccaccaagtgtgcttggcctagaacttgaactgcttctccgctaaaaccacgaagccgccggtgcttgggtgagggctaagataggcaaccccatcgtcgaccgaacttcctccgtcgactaggattcgctgaacttcgaagccagtacctcggccaagatagctctatcttgatgtgggaacagcactccttcggcatcttctggcccgaaagagatctgctggttcaaatatcgcggggcccctttgcctgccgaagtgatgttgtgcaccattcacagctgcatcttcttttgccgtcttgacagttgattcggcgggtcggcccttgtaatcacttggattactctgcactgcacatcttgccactgttcggctgggggtgcttgttcttgaataccttcgtgaggcgcttcgactgctgctccttgctgcggccttggatcttgcacgttgccacgctgcagaatgtttcggcattgctcggtggtgtgcgaagagcatccgtggaaggcgcagtaaaggtcttttctgaccttcttgcgaacgggctgttgatggctgcttgcttgctgggcgttgaactccttgcggagtgcttgaatttcttcaacagccatcacggccttgcctacacggtcgtttctgaatttcctccaagtcatgggagcttgacctggccttggcgattatccttggttcgctggctgtggctagcgaacagcgagaggagccgattcggcgacctgtgcttgtgcttgggcttgagcagcagcgacagaggccttatcatactcagcttggattgcttgccgtcgcttggtatcctcttcgccccttgcgtatccgtcaatgatgcgaagcaggtgctcgagtgtctgcggctccttattggcgatttttcttatgagttcgccctcaagcaacacagccgaagcggcgttgatgacgaacgcctcagttatgtcctaaacatggcatcgggcttgcgagaagcaacgtatgtactcccttatcgactctcccggcctctggcaaatgccgagtagatgttgctgcggctttggcttctcataggtgcctcaaaagttaaggacaaagacgtcgcacaattgctcccatgagtaaatgctgttagctagtaaattgaagtaccaagagcgtgcgatgccatctagagcgagatgtattacctttgccttggtattttcgtcaccatgagcggcttcgatcgtggactcgtagatggacaggaactcttttgggtccgtttcgcccgagtatcgcggaatgggtgggaacttgaattggggtggaattggacgaatcttgattcccccacttagcggcagccccgtttcgccccccgtctttctcacggcaccttgctgcggaggaccgtttggatatggcgtggcgaagtgcgatgtgatggcttgcacgtgcagttgggccatagtgttcggctgcccggccctaaatggtgacgcttggtgtgccgccatggatgggtcgaacgaaggctgggtccatgccatggcgatcttgttcggcgcctgattcgctccgaagcttggtgtcggtgcctgtggtcggatggttggtgcttgagtagcattgctgaagtcgaactacggtccttgactccatggcgaaggccctggaccaggaaggttcgatggtagccaactgggtgcaccttgacttgtgtttccctccagctggaccgaaggggttgcttctgaaatgttttagggttggttgagctactgaagaaaagcttggagctgcgcctgcaaggccgaagccccttctgccattgcttgcgacatctgaccaagtggcggggggcgtacttgggctcgaccagccgaacttgtggctgtacaagaagggtcgggtgtactgttgcgaccgaacgctgtccggcgcagtacgctggtgcttgcacagcttgtgacggaagggcttgaatcggcgcttgcaggtagaccttgggtgggatgtccgccgaatattggagaatggggaccgaggcgaccttggcttgccgggccgcttcgtacgcctgctgttgctcttgcatttgacgaagcatgtcctagagtcgcgccatgttctgacgcatggcccccatgtcggcttcagcttgcgcttcgaggttggtgttgacttgtgcggcggtaagcgcggtcgaagttgtagcctgctgcggcgaagcagcttggggcaccaccacttcacttgtcgaaaggatctccgccctggtctggagcgcccttgtcgttgcagccgcctttgccgtatcaacagtgttcggcgcctgccccgtcgaagcggcaggagccgaaggtggtggttgcggcgtaggggccgaagtcgatggagccacaccagcttcggcaccaagcaccgaaggctccgctccctcttcgactgccatctccactcctgcttcactctccttacaccttgcaaccttctcctctgcgaccttcttcggtggcattcgctctcagtggtttccctcagaggtccccacggtcgacgcctgccgcttgtcgaaatgacaaccgcatacgtcgaaagacgtggttactcaatagtggttggaaagcagtaaagtgtattaaattgagaatttttcttgggatccccctattagggtttaggttttacggggaatttatatggtttcccttatgaaagggacatttacatgggtatatagtgtaattgaggtacatgggcctctagtgggccgactggcaaacgctggcccagtggcccctgggcttgatcggctgagatggcctcttgggcctccttgaagttgaacttgttatggcaaagccatccgccttcgccatacattcttcgccatatagtcttcacccaagatgcctccaaccttgtgggataccagcacgatccttcgcccttcgccgtctttgcttgataatctccgccatggggacttcgccctgacagactcgacgtcttgggcttgagcccccactggttgcatggtttcggcaggtccagtcgaagggtttcatgacataccgccaacaaatatagtgattgctttggtgagttataaacactaaaatagatattaattgcttagacgtggtgtttaggtaattgttatccagtaattactgcgtatgccatagtatgtttgaggtgggtgtagaggtggtgacagccctcgagatcacttcagtcctccctgtccgggtacgaagtagagcgacatctaggaacagcgggttgccagtgcctgaagtattgcgttaggattaaaattaagctttccctagacactgtttctcactagtaaatcctctctatcctggcctatcaattgcttggtgtccttggatgaactggaggaagatctgaccacacacgttcccttggatttgatacccttggaatactccgtaggggaagtgctacatcagtatatccgtgcgcttgcggattttatctgtgatcgtaagaaataccaacaagcatttctggcgccgttgccggggaacggttgctgatcatttccgaacctggttcatccttgtatcctttttactttttattctaactctacccttgctatcctagagaagtattcctgtcaaactcttctcaaccatagagcaaactctttttgagttgtctgctcctcgggtcgaattctatgagccacctccttcatcggagcacatttatacaactggctatgaaattcgtcccgaactaattagtatggttagggaaaatcctttttctggctttgatctagaaaatccctaccatcatctgcgagactttgaacaagtctgctcgtgccttaagattcgtggcatgagataagaaactgtgtggtggaaattgttcccgttctctcttcaagagagagcaaagcaatggtacacctctaccgttggatgtgtaaacggtagttgggaaaagttgcgagatagattctgtcttgccttcttcccaattacttgtattaccgccctaccagtagaaattctcagttttaagcagatcaaaaacgaatcaattggtgcagcctggtccagattcactaatttagtacagtccgaaccaaccctgtccttacccgagtatgtgttactgcaacatttccatacgggtttggataaggagtccgcattctatctggacataaccgctggaggatcgttcatgcacaaaacgccgtcggaaggaagaataattttggatcgcattctagaaaatacttccgtcatgacgaaatccaatgaacccagccggaggcatccgtgtccaagatagaggaacctctaatgatcgagccactcgctgaaccatccacttctgctagctcgattgatgagaaggttccagagcagccgaccgtcgagaatgaagaaattcagactccggatcgtgccgcaattatgttcagggacggctttgacgaagactacggcaataccttgaactattttagcaagaggaaaccactcgttccttttcgacctcccaatcctatggaactcgagttcctacgacaaactgtctgggacttaacatccataatgagcgatgaatggctaagggaggcagagctttcatccgaactaattcagataaataccgctccccgaatcattctttgccatttggaagggaacgacatcggtattctctacagtccaactgtcggggccaatctagtttctgagtcttttccattcgcgtatttaagcgataaggcagtgaccccaactgacaaattcttcaaacatccaaacggaaatatcattgaaggatttgggattgtacaagatatgcctgtctactttgaagactgggaggtgatcttggatttccacatctttgaaattcaagatttcgacatcctaatcgggctgcccattgtgcaacttctcattaacacacctcgattagaaatcctcaaaataacattgggagggaatgaattttcagttccattctcatgagcaaggatcgccttgaccgattccctcccagaaattgagtctgtggaggaggttattgcagttctccctcatgagtctctcgaggcccttctggaagatgaggtcctcgatttcatcaaagagtaagcggatcccggtgagactctcgacctgccaatcatggaaccggtacctcgacctccgcttaagcttaaacctctacctccaggcctacaatatgctttcctacacaatgacagaaaagctcctgtcataatcagtgacaagctctatgaagacgagactcaatgtcttctcaccatgttgggaaagcacggttctgttcttggctactcgcttcaagacctcagggggattaatcccgcgcttagcacccatcgtattcttattgaccccgagagtactccttctagggaacctcaatgacggctcaataatgcaatgcgagaggttgtaaagaaagagttcttgaaactcctgcatgctgggattatctatcccgtaccatacagcgagtgggttagcccagtccaggttgtgcgaaagaagggaggaatgatggtcattgcaaatgctcaaaatgaactaatcctgcaacaaatcgtaaccggatggaggatgtgcatcgattacaggaaacttaacaaggctacaaaaaaggatcatttcccgctacccttcattgatgaaatgttggaacggctggcaaatcattcctttttctgtttccttgatgggtattctaggtatcatcaaattcctatccatccggaggaccaaagtaagactacgttcacatgtccgtatggcacctatgcataccgtaggatgtccttcggactgtgcaacactcctgcatctttccaaagatgtatgatgtctattttctcggacatgatcaaggacattatggaagtcttcatggatgattttttggtctatggaaagaccttcggtcattgtctacaaaatttagacaaagtcttacaacaatgccaagaaaatgacctggtacttaattgggaaaagtgccatttcatggtccatgaagggatagttcttggccatcgagtgtccgaacgagaaatcgaagttgatcatgctaaaatcgatgttatagatcagcttcctcctcctgtgaacatcaaaggaatccgcagcttcttgggacatgccggcttttatagaaggttcatcaaggacttttctacaatcgccggacctctgaccaatttgctagccaaggatgcgccctttgagttcgatgacgcatgcctagaatcttttgaaattctcaaaaaggcacttgtctccactccaatcattcaacctcctgattggactctgcccttcgagatcatgtgtgatgcaagcaattttgctgttggtgcggtcttgggccaaaccaaggataaaaagcatcatgcaatctgctatgctaacaaaactctgactggagctcagttaaattatgcaactaccaaaaaagagctgctcgcggttgtttttgctatcgataagtttagatcttacttactgggagccaaggagataatctatactgatcatgttgctttgaagtacctactcactaagaaagatgctaaaccacgtctcttcagatggattttgttgctccaacaattttacttagaaattaaagataaaaagggagtagaaaattctgtagcagatcatttgtccaggctgcggatcactgacacgcaggaacaaccgataaacgacttcttgagagacgacatgctgatgacggttcgtgactccaacccgtggtatgccaacatagtaaactacatggtatccaagtacataccaccaggggaaaatcaacaaaaactaaagtatgaaagtcgccgtcatatatgggatgagccatacctatatcgggtctgctccgatggcttactacgaagatgtgtgccaactgatgaaggacttaagatcatagagtgatgccatgcctcaccctatggtagccattacggtgcattccgcacccaggccaagatttggcaaagtggtttcttctggccaacaatgtacgaagactcaaaagaattccccagaagatgcacaagctgctagaggcaaggaggaatcactgctcgcaatgcaatgcccctcacatacaatttgcaagtcgagatatccgatgtttggggtatagactttatgggacctttccctaagtctcgcaactgcgagtacattctggtggcagttgactatgtctccaagtgggttgaggctatgccgtgcagcgccgcggatgcgaggcatgccaagaacatgttcatagaaatcatcttcccaagatttggtaccccagaatggtcataagtgacggaggttctcacttcattgacaaaaccttccgagacctcctacgagagatgggagccaaacacaatgtccttaccatccgcagaccagtggtcaagcagaaacatcgaacaaacatattaagaatattctacagaagacggtcaacaaaatgggaacaagatggaaggatagattgctggatgcactgtgggcataccggacaacatacaagacacccattggaatgtccccatatcagatagtctacgggaagtcatgtcgactacctgtggaacttgagcacagagcatactgtgccatcagaaactggaatatggactttgaaggagcaggagaatggagaaaaatgcaaattgctgaacttgaagaatggagagagaaggcctaccataacgcaaagatatacaaagaaaggacgaagcgctggcatgacaaaaggataaaaatcaagaaattcaagccaggagacaaagtgctaatgttcaactacagggttaagcttttcggtcacggaaaattgtgtagtaaatgggaacgaccgttcaacgtcatcgatacctctttgcacggggcaatcacactccgcgacaattcaggtaatatattcaaggtaaacagtcaacgcttaaagattttccttgagccaaatgaaactttagatgaagaagtggatgtcattgaattaattgattatgaactatgatgatttcatctaatgcatgcttaaaaccctgtatagttgtcatttttgtgcttagattaggttttaatgagcctagggaaaaattggcagctagctggacccactagggttcgtccgaacctgctggttcggctgaaccagggcggcgcccgatcagccccaattttgaacctcagtctcccccgctcatctatagtctgttgtgatgcgcattcgggggtagatcagtcgtatcagacccagaaccctgtccttcctcctctctcccacttttgcaaacctcctcttcttctcatctcaattccattgcttcatcacccctcaattcaccagtggctggcaaatctttgatcccattcatcggctcttcctccaacttcacatacaaccttgacggagagccgacaccggtgaatcaattgatcctggtggagcattacacgatggaaggggtgaatgcactgtgggcacaaccccttgcaacagtgccaggctcccctgcgattctggagctgatcggcaagctccctggttcggccgaacccttctcggccccgttcggccccccgttcggtagtgcgatccctctcccctcgccatgtcacaaggacaaaaattcggggggattcgcttgcgcgacggccgacaacgggagaactcgtcttgttgaaggcgcgacgccttttccaaaatgatgagaaggccgctccacctcccgccgagcgctatgtaggcaccctgttcaccaaggcaggggatgaggtgttccataagtatgttacacccaccgctactccatccactccgaaggaggagcgtttccacattcaaggagtgcgaactcctggtggcgggtatggcaagggtttactccggccgttaacagcatcagagaaggagggggcagcggaatcccatagccctccacctatgaaggtgaagcataatttgacaccccctccaattgtgagggctcctggccaatatcaagaagatgaggtgaagtcgccggaaccctcgatccataagctcgccgcacaagtgaagaaactccgcaaggagaacatagagcttagggatcgcaacacggagctaggggtagagcttgctgaatttagaattaatttcaatagccttagtcgcggtttgtgcgctgagatcaagcgcgcattcgtagaaatgggaaaggaaaataagtattacgctaattagatgcttcctttccatgaataacatagtagtaggtgcttggttttatttttccaatcatttaagcacttgctacgaataatgtggctcattggtgttaaccccaatgtttgccaaaatttgttttgtttcatgtttaataaaatttaggttttgaataagtgtgggggagatatctcagcttcttacgtgcacataatctgaaaattacttaatgtctgaacacctggaaggcactgaactctgcagaaaattgcagaggtattgggcaccagagtggttcggccgaaccaccaggttcggccggaccagtgttggccgtagtacctcccagttttcacaagtaagcaggtgagcacgtcttttatctgtatatctccaccatgatatagtactagagctaaaaatttagaaaacaattggttcaagcatatgtgaaagataaaatttccaactaatgaaattcttcatgtgattaaacttgtatattcatcattctcagctgaacttgtgcttgtgaaccaccatccatgtttagcgaaccttatgcatctaagtaattgctttatgtgagatgattcaagatgaagggaatccttgcaactcttgttatgactcttgggaatttgttttcaaaaataaaatggtttaaaagctcaatcctccaattgacttcatcttatacctaccaaggtgtcacaccctgaaaattcaaaatatataaattgttgcttaattggaatttttagaaatgattttaaaaaaaccctagaagagaagatctaattttaattaataaattccaatataaaatggggccagataaaatttcattaaatactttgcttaattctataattcctagatttttctgggatttatttgagctaaggaagtatttttaataaatggaattgcatttcatgaataatttaaattgaaaaaggttttttaaaatcctcttttggctttgggccgaaagtcggcccaaaacccttttctcccttcccggcccaagtcgggccagaccgcagccgccgcgcgcgcgcgttcggtcgctacaggtggggcccacctgtcggacccattgtctcctccggccgccgccggccgaaaccctagccgagccgcgccgccgtgccctctaaaatccggctgctccttttcttctccggtgaaatcttttgaggggaaacaatcttcgggatctcctccaccttttctcttttggaatcatcggcttaatcgttttgaaagttcgtcgattcgaggtcgaatcggatcggtctctttcctccgaaccccgaggtttccttcgcgtcgccggttgccgtgggccttcgccgccgcctcctagcccctttaaaaggatccccaagctctcctctacccgtcgccactctcgccttcgcctctcgtcgtccgtagcgccctagcgtcgtgtaagctagcgccgccgtcgtcgccgccgctccagccgtgcgccgccgtcactcctgttgtcgccgtcgctcggggaggtcgccttcgtggtcgccgtcgcatcgccgtcctcgtccgccccttcgccgtcgctgaagaccgccggagcaccgtcgccgtcgtcgagccgaaggtctccgccgtttcaacctcgtcgccgtcgccgtccgctgctcctccgccgttgctttggtcaccggtgagttcgccgcgtcgcccgcttcgtgctggtgtcctccgttcgcgccgcagcgccgtcgttcgccggcgagcatgcgcgcccgagccgcccgagccgccaccggtgatgacgtcaccgctgacgtcatcgggactgtcccccgtgagccggccgtggaccggttgatctcagccgtccgttttggatggatcaatctcggccgttcgtttccgtgagccgccaccgtgcgcccggtccaccgcaaaccctagccgctgacgcaataaatcccttttttcttttcaaaaataattcattattgcgtcataattcaattaaaatcaatataagtgttttaatccgattaaatcttcaaaaattcataactaattcatcttagctcggatttagttggttcaagtctctaaatttttctaaaattgagatctacatgttaaaaatatccacatgtactgttcatgcttgtttatgtgctgttttggtgattttgctctttcctgcttagattccgacgttcccggagagtccgttttcgtaggagaagattttgaagagttccaaggccagcaaggcaagtcacacagatcccaaacaaccctttgagcatattgatcccgtttaaagctattgtttcttttcaactattgcatttattttcgaatgtcattgggtggaattaacctattgtttgttatagcccttttgttctggattactttattccttgatatcttgggttattataacttgactagttgagctctatatgttggttcaactagaagtattagatataattgcttagccctgcttagaaactttagcacactattgggataactttatgactcactattatttaatgatggcttattgatagttcacgatggtcaatcgtgattggttaattaattaatgtgccaactaaaacttgataatggtgggttgtgagcacatggttttgagagtcgtgctcatgacaattaaggaccggttcacgagtttcggttgtgaaacattaaccatgccaaccacaagccaacatgggcaacggctttatcttttgtatagcatggttcattgcggggcaccagactgagaagtggcagagataagcccacgggggtcactggggagtccatgccttgtttataagggggtgattatgatccaggaaaggtgcactgtagtggattgtgttgtgcaaggggtattgtcacaactcctttccgaggtaccgtggtggtattgaggcacatggtgacatgatgtggagttgtgtcttgtgggtacagtggtacacctctgatcagagtaaaactattcgaatagccgtgcccgcggttatgggcgggtctaacaatgtctttcgtgattagtctcacacttctcaccataataaatgatgctttaattgataataatttgattagctcctggtttggaatggtatattcctggtttggagatagatctgtacagccgggtatggttgttcagaatggttgggcctatacaacagggtatgttgtatagcgttggattaatattgtttaattattacttaacagtttcattaaattctgaaatgtttattaaatgctgtttatgcaaataaaaccctactatgccatcctttgttatcctgtgcacttgcatgtttgctgcgtggcttgctgagtatgtcatatactcaccttgcaatcattcatcagaggaagagttctacaatgatgctgatggtgtggaggattaggtgtagccctggtcaagctgcctgtggagtggagtcgtctgcgccgtttatcttattttccgctgcttagatctttattgattgagaggaactatatacctctgtaatgatattttattcgcttattaattagaataataattgtactctattatcaatttgttattgtgtgcctcggctgattcctggacgagggattcacacacatgtaagcgtttggaattttggatagaaattccgggcgtgacaagttggtgtcagagcccccttgaccctaggttatgccaaatggttacccatagaagccctctaaaaattattggaaaagtagaactgttctcctccccttctcttttaattaaaccaaactaatggcacatgcacttcataatctcttttaatggttctcattcaaaatctattccagtgttattagtactgtacatctattactgtactaatggctcattttaccagcaaaagttttacaatattgttttatttaatcttgatgcaaggaaataaatttagcatgttatttaatcttttggaacctgttgttcaaaagtacaaaatttgtaaccctgtttccaactgtttcaacttatcttg

SEQ ID NO: 25653 - DNA, 1102 bp, Oryza sativa
  unsure (1)..(1102): unsure at all n locations
aatcaaaagcatagagatgagataaatttattttctgctcttaataattgcaaaagtacctaagtagtaaattctgatccgtgaaactttgttccattaatgacgaactcatgtcactcatatgcatgtttgggaaatgcctaggccgactcccgatgcttgggggctatgactagtcggacagagtgtttaaacgtacagagtcatctgctcggggaaatcaaaattgacaagaggagaaatacatatttatcaatattttaaaatacttgattttttctcgagtattatatttatatcagatactactcatcctatatgtttgttctgcaggatccagatccagacatgcataaaagggattcatggctttaagcttatctcttacgctccaggaatggatcagtcagaacatcaccaaccggccgcctcgtctgccgccgactggtgcttccgcctgcacggctgacttattatgccgccgttgttgggcgtctacgtcttcaccgaccggcttgccttcgccgccgccgactggtgcttccgcctgcacggctgacttattatgccgccgttgttgggcgtctacgtcttcaccgaccggcttgccttcgccgccgccgactggtgtttccgcctgcacggctggcctttatgccgccgttgttgggcgtctacgtctttaccgaccggcttggcttcgccgctgccgactggtgcttccgcctgcacggctgacttattatgcccgcgttgttgggcgtctacgtcttcaccgaccggcttgccttcgccgccgccgactggtgtttccgcctgcacggctggcctttatgccgccgtattgggcgtctacgtctttaccgaccggcttgccttcgccgctgccgactggtgtttccgtctgcacggctggcctttatgccggcgttgttgggcgtctacgtcttcaccgaccggcccgctcgtnccgcgccgactggtgcttccgcctgcacggctggcctattatgctgccagtgtgggcgtctacgtctttaccgaccggctttgcttacgcgcccgcgactggtgtttnacgctgcacggctggcctttatgc

SEQ ID NO: 25654 - DNA, 647 bp, Oryza sativa
tctacaaaaatcacaggagcaccccatggggaagtactcggacgtatgtaccccttttctttcaactcttccagctgtttctttacttcggccagttcatttgctgccatacggtagggtcgcttgtacagaggagtggtcctggagcaagatctattcggaactcaatctctcgcttgggcggcataccaggtagttcttccggaaacacatctccgaactccctgacgatgggaatttctgacaatcctatctgatgaaggtctgaacttctgacagaggttgggggtgcaaagaaaacaaccggttgttctggccctcggtacagagtgacagtgcgtctcgcgcaatccactacttcttggaattgagccaaccaattcatttccaagaatcacatccaagttctttgtgtctagcagaatcagatccgagggaaaaggaatcccctgaatttctatagggacggcagggctataatactttgttgtcataccccttcagggtggtgatgagcagagggttcctaagcctttctacccccaactgattttctcccacgaatgcacagatataaacgagtgggaagctcagagtcgaacaaaatgttgcagggatggaatgaacgaggaacgtaccaacgatga

SEQ ID NO: 25655 - DNA, 1095 bp, Oryza sativa
tgttcatcctctgtgaaaccagcagctttatcctgtttcatattcttgaggagtccatgcatgtccggatcattcttctgagcctcgcggatttgatcgagcaaggtaggcttggcttccaacgcagccaagaatccacgaccaactatgcttaggttcaaggcttccatctgttgactaagttcgggtggaatgccacggacgttaagagtgttgcaatggctctttcgacttagagcgtcggcaaccacgttggccttaccaggatgatagtgaattcccacatcatagtctttgatgagttctaaccatctcctttgccgaagattcagatccgactgggtgaagatgtatttcaaactcttatggtcggtatatatttcacagcgattcccaatgagatagtgccgccagatttttagagcatgaaccactgcggctaattccaagtcatgggtagggtagttgccttcatgcggtcgaagctgacgggaggcataggctaccacatgaccatcctgcatgagcacgcaccccaatccttggcgcgaagcatcacaatacaccatgaagtccttgcgagtatccggcaagattaacaccggcgaggaaactagcttttccttgagagtttggaacgccttctcgcattacgggctccacacaaatttctcttctttcttcaacaaccgtgtcatgggtcgagcgattctggagaagttctcgatgaatctccggtggtatcctgccaaacctaagaaactgcggacttgggtaactgtcttgggttgcttccaatcggtgacggcggtcactgtttcggggtccacagcaactcctttagcagatatcacgtgccctaagaatttgacttcggacaaccagaactcacacttgctaagcttggcatacaattgatgttcccgtaactttcccaacaccagacggagatggtgctgatggtcttcctctgattgtgagtatatcagaatgtcatcaatgaaaaccacaacaaacttatccaagtattccatgaacactcttgttcattaagttcatgaagaaggcaggtgcattggtcaaaccgaacgacat

SEQ ID NO: 25656 - DNA, 6467 bp, Oryza sativa
  unsure (1)..(6467): unsure at all n locations
tcagcaagtcacgtgcatagtaagaatgaacaaatctagtccgcatgacccgtttcaacgcatcccaagtttgtggcatgttattaggatttttcttgccatgttctatccaccaaaccgaagcaaaatcagtgaactcactagtagcagctctaactctagtgttctcaggaaactcatggcatgcaaatttttggtcacagcaatctcccaagaaaggtacgcatcaggatcatattttccatcaaaaggaggaatattaaatttaattttagaaaaagcatcatcattgttgcgtacctcacgtcggcagcgaccacccatacctctacgattgttgtgtagccgtcaacgatcacgagcatctcgatcatcttgttcagtgtcagcaatatattcatcctcccaattatccccgatgtactctccatcgatgtcctcttcactacgcccaccattgcctccagcattgagagcatcaaaatgcctcacaagagcagcaaggctagtgtcaatgcgggcgaccgatgtctccagccctgtaagcttggtgttggtggcgatctgcgttgactccaattgtccaatcttctcgtttgtcacctgcaaatctgtatcatgtccttctgtgtgttgcttcacttgccttgtaaaatattggatgatgcgtttggtgcgtggggaatgagatgcaccctcctcgtctttatcctcgggacctgccatggtttagaaaagaaggacaccaaaacaatagaggatgtaatataagccctacaactattgggatgtagcttttgcaaaatgctcactcgcagcctatctcacaagctcttaacagttcttatcttgcacacaggaggggacggtaacacacaagttagcaaccgtggaacgaggtgtattagtgctgtagcaacaagacctgtcaagctgtagtcgggtttgtggtggagctgtcggtgggctgaaagcaatgctcaagagaaaactagaaaccacgttagtcaaagcaagttgaataatcgctcaagggtatagtgtacagtgctggtcctaggctagtcgaagtagagacgtgagcctaaccacaaaggatgccacaaaacacaaaccaaacagcaacgataaagggggaatggtggttactcgaacggtggaaggtggtgaccaagggggaatggtggggtgtgctcacaagtcggcttcctctcttctgcctttttttttttgctttctctctctagtgctgaggagagagacacgactttttttattttttttatttttttgatattttttgcacaactaggagcacactggaaccaaccacagaaaatcttatctcaaacggacaaagtatgaagcttgtagaatttttcaaagttctatccgaataggtcccaaagcttctcgccacgaaaacagaattttgcaagcggaatttggcgattttaaatttgccgaacccggcgaagatgggaagaattggatgtaactttttctgtagatgtccatggatatattataagcctaatttcgagtccgtatgaaaaagatatgactgttttaaggaaggtcactcgaatcagggttctatttcctttctagtggtggcaggatacaaggcaactcacaaacgctatcggcaacagatcaaacacaaatagaaagtgatttggtgggtgactgcgatggcggtgacggtggtgatgacgacaaaattgatgagggtggcgatgtgcggtggcaagaactcgaaactctaatcgcctaacactaagaccagcaaattaacacaaccgatgcaatcgaaaactcaacaagccttaactaagcagtactagcaaaaaggtacaatggtctctaggatcacgggaaactaatctactatttttttttgttggccttttctggactataggaaaaaaatttaataacaaagggaagggtaaaatctctcactgatgaaccacgctctgataccacctgatgcgaacccgctagggtttgtggcccgatctttcgatgagaggtggggataactcgattggatgaagacgacgttcacggcccgattacaaccgtccaaagatgctgcgccttagcaaccgatacactgtctccaatggtcaccgcgaacttgtggtgcgcgtcaaccctgccacgagggcactcatcttgcaaacaatcaaagaacaagcaagaacaagtagaacaagcactgaattgctagatgacgatgaaagttttcacaatcaaaaacacaatatggtggggttctgattacatgcagacaggcggtttagccaacatgcacgctgcgagccggtagcaagtagctaactctatcatcaaaacccaagtgttcttggcggcgattagaggtataagaagaggggaagaacaaccacagggtcgtgctccaaccctaggacgcacccctaatgggcccaacttgatacacaacccattgggccaaaggaggtgacgcagcaccatggacagaaagcagttgggactaaaacgacgattgcggccgctccagaacagatatgaacatgtggctggatccatttgaaagtagacttgataagctttccatgaagtacttgcacgccgaaatcgcatgaaattgtgaagaccgtccgatgttggtgctgtcctgtaatctgaatccaaccggcggaaatcctctcccctttggatcctctccatcgttcctgagtaaaacaagagtgcacgcgtctccggggtataaagaagaggaaaatgaactcaagaaagaactcacctaattgttcagttgacgtgcacgagcgcgggtaataggaccatgaagttgtacttgtggggacgtggatgtatcgatggtgttgatatcctcatcacatgttagcgaaaccgggcatccatactacctcgggaccttttttggatggttttatatagttgaggggtacacatttctggtattgcggttaggggaccttagacagactcggcgtacaattgagggatgtcacgtgaacttattccttttaagaatatcttttaatggaagtgtagcgtctcatgtattatcgtagattatagggttaatttgattcatgccattatatttgcttgttttgaaatataccattataattcatgaaattggaaccataccattacaatttaccataaagatgtgccattgcttaccatttcaatacaatttttacttcttcctgaccaaattacccttgtcttcttgttcatcctcttcattccctttctctcttctctcagctccaagctcgatagaacaagatccgttggttgccctcgttttgaggctgtcctacaacgtcgccaccgccggaccttgccaccacaaggcaagactgagtagaggtcagcaacttcgcaggatggctaggtgatgacctatgtctcagagactccgccaccgtaatgtgcagcaacgacctagatgatgctgctcccggagacgatgatgtcggcgacgcctacaagatcgtcttcctgttgttgttctggcggaattctccaaaagtgagttgctggggcccggccccatcctcacatagttctcttcttcccccaattagactgctttagttatgtcagtatgtgtatatctgtgttttgtagtttgtacagctcccaggaaggacacctatggagttttctagagcccattgacctggaggagatggttgttgggatatgcgtaggctacgataacataaatcaaaacttttctaccgcgtaaactaggaaccatgcaagtattagatcatagatcgttatcactcgacgcgctgcgcagcggaagaaggcgctaagaagtcgaaggaattctcgcgaagtagtgcgcgtcgatgtagaggaagtagtcgatggcaccggctcgaccttctcctcctcgtgtactcttctcgcggtactcccatccgatcagcaccgcaaatcagcggcacctctactggtatccacacgtacaaggacggaacgccacgcgcagatgtgctagcacccgcgtgcggctagggttttgctccggaagggaagtgacggctagggtttctcacgtgatgcgatccctccgctggtcacacctctcacgaatatatagaatccatcactcgggcctccaaggcccgtaggactcctattcggatccctatctgaattaagctcatattggatctccatccaatccccttattccggcccattaagcatgcgaccctgtaggttcatgtacactcggctgtaacccgaaaactccttttcgctccacgtgtcaacagcggcccctagcagaacgtattgacccaccgagcatacataaagatcatatcagctgaacctctagcgtatacttgtatgaacccctttgcctcacgatatcgattaagctcaagaaaagatatgtgccatcctctaatagctcaatcattcactcgaatctgtgatagatagattatataacttgtgattgactcctcaatcacttttggcatggccatgcacttccataatctataacatcgaggggcccagagatatctctccataggaggggccaatcccatcttgattattcatattccactacatgtttcacagcatacccaaaaactacttttataatttcccaattacggagtagcgtttagcagtccctaagtaagctacgacacatgttgggaaccatgataatctcaggtctaaggattcaacaccaacactaaatgagatcactgatgacacaacacagatggctcttgcactgtatcatgttgggtctatccaacaacatgttccccaacatgtgttcacattattaatttggtatctctgtactatgatccatgagacatgatcatcaattaatacttgtgctgatcatttaaacatatttgttccacatatgatatttgatcatggatccttaagaaatagtacaaacaacataaagagtctaatgaaagaaccacatattcattaaccaataatgagttatctatttcaaagaacaaagttggataaatatataaacatagtatgtgatacaatcatctgtatgattgcctctagggcatatcactacagtggtgggagtgatgatgcatgctgcacgttgtacaatgaagccaacgacggccattcctgcctcttgttccatcggaactcgaagctgagaggagggaaagaacggggaaggaacaggaggaggatggaggaagaagacgacggtaatttgttcagaaattgtattgaaaggggtaagtattggcacatcttcgatacttactaaattgtggttccaattttataaattataatggtatattttataacgagcaaatttataatggtatgaatctaattagggcccctttgaatcgtaggaataaaaaaacggagaaataggaaaaatataggattctgacaggaatgctagtgtaaaacaaatgattgcaaaacacagaaaaaacacaggaatgatcgtttgattagaccacagaaaaaacataggaatcggatgagagagataaactcaaaggatttttaccaagagattggacctctccaaaacctatatgcaacaagccattccataggaattttgtaggatttcaatccttttcatcaaagagctacataagaaaatttccggtaggatttcaatcttatgaaatttcctccataatttgtttgattcaaagggcccttaatcctagattatattggcttacatgagtctactactagtctactacacgtggcttccatcagggatgtcctaacggactcaaccggtgtttcttctacgcctagtaccttccaggccgagatctcccatttggatcctctgttctgcagtctgcacggctttcttctagctgtcggaagggtgaagtcttgcaacagatgccatacctaccaggaaagcaaagtgtcgaaacatgaattcggcaataataaaagggggttgcgtacgagacctaaagtggatggatgcagagacaaaggatttagacaggttcaggccctctcgatgagaggtaataccctactcctgtttggggatttgaatccgccgagtgtgtattgatctgacgatcaggttgtctcatgcccctagagggggctccctgccctccttatataggttggggggcagggttacaagatagaaaccttaaccaatacggtatcggtttcctaaatctactttacaatcttatcaaaccaggactttaggccgttccataatatacagggaaacgtaatacccaagtcatgatctgttacatatttcatatatataagttatcccctataactagtcggataatcatgccgtgtgggtatggggtacccataaatctcacagtagcccctgagacctcacagtcngaaagataatctctctcgaactagattac

SEQ ID NO: 25657 - DNA, 779 bp, Oryza sativa
agcttcttccaaaagtgagaggtgaattggcttcccctatcagatacgattttcttgggaacgccatggagactcacgatcctagcgaagtagagttcggctagcttgttccctccataggtggtcttcacaggaataaatcgagctaccttggttaatcgatccacaactacccatatagaatcatatccaccttgggtctttggaagtccggggatgaaatccatcccaatttcatcccatttccattctggtacttggagaggttggagaagtccggccggtcgttggtgctctgccttgacacgctggcacacatcacatagggccacaaactctgcaatttcccgcttcatgctaacccaccagtatttctccttcaagtctaagtacatctttgtactgcccgggtgaatggaataaggactttcgtgagcttcctgaagtatcagctgtttaagttctctgttatctggaacgcatacccgctttccgttccatagggttccgtgttcatcctctgtgaaaccagcagctttatcctgtttcatattcttgaggagtcatgcatgtccggatcattcttttgagcctcgcggatttgatcgagcaaggtaggcttggctttccaacgcagccaagaatcacgaccaactatgcttaggttcaagcttctcatctgttgactaagttcgggtggaatgccacgacgttaagagtgttgcaatggctctttcgacttagagcgtcggcaaccacgttggcccttaccaggatga

SEQ ID NO: 25658 - DNA, 1746 bp, Oryza sativa
aagggggaaaagaggacttcttttagggtttttctttttataaaccttttcaattttgtttatttcttctcaattataatttgtgctctgaaaattccactaaaatttatttacgcattttaggcttttaggaaatatacaaaaatcctccaagccttatttgacttttatctttgcacattttaattgttggaggctttcacaggaattttaattattctttgcacaaatttcgaggatgtattttagagtcgatttgggacgtgacaaacctaccccccttaaacggaatctcgaccccgagattcggaaggactggcgaagagatcgggatgggctgccttcagctcgtcttcacgctcccaggtagcttcttcttcggcgtggttgctccactggaccttgcaaaaacggattacccggttcctggtcctgcgctccatggtgtccaggattttcactggcctctccacgtaggtcaaatcttcgcgaacttcaatttgctctgagtcggcctgctcggatggcactcggagacatttcttgagttgcgacacatggaacacatcatgcacgttgcccaaggaagcgggcagctccaattggtaagcgacttctccgcgtcgagcaacgatacggaaaggacccacataccgaggtgcgagcttccctttcgtctgaaacctgtgtacacctcgcaatggcgtgacccgaagatacacaaagtcatccactgcgaattccaggtcacggcggcggttatctgcataacttttctgccgggactgtgccacctttagattatcccgaatgattctgactttagcttcagcttctctcaggatatcagtcccgaacacttggctttctcctacttggtcccacaagagtggtgtccggcatttgcgcccgtacaacgcttcataaggtgccatttgtatgctggattgatagctgttattgtaggagaactcggcataggggagactcttatcccaggtcttcccgaaatctagtacacatgcacgaagcatgtcttctaggatctgatttagacgctcggtctgtccatctgtctgcgggtgataggcggtgctgaaattcaatcgagtacccagttcttcttggagcttcttccaaaagtgagaggtgaattggcttcccctatcagatacgattttcttgggaacgccatggagactcacgatcctagcgaagtagagttcggctagcttgttccctccataggtggtcttcacaggaataaatcgagctaccttggttaatcgatccacaactacccatatagaatcatatccaccttgggtctttggaagtccggtgatgaaatccatcccaatttcatcccatttccattctggtacttggagaggttggagaagtccggccggtcgttggtgctctgccttgacacgctggcacacatcacatagggccacaaactctgcaatttcccgcttcatgctaacccaccagtatttctccttcaagtctaagtacatctttgtactgcccgggtgaatggaataaggactttcgtgagcttcctgaagtatcagctgtttaagtctctgttatctggacgcatacccgctttccggttcataggggtccgtgttcatcctctgtgaaaccagcagctttatcctgttcatattcttgaggagtccatgcatgttcggatcattttttgagcctcggggaattgatcgagcaaggtaggct

SEQ ID NO: 25659 - DNA, 3980 bp, Oryza sativa
aaataccacatcatcttagcaggaattctcttctttgttagctgcccgtcaacttctcctggatcgtctcgtctaatcttgtatcgtagtgctttgcaaacagggcatgcttctaggttctcatactcctcaccgcgatataggatacaatcgttcggacatgcgtgaatcttatgaacttccagtcctaacgggcagactatcttcttagcctcgtacgttgtctcgggcaatttgtttcccccgagaagaatgttcttgacgagtttcaataaatcgccaaatgccttgtcactaaccccattttttgccttccattgcaagaactccagagtggtatccaatttttgtgcccctgctcgcaacctgggtacaacgaagttctgtggtcctccaacatcttgtccaatttatgggcctccttttcactttcgcagtcctccatagcgtcctgcaacatctgaccaagatcatccgcaacgtcgttaccatcagcagctatttcctcctcacccgtttgattttcttcaaatccaacatactgagcaaagtccggaatattgtcgtcttccacttcatcttcttccatttcaacaccttgctctccgtgggatgtccaacaattatagcttggtatgaaccccgactcaaacaagtggaaatgaatagtcctggatgcagaatactccttctgattcttacacttattgcatggacaacaaataaaacccctttgcctgttagcttcggccactctcaaaaaatagtgcacgccgtcaataaactctttggaccgccggtcagcgtacatccattgccgatccatctacatgagtcaaaaaaaaaccgtacacaaataattattcttacaataatgacagtcatacaataattataagatatctttattcatacaaaaatcataaaatattacaccaaataattcttaaaaactatttgtaaagttttaaactaattttaatgtgttttacttcttttaatttttattttagtttgttttctattatttaagattaactttcactagagttttccttctcaactattttataataccttgtttagcaaatgaactaaatttctatatattctttcttccccacacacattttctctctcatcaacttacaacttataaattttggagacaaaaaaagtgtgcaaaacataggtgcaaatgtagtatgacaaaaaaaacattggaggatgaagttgcaaaccttttaggcacctccgatttgtatgtaatcaccaaaataaattcaatagaaattttggcatgacctcccctcttttttgaagaaattttgaagcttgctcgggcagctggaggaggaagaagacatataaataggggtgggactttagtcccggttggtagcgccaaccggagctaaagatcaccaggatctttagccccggttggtaataccagccggggctaaagttacgatctttagtcccggttggtaactaaagatcccgggggggcctgacatgccctgacagcattcgaaccgggactaaagatgatctttaatcccggttggtaccaaccgggactaaagatcaaatatgcccgttacccttttgaaccgggactaaagatcatctttagtcccggtttttattgcatccgggactattgcggaaatcggccgaccgacgaaagatggtttctccaccagtgacagattcatctctagaattggactttttttgtgtgtccagatttatctgtagaattagacttttttttttacggagggagtactccggtaagcacaaggccgaatttttctcatttttaattttaatttttttaatatttatagaaatattataccatccaaaatatttacacaaatggcccctgtcgtccaagtagagggcgtcaaggtgtacgcattttgcacttaggtcccttgccgtcctctacaagggctgcaagggggtaaatgcaatttttgtcctgccaaaaaatgcattttttctttttttttttcaacttgtccgtccctcacgtcacttctgtaaatgtttatatttacgccggtacaatatttctataaatattaaaaaataaaaatttaaaatgaaaaaataccgcacagggcccatccacaaactcagatgggccggcccgtcaaccatccgcgtggcccacttaattgagagagagagagagagagagagagagagagatcgtcttcaatcgcgtggcaccttaacaccggcacgcgcctcctcctcccctcccctccactccgcgagccgccaccttctccgccgccgacgacgacgacgacgccgcatccccaaccctagccgccgctcggcggtgctgcgacgtaggagcgggtctcctctctgcatgatccgttagggctaccgagccgatcgaccggcgggcctaaaaccctaccgagagaggctgcgggttgggtgggggtgggggcgtgctcgactctccggcggcgccatgaagctgacggtgaagaccctcaagggcacccagttcgagatccgggtgcagcccaacgacaccgtgagaaattttcccccctacgcccatttcgattttcttttccccgtctcgtgtgtagctttcgttagtggggagatggagaatttttgctagggtttccaccaatgtagatgcgaggtagccattgagtcctgctccgctagggtttcgtttcagcaagtatggctcacctcgttggagggctcgttgtttgctgttatttagttatttattattatatggtaatgtagtggatatgcctggatgatgatagtccctcggagctgtgttcgtgaggatggatggattaagctgcaggcttggagctatcgtctgctttggactcatagttttacagtgtgttcatgatgattcaggcgcagcaatgttagcaagtggttactgtccgaaaggagctatcgtctcctttgaaatattgaatgcatagcattgtactggctgattactggataaaagtaaaacttgtcaggtttcactgggggatgataattccatccaaaaccagtatttgaaaccctgggtgcaacaggggtttagatatttatttcttgtctgctacgtcttctataattatagcaaaaatggctctgctacatatataaccgttccaggatttttctgtttgtacactatggaacagattatggctgtcaagaagatcattgaagagatacaaggaaaggatagctacccatggggccaacagttgctgattcacaatggcaaggttttgaaagatgaaagtacattggaagagaacaaagtcagtgaagttgggtttttagttgtcatgcttagtaaggtaggccgcgtatgtgctgtatataatttaaatggtgatgttatttattacgcttcatttaattcttttctgactggatgctgggtgtaacggtgcagcaaacttagttgttaaggaaaacacgatgacgttccatatactccctccatcccataaaaaacaaacctagtacaagatgtgacacatccttcatattcatactactaggatgtgtcacatcccatagtaggtttgtttttatgggacggagggagttaatagcataaacagttaaacaataacttgcgagacgtaatcattttgtggatattcataaacgatgaatatgcctggctctggcctcatttaatgcatgttggttttctgataatctgacatgggcgaataaggaacatgattaatagtcctttccacgtagcagctatactatgggtagtttcttctatgccacagtaccaaacttaattgacacctgaatcgttcttatgcttctttctatgattaattttcatgacctgtcaacagtcgcttctctatctactggctttacagtgaccattatctataatcacattatccgacatttcctctcatgcttgtactcttctt

SEQ ID NO: 25660 - DNA, 25114 bp, Oryza sativa
atttactgactgcatgatccgttattagacttcaagcacccctttgaccaggcaagaaactcctgcggatgcttcacgagcagctcctcaacccctgtgagtgcactattgactttcttttttgcatcttccccattcatataaggtattactcactaggtggatgtattgtgctcttgcagagttgcacctacaagaacaccccagcccgaaaggccacctgcggagtatgtttccagtctgcaatcaatatttgtgctatgtccttttttgccactaatatccttgtttcgtgacgtggtcactccgaaggaaaattcctttctttaaatttgatagcacactcaaatcattcaacatttcatacattaccacatctgataaggttccattgtgaagactggcatacacgcatacgtgataagatgaactaataaattgtggtctgcgagagaggaggggaaaaaaacacacttgctagctatcagcaggaagttaggctttagtcctgatcaattttgggattctaatagctatggaagatagatctgaattggtcttatgaatatgggttccactgtttactttctaatgaaatatactttatatgcttgctaaaacttatttttattttagagccccttcaaacgcatatggtcaagcagcatcaaatctattgtcgggaagcaatcttgacactacgattaaccagctgatggaaatgggtggtggcagttgggacagagataaagtccaaagagctctacgtgcagcttataacaacccagagcgtgctgttgaatatctatattctgtatgttctgtttcctcctgtaaatgtttgttattcttttttttctaacgttaatagataatgtttgtttctcccaaacattagggcattccaattacagcggaggttgctgttccagcaggtggtcaaggggcaaacacaaccgagccatcttctactagggaagccagtctgtctggaattccaaacgcatccccgttaaatcttttcccacaggtttatatgctatcttggttattcattaccatcgcctactattgcatgtatttaacaattgaaatttagcagggcgatgcaaatgatggaggtggtgctggtggtggaacacttgagttccttagacataaccaacaggttgtcatcctctctgttttgccatataagattatttttgttttttgttcagtataattttcctgagcaaatatttggttttttaatatagtgtttcttgaatatataaattatgttgccattgtttgtctggtaccggataactaccttttagcttttcatagccagcaatggagccactgtatgcatgataagatgcttttgatgctgctagcattgtttctgattaattattgttattttgatagcacaccctgtcatcttttgtgcttgaacagcgcaccaccctgtatggtgtgagcatcaacttagtgaaacttccatatcatgttttccttttttgagacaggccctaatgttcacatcattttggtaccctcatgcgtattcgagaaaaaaaagcatcattttggtatacctccattcagtataacgttgcgttgtttgaattgttgaagtataacacccctatcttcactattttgcagtttcaggcgcttcgggaaatggttcatactaacccacaaatattgcaggtcatttatcttgtttgacatgtttacatgctatggattatcttgtatagcctgctatggcttattttgtatcacctgcctaatctttgtgctggtatcatgttatagcctatgctccaggaactgagcaagaagaatcctcaacttctgaggttgattcaggagaaccatgatgagttccttcagttaataaatgagccctttgatggtgctgatgggtatgaactgttcatctgcttgattcaattctggtttcatttgatttgttatagggttataggattcgttaatgcgaaatgaaaaaaaaatcaattataaacttgaaatgccattggtatgttctctgtgttgcttcagcacactcccataacttctttcaatggattttcctcggtgctacttgtacaatatggttacacctttttatggactttctgtggtagtacgtgtgcattactccggtattcatttgcactcgcctgcttcctgatgatacagggacttcttagaccaacctgaccaggatgagatgccccattctatcaatgtcacacctgaagagcaagaggcgattggacgggtatgtacaacatagttaactcacttattacctcttggtacagaagtatatacagtgtacataacattacataacaacaatgttttgaattattttcatgcttcagcttgaaggcatgggatttgacagagcacgtgtcatcgaagcattcttcgcctgtgacaggaacgagcaactcgcagcaaattaccttcttgaacatgctgctgatgaagattagatggaattatttaaacccggtgagaactcttgccatgtcctggccgactgtttccctgtctttggttcagtaggaaaccatgcactaacgattatgttttatttgtgggggccatgacagcttattctgtacacctgccctgcaatttatcagacttttgaagtttgcgggtgctttggatccaaattgaacaagctgagatggagctaacaccgcgttgcatcgatttatctcttgtacaatacttgctttatttaattgctggcttagcattcaaatacatggcttaacatttattcgagctgtctgagggacggatccttttgtccatccgtttttagccagaaatttcaatggatgtgaattgtgttgaccacattttctgtcctgtttgtgttattcaattcgtgatttctagagcagtaaatatagtgtgcagaaaacattgcgattgtcgagaacagagctccgttgcattattagccccttctcaaggcgagaatgggacaattgctcttacaaaatcgctactcaattcaaaataggccaggactcctttggaatgttggaaatttacaggattattacggacattagtttaaatcctataaaattcttgtgaatttccaccaatccaaatgaggttccctcacatctccgatacatcatctcatagtgtgcagcatagcttggagtcgatggatgccaggcaaatgcacaatgcctggtagccagtcaatgggtacctacaacaaacgatgcttatgctaatgaatctttgctctttgactgataaaaaaattcagaattacaccctgctatgatgaagattattgctttctttttttaacttacctgaagtccataatgtacttggatttgccaatcctaccaagctgcaatattgtctgccttcctttctcctgccaaacaaagcaaaattactcacagtttgttccgttgtgatagccatgagattccaatcagatccaacaattagagttcaggagtgtggcaacagcataaggttgctctgtttacctccaaagtcatctggaagttcttcaccgatggctgcaccttgtatcccatcctccctgccctctctctgaagtccagttcataccgttttgtcatctgtgaacgatgaatgcagcaggacaaacatcttgctatcagcttactctgaatcttggcatagtatcaatcaaataacaagagtcattttaaaatcttaagagagaaattgcatacattgttgtagaaaggagatcttgagcagagctgatcagccttgatcttcttctcttgccaatcctttggaagcccactgatgtgctgaatctgaaaaaaaaattgaacattccaaaaaccacattcttagcctaatgaattattccactgaatttccaacctccacaacaggaaattcacttgcctgagctgaattgctgttcttcagatgaatggattggttcttgggaatccaagccctcatgcttctgaagctccctgtaagcgtagtaacagtaggcgcaaacctgcacaaaaccaaaacctgacaaattcaacaaaaatcactcaaaaaccttcacaattcctgcatgaaatgaccccaaacggatatcgaatctcacgcgacgacgccgaggagccgcttcgactggctcttgatctcatccaccctgttcccctgcatttgcaaccatggacagttgaacacccacatcaatggcggctcatctccaattctccatcaaactatcaccatgaggaaggagagagagagagagagagagagagagagagagagagagagagagagagagagagagaggaggttgtggtttgttgtacctggccccagattcggtatctggatccgacgaggtttgagctcaatgtgccgaggaagttcttgtcggaggtgcagaagatgccgtccagattctgcgccaccacgaactccgacctccctctcctcctccggtgccgcgccaccgccagcttcctgtcctgccgcccctgccccttctgcgccgccgccgccgattagactcgctcaagcaagcaagcaaccagagaggaagatttggatgaaggatggaagaggctcacgttggtgtagagggagtagagcgcgacgccacgggcgcctgcggcggcggcggcgagagtctccttggcgatgatgcaggtgcacctgccgacgtcgagggggagagggcggcagaggagggcgcggttggggagcgtcgcccatgacgaggccggcgccgcctcgttgtcggagaggtcccacgcctcgtacgacgacgacgtcggcagcggcagcggcggcggcggtggcggcggtggaagtagcagctccctccccctcggccccatcctcacctgcaaccccgccaccaacgccaccggcggagacgacccctcctcctcctcctccctctccttctcctcctcggccttcatgcgaacctgcagcgacgacggcttcagcggcggcgccggcggcaccaccaccgccaccaccacaggcggcttcttctcccctccatccttcccccgcccaatctcggtgggcacctcgttctccttctccttctccttcgccgccgcagccgcagccgcgccgccgcgagcccgtctctcgaccgtgccagcgttggagctgatggggcggaggggctcccgcttcgtggccgccatgggaggcgaggcgcgagagctcgcgagttctgtgtgtgtgagagagagaggttgtgtgtttgtcttattcaaattgtgggggttgggtttgtgatttgtggtggtgatttggagggaggatttaaatttgaaacgcgagaggggggtgggtttgggtttgaaacgtggtaacggtcgccgtcttggttgggggttggactttttggggtggattgatttgattcctttttggagcttttcttccttggattttgccatttcggtgacacaagtacaaacctcatgtactgtgtgcccccctcatttgaatggaacacgcggacgtcatcatcagaatccagatcatttaaacattatacaaaaaatgttgaaattcaattttttttcaaatgtgcttggttggatacatcctgatgtactccatactactatctccgtcccaaaatatagcaacttttgactattaatctggacacactagctaaaaaatacttatattttaggacagagggagtagattggattgatttctattttatactatcaaaaagttgtttcaaaatctagaggtatattaattcatctatttcaaatttgctcatttaaaagctgactctgcaaaaaattattactcctacctatttttttcccgcaaaagaaaaccatggcatgcttaaattggacgagcagcagcagcgaacagtacaataaatgaatgaactgataaaaaaaaaggataagatgaacagcggggccgtaacgttgacgcattccatccatccgtaataaagctgcggttccaataaattcccaaacatgtgagccgcttttgtttaatgcgcaagtacgaagcaaactgcaaacgccagctttggaagcagcaatcatcagggtgctcgaattttgcggatgcagtgcaacttgttaaaaaaaacgccacccaaatttaaacgcggggatggattgggtgggtggtttggtttggcctccgcgcgccgccgccggcggcggtgggtgggtgccccttctccggcggcggcgatcgtcggcgtgcggcggcgacggagcggcggaggtgtgcatggtgatcggggtctgctccatccaatctccactctatggagacgagggctggttttcccagctccatccactctttttttcacccgcatgctttctaaatgttcacagttattttagaaaagttgtttagaaaatcacagtaatctattttttttagaaatattagttaatacttagttaatcatgtgctaataaattgttccgttttacgtgtgtagaagagttcctaacttgttgtcttgttgagaagaacacagccacacgggagtacattctccgtccctaagagcaggtacaatagcgggctataagttaactatacacatattttaaggagataaataagaagagagaagggcagcgggctacacatttgtagccagctgtagcacagactccaagacacattgtacgtatgacatatgggaccagctattaatagtgtagtatgtaactattgtatgaatgagctattagattggctatagatgaattggagctagtagttggctatactattaaacttgctctaaatataagggattttgtttggatgtgacacatcctaatacaacgaatcttgacaggcttacacatcctagtacaacgaatctgtatagagaaatatgtcatatccaaccaaaatcccttgacggagggagtactaatttgttggtaggttgggctcatatgttaaaaatgtggacccggcccactaataaattggccatgcgttggcaccagatgggcccacatggcagaaatggacctagccaatatatactttttgggccatcgcggaaaaagcgaaactgtctctcatattattaccggcgtttttccattcatttttggccgctttatcaaatcgttgccatggactatttgctccatgtcttaaacataagctctcttttttttaagataatggaataatcatctcggcctttactcaacaaagctaagtataagctctcttagaaacaacttttgcaccgtattcatttcgttaaacaattaatttatttttataattaagtaggtaatctgcattaataattaatttggtgaatgatatgtttcaaacgggccatgtctagggttttctttgaaaaaaaaaactctcgaactgttctgcgcaaatgaaatcaccgtgccatttgagcatttgacaaaaaaaaacaagattaattagtttgagataacgaagctgacgagatcaatctttcacgaatcctcctcctcttccttccgccaagtaagcatgtatagtagtagcgtctctcaccgtctcttccaagcgtgcaagccacccaccctgacgaaaccagaaaattcacttgttattactccatttacggggacattcacttttaagatgtgtcaattaattatttgccactcgctgtttataacatatgggtcctcatatgtctatgacatgtaggtctagtggcaaatcatttatcaccatccgtaagagtgataaataattaattattctccatttggtaaactacacggttggtggtacgagagaaagtagtgtgataaactacacggttggtggttggcccaacggccctaaccttttgaaacgatgtaccggtcctgttcgtctcagataatttaacagcaaattggcagtctaaacaataacaaaaacagttaaatttttatcataccagttttacgaacaagttgcgaggaaggtatcctttgtaaaaaggaaaaacgtagggcatagttcatacccgggttgaacgtgcgtgactaaaatctgaagtacacaatcacacacttgtattacttggcattcagtgagctatgttgaaaaaaaaaaccaaagatgttatattttgaattatcaggaaacgaagtgacatcgcgcacctccaagcatgtacacatcctccgttaaaaaaaacaacaacaacacttctaagtttaagtttaaggtatgtttgttttagtttaagattattgtaatctagattattgagtcatattaccataaaatgaattataataagttgacatagtgttagccgtttgtttctctggattattagctggttgttaggtgttagccacacaataattaaaaaaacagattactagattatagtaatctggcttttagatcgtaataacatatcataataagctttctgtttgtttcagcttacttctaataattcagattgtaataatgctaagctgaaacaaataggaactaaatctgaacataagtgattttttatgaagtgatcactatgagtaggcatttatcatgagaactattttaagatgtggttttcttaattttcataaaagaacatacacgtggacgtcttgcactgtacaatgtatatggccatcacaatttaagcatgcatcactcgaaaacaaatcatgcgtaatcatgcttatcaataggaacacacgttgtatctcaaagacgcaagcaagtaacccatgtttaatggaattatctctcgcacatatccatccagatgtgttgcttttttttttcttccacttaccaaatgtgcacccgcatgttagcatgtatcaccaaacatcatatctatcccagttcacaattgtatcaaacactttaagccaaacaaacccctcttcaacatcaatttgatttaaccaatctacgccctgtttttgttttctctaacaaaaattggataagcttttagatactcgtgacacgtttttcaaactgttaaacggtgtgtttcatacgaaaactttctatataaaagttgttttaaaatataagattaatccatttttaagtctgtaacgattaaaactcaattaatcacacgttattatcacctcgttttacgtgaaacacttaatttttatcttcatctttatcatcaggagattcaaacatcttagtacgtatcagcgctctttccaagtattgccattccacacaggaaaatataggttgtgtttagatccaaagtttggatccaaactttggtcattttccatcacatcaacctgtcatacacataactttttagtcacatcatctccaatttcaaccaaaatccaaactttgcgctgaactaaacacagccataagctcaaaagcacaaagcaccgctcacaaagaaaaaaaaaatatcgtaacgattatcctagaccatctgatccacaatccgacggctgagctgtcaggtgcttctccgcaagaagaaaatagaaagagaacatttaagaaatgtcattgataaaaacccaaatccgagaaatactattgacgagtacaggtttcataaaaataccatcgtacaagtgatttttgtcccagaaatacaatcgccgttatgattttatccattccgtgtcattaaatgcaccgttcattctaacggaaccctaacggagatagcatttttaagaacaaaaacacttgtataatgcaatttcatagaactctacttacgccgtgtttagttccaaaataattcttcaaacttctaacttctctatcacatcaaaacttttctacacacacaaaattttaacttttccatcatatcgtttcaattttaatcaaacttctaattttggtgtgaactaaacacagccttatcgataatatttcttgtaattggatcgattacatttgttgaattttctcagataaaaaataggctgtgcaagtgcaacggaacaggtgaagagttgcccacccatcccatccctcccatgtgccctgccgcccgctcgtgttcgtccgcgtcctcgtcctcgcctcgtcgcccgtgtcgcccgcgcgcccgccgcgcgcgcgctccccgccaagatttcgccacgccacgccaccacctccggcttcggctataacctcgccgcacgcgtgacgggagcgcatcgcccccttcccttcccttccctccccatccaggcacgcaggcgcgcgcgagagagagcgatgggagcggtggtggccgcggcagcggcggagatgaggcgcactggccgctgcggcggcggcggaggcgggggcggggagaagaagggggcgaaggaggagggggtggtggttgcggcggaggcggccgccgagagggggcggcggctgcggctggtggggtacgacgagctcccggacttcctgcgcgacaacgagttcatccgcggctactaccgcgccgagtggcccctccgcgacgccgccctcagcgccttctcctggcacaacgagaccctcaacgtctggacgtgcgcgcccccaatccccctcccaattccattcaatctctccttctcatcatctcatcggtggatgatttgcttttcaattttcatgccgattgtttgttgtgcatgccatgcagccatctcggtgggttcctgctcttcctggcgctcgcgctcgccggagccgccggcgacgccgccgccgacgtcgcgccggggatcatcaggtaaatacattgcatccacacacatcacatcccacccacgtcacagtcttattcaaaaatgtttttcccaatttctattcctttcttgttccacaatttaaaatgcaatcctcttcgctgttctaattcatttttaatcttacaaatagaaaaaaataaccgcgtgatttccgggtgccagtaggtatctttgaaaaggtctatctagtgtgtatactatttgctttgatgctttcatgtttgggacttttgctgtggtgccctctagattatgtgtatttactactttttaccccaaaatattcaaatatggagtatatttgctttggttacttgattacttctgcgaatgaataagctcctaccactgactgatttgttgccgcttagtttcctatattgttcttgttttcacatgctttcgcaattttgctattgtattatttatatattggtttttttaacgattattctgtaaattagttctatgctattaataaccatgtcgaaatcaaaacgacaaactttcgcatacggacaatcacgcaaagtttgccacacccctttttttgggagcaagttcttggtggtatcactagagctatagaggaccacctagagtagggattaccaaccactcccaaacaatttctgttcgtgttcgtgcacatgtttgctgtcgtaaatgtaatactattaacatttacagaagggtcaaatgcattcttacatgcataccactgcaaaattaccattcacactggagatatggagtagcatacagcagattgaaaatttgtggtgacaagatagattatgaattgttggtgtgcaagtgtatcatagtagtcaggaaaagatagatgctggcatgctgcccatgtgatgctaatctggataagctgaataattcactgtccaagattgtgagaatcgcacaaacaaggtccgagaataaggtcaggacgtgtactcctagctggggtacattatcgtctcattctctatacctttcttgtcggcaatgaaggaaatagtactccactataatacaatatggaattatggagtatctctttggaaatgcaatggctttggttgtgcaaattctaagtttgttggggggttttcagtaagaacatgggatgctcattagttcttcatgtaattaaatccttttcttcgtcatgagctctccagaaaatgaagggttttttttttcctgtttacgcaaaggccctttaattctgtgtcatccttatcttttctttgcaggtttgtggtaggatcaaccaatgcttcttggcagactaacgatcattcggtaagaaacgaatcgaagaatatatgaatatgtcctgttttcgtattactttcggcgatactagttattttcatgactcatcatattacttttcggagatgctgaaacaaacatccactctctagaagaaataacaatcattaattatttaattgtttactcctcagcagattatatcccttgtcacagctcgcaatctttgctactctgcacatatctgaagaaaactgcagttatttatgcaccattattgttggaactttactgcatagaattttgtttgacactaggtaacgaacgacatagtttggcaatatgggacgggtttcattgctcattcagataggtgcactatgccgtaccgccattagtaaagcttgattaagctaacgaattaatctagccgggtcccaccatccattgcaagtgagaaagggacatgaacggccgtgatgagctgcagccaacctagggtcttagctagggaacacacacatatgtcatccttgtccttgcattctgcaagctgcaaggagaggacatgttcatcagctttggtgtcttggagatgcctctgctgctttccatgtatcactggtacaattgtccaggcatctatccacacttccacagggatgatgatgattgctgatgaatcggcatctatccacacttacactttggagtagtagtacagtacttggcaggccagttctgaattcggttttgagttctctttggacctcattggattattggaaacacgagaatatatcccagatttctgtagaagtttaacagaaactcctgcgaaaaatttagtaatgttccaaaggagacctagcaaaagcagccagattctaacaaaaaaactgtacactgcaatcacaagcagcaaggtgtttttggtgccatgtgagacagttcaccttgtgatggagacactcctctcttcttggaaacaaatgtagcgtttggcttttgctttgctggtcccttctttttatcattggcaaattaagatttgctagatagtttgcagcattttcacgaatgctcctgaaatgatacaatgaacgaagtgacacctgccatgagcactagcttttgtcagccatctggcccagatcaatgagcagacaagaccaagtggcaaatctttgtatctatcctgccgttgatttctgtgatgaccaatgactcaatccgtctatgaatcttcaacaatttcttcttcttcttctttattttgagaaattacgatgaaattcaaaagaaacttgaaaattgtgctcactatttttaagtggcactatgcttgcatatgagttggtgtgtttgcacttagcatcatggtagtatgcagttgttacagtgatgtgaatgaaggtggcattggatgcagggcgcggcgagccatgacgccgcggcggcggcagcggcggcggcggtgctgggcggcgggcacggcgtgccgcggtggccgcggatggtgttcctggtgggcgccatgacgtgcctggcgatcagcgcgacggcgcacctgctggcgtgccactccaggcgcgccagcgtggtgttctggcagctcgactacgccggcatctccgccatgatcgtcgcctccttcgtcccgccggtgtactacgccttcctgtgccaccgcccggcgcgcgtcgcctacctctccgccatctcggcgctgggcgcgctcgtcgtcggcgcgctgctctcgccgccctgctcgtcgccgcggttccggcgtctccgcgccgcgctgttcctcgccatggggctctccggcgtcgtcccggcgctgcacgcgctgtggctcaactggggccacgccgcctgctacctggcgctctcgctcgaggtcgccatggggctcgcctacgccgccggcgcctggttctacgtcagccgcgtgccggagaagtggcgcccgggcgtcttcgacgtcgtcggccacagccaccagatcttccacgtgctcgtgctcgtcggggccgtcacgcactacgtcgccgtcgacgtgctgctcaactggcgggagacggtggccgccgcgtgcagcgcgacgtcgtaggcgactctcctctcctaggcattttgctcattgcgttttgatgattcaaacaatattcaaatttagaagaatggagcagtgttagatgagattcaggatcagggtgtgtgaccttgtgtcattcgatcgatcgaacatctatatgtgatgaattgaggacgatgaagaaattgatttacagtacaaaaaaggtcgtgcctccaaatcccggtgaactttggaagttttggtttccttcaatttggaagttctggtttccttttcgtttattaatgcgagatctgaatttaaggggttgtcacgcatgaattttaaatgaattttgtattaactagttcaattttcacaaaattcatatgaaattcgtccgttccaaaggaggccagaacgacggcgatgactgatatgaggacgatttgtggtatgcaccgaattttccgatcctttatttagagaagatttgctagtttttacaaaacttccccaaactttacaaaaagatgaagaacacgagacggaaagggctgcaggggctgccatcttctcaatcgaagacgacgagcttgtcgtactccgggccggagatggccttttccatgacggcgcgcggggagacgacgccgtcgccgtcgaggaacagcttgaggaggttcttggagaagccgctgaccagcgccacccccttctggccggaggtgaccggcacggccttggagtcccgcaggttccagaacaccacctccggcacggcggcgccgtaccccgccgccgtgtacttgcgcacgatcgcctcgtagtccgtctcccacggctgcgccgacgcctggtcgaactccatgtcgctgaacaccaccacgcggcgcaccatcttgtccggcgagagggcggcgcccgcggccacctcgaggatcttgtcgaacaccgcctggaagttggtgttcatgccccagttcatttcgcggatgaaccgcgccttgtcggagagtgcctcgccgacgatgtggtggagctgtgggctctcgctgaaggtgatcacgcggccgcgccacgggtcgtcgctgaggtcggaaacgaggaggccgagcgcgacgcagacgtccatggggaggccggtcatgctgccggacacgtcgcacacggccacgcagttgcggagcttgccgagggcgcgcatgtcgtcgaccatgcgctgccactggaggtcggccacgccgctgccgccgccgtcgtcgtcgagggagctgatgatctggtgcgggagcagcgcgcccgcggagatcttcttcttgccggacttgacgtcggcgaggtaggcgttgaagcggtcggcgtcgtgcttgaggaagaggtccttgtagttcttcatcgccacggaggcgacgcgcgtgtacaccaccgactcccacgcgcgcgccgagatgtacacctccgggagcttgagcgcgcggcggagcggcacgagcgccgccttgcggaggcgctcgcgggcgcggtaggcgtaatgcgcgtcggggaggtccgcggcgagctccggcaacgagcccttggggaagaggcgccgcgcgatcgcctcgcagaggagggtggagcggtcgtacgacttgtccagcgacgggcaccacttggcggcgagcgagaactcgtggacgttgccctcggcgagcttgcgcatgtcgtcgcggaggaggtcggcgaagagatcggccgtgcgatcgtgcagggatcggtaggtagggtcgcggctgtacctctccaccgccctcgccgcggcctccgcccgcctgcaccgccgctccaccgccgccttcgccgctagcctcccgtcgcgctccaggctggccgcgatgcgctcctccgccgaaccgacgccgcgcgactgcttcctgctgctggtgtggtagccgcgggcgaaaccgcgtccacggccacggaagcaaccgcggccgcggccacggccacggccacggcgggcgatgaagccgatgccatcagcggcggcgaggcgcgccttcttcccgggcttcctcgtggacaacccaccattgacgatgcggtggaggagctcggggaggtccttgaggtagccgaaggccgcgacggaggcggcgttgagcgcgagggtggcggggtggtggctgtggagccagagcgcggcggcgtagaacccctcgcggtccgacttgccggtgccgcgtacgcccctcaggttggccaccagccggagcgcggtcgccgggtcggcgccccacgcggcggcgagcagcgacgcgacggcggcggagggcgtcccgggcacgacgtggaagaagaagtcgaggcaggcgtcccccgacgacacgaacgtcggcgagaggttctccgtgagcgccttcctcggcgccggcttgttgaagttggcgtccatcaggtcgaggaacgcgtcgcccgtggtcgtcgccggcgcggcggccaccgcagcggaggggcggcgtgcctccggtgggccgaggagggtggcgatggcggtggcggccatggagagagagagagagagagggctgggtttgggctgggtagtggatgggctttggagttgagcccgctgggttgatgtggatgtgttggtggaggaggacgcgtggcttatatagggaggggtttcgtggcagccaaggcggtctaggtcggtagtgctcggcaagttggcatggatgaaatgaaccgacattagcgtatcaagggaaaaaaaaaaggagaaaataaaaaaaaaatgaaccggcataggacgggtgtgtatggatagtaggactcgtgtaccgtggcgggcaaggatcatttcgttttttttttttggttttgtttttctcgtcgtggagcacatgtagcgtgatcgaaagactatgtgttttctactgtagtttgaaacagctgtcgtctttttgtttttctttctagtgactcaagcgtaggggtggacaaaaagctcgggctcgcgagctcggctcgggcttggcttgagctcgcgaagctcggctcggctcgaagactaaacgagccaagcccgagctccctccacagctcgtttccaaaccgagccgagcccgagctagctcgcaagctgctcggtaggcttgtcaagcctatggaaaactgagttccctaagcgagcccaagcccattaacaattgtctggcccatgaaagagagaaaccctaagtcctgagctgagccgagcgcgagccgtgagcacctgacgccccagatccgatccctcccctaatccccttcctccgttcctcagccactagcgcagtggcgctggcggtgactggcaagaggagttgccggccgccgcatccatcccctccccagcgccagaccgccagcggcaggccggcagcgccgttcgaacttcgaagccccctctgtgccgccgccgccggcccgccacctcccttccctgcgcggctgcgccgcgggcgtgccgcctcgctccttgcgccgcctacctcccctactgtggctgcgtcggctccgtcctccctccccggcgacgccccctgtgccgtcggcccaccgcggcgccgcctcccttccctagttccctgcaccacctccggcctccgtccaccgtccccagtgccgctcgagccgagctcgacgccccctgcatcgccggcgtccctgactcgacgccgtccatcatgacctcgccgagacgccatgtcgccaaccgatcgacgacagttcatgcatcacaccgcaacgacgagcctaggatgaagaggttcgtgatgtattttctcatttttgtgatgcatgtacatgtaggcatgtagctgtagattgttgtggtcagtggagtagcgtgtgtgtgtgtgtgtcagtgtcaaactgtcaatgattcaattacagaaagaatgaggcaaataaatcaaaaatgttgtaccaatactatagtttgaggctttgagccatgtgttttgtgtagtatattatatatgagagtgagactgcgagtctgcgactctttgttagttgttatactgcactgcatatacttcacactcttgtttttccattgtttataattttgactcatctttaaatatgttgatagatccaaatccaaatcaattggtgcttcagatggtaacgtcgtcggtgcttctgcattctctactactggtgcctcctcccaagcagttgtagggtctacgacaagtgatatggcatacaaagattgtgatgtaccattatctccaataatagccttggtacagtacttgccctacatgaccttagttctaaaatgaataaatgaattgcatgtcgatatgcattgattaaattctgttttgtttatgaactgtagattgatgacgataattcaaaggataattcttttgatcacattgatgacatgtcaatgtcaatgccaagtggtgatgaggcagcgactggtggtactagtgatgcttctggaggggattcattgggtggacgccgaagaggaaagaagctaaaggtttcacccaaagttgctactgtaaaggggaggaagcggtcaacttgttggaataacttcaccgaggttaaagttacttccaaggtaactccaggggagacagaaacaaaggctaagtgcaagtattgccattcattgtatgcttacaaggctgggggagctactacacatcttgtgaggcacatgaacaagtgcacgccttacttgaaccagttggccaagaagagggctcaagctgttctcaacttcacggcagagaaaggtgactcagatatccctctcattgtcacccctagtgagtataaccatgaggaaactcgtaaactgatagctaagatgataattgttcatgagtacccatttaggatggtagagcatacttggttcaatgtcgtgatgaggtatttaaacccttcatatcagtttattggtagaaagaccataagaagtgaatgcttgaaggtttttcattctgagaaagaaaacctcatgaagagtattaggagtgtggaagtgattagcttaacatgtgatttgtggacatcaaatcaaaacctttgctacatggcgttggttgcccattacatagataaaaattggacaatgcaatgccgagtgctgaactttgcagagttggatcctccacatactgggaatgtcataggtcaggccatctttgattgtctagctgaatggaaaattgaagacaaggttataacaattactcttgacaatgcttccaacaatgatacagctgtcaagggtttaaaagctaagctagcagctagacgatcaagttgttacaatgctaaatacttccatgttcgttgttgtgctcacattattaatttaattgtgaatgatggcttagcacccttggcatctttgacaaagaacataaggtctactgttaagtacatcaagaaatctccatctcgtatacacaagtttttagaaatctgtagaaatcttgcaatggaattgggagagggcctgaaacttgatgtgaccacaagatggagttcaacttatcatatgttgagaacttgcattgcatatcagcaagcattagattcatatgcagaaacagatttaaattatgagtggaagcccagcccagaagagtgggatttgtatgcatcaattgagccaatacttgggtctttggctgaggttactactgcattttcaggatcaacctatcccactgcaaatattttttacccccatattgtcaatgtgaaagttgctttgagagatgcttgtgcttcacaagatgctaatttgaagaatatgggaaaagcgatgttggataaatttgacaagtattggaatgtgaaaaacaatgcaatggtgcttgctactgttctagacccaaggtacaagttaagattcattgaatggtgttttaagaagatttatccaactgattttgaaaaggagttagctgaagttcgaactgaattgaatacactttatgataagtttgagaaggagcatagggaaaagatggcagctagcaaaggtaggagcttgagagcttcatcatcagtttcaacttctgacataaacaagtctctaccctctgtctcaagcaattttcagtcttatttgcaatcttcttctgaagatgcatcaaagtctgagatgcttttatatcttgatgaacgaaatgaggacttagcgaacaaagcttttgatctacttgtgtggtggaagttgaatggctaagaactttttgactataccagccagttcagtgtcatcagaatctacttttagtgctgggggaagagttctaagtgattatcgtagttctctatgcccaacaatggttgaggcgttgatatgtgcttctagctggattagaggcgctccaatgattacggtactcactattatgccatgcatatttaatgcatattctcttcttaacacatgacatgagtagctgaattaacttttgatttttctgaatttcaggcagcagaagaagaagaggatgttgagagtattacatttcctcaaagtgtagtgcaaagcaactagtaagtaaatggagtacttcactcattttttttcctatttctttactatcatttgctcgcttgtgattacatgatgatttatcatttatgtaggcaaatggatggctcatggctggaacatgttgctgtggagtgtggagaaagtctaggagttggagatttggagagttccttttaatattttgcgaaataataattagatgttctataattattttgtgaatttgagaatggagactttggacttttggaatgtggtctactctaagttatgtactctctataagactataactatattactctatgcttctattatggtgtggtcatgactattaagattatgtgtgtcatgttgggacatgtcctgtgagtgtgaggctgtgaatgaatgatggagattgtggaattgtggtcttgtgaagttgtgatcttgtcagcttgtgaaatgtataatatgttgttgctgtcttgttgatcgtacatgttgatttggcttgctaattgattgctctattgttgaagtatttacttgctgctgtacatcacaagctggctcgagccggctcgagctttgaaacgagccgagccgagctgcactttttgctcgttcaattaatcaagccgagccaagccgagcctgtagttgagcaagctttcacgagccgagccgagcttggctcggcttggctcgtttccacccctactcaagcgttgcagatctggagactggacttcatcattctttccgagaaggcgagaacgggatgactttgagaattcgtgcacttaatttctgagtaacatggtgattttttttaaaaaaaaattacacatataacttttatataatatttcctccgtttcagaatataagatttttctatcattactcatattcatatactccctccgttttacagtttaagtcattctagtattttccacattcatattgatgttaatgaatctagacacatatatctatttagattcattaatatcaatatgaatgtgggaaatgctagaatgacttacattgtgaaatgaaggaagtatattatgtctagattcattaacatatatatgaatataggcaatgctagaaagtcttataacctgatgaaacggaggtagtacgtattaattgattttttttttcaattcgttcgttccctcgaatcattcggctattcaacatagcattttgttccattcaacatttcgaacaatagaacaatgcacaatggattttacttgaaaataccggtattattgtaggtggaggagcagtggatacgtaacatcatccagtaggttcaatcttgatgtctactactctgttctaaaaaaagccaatcttggctatgaacctggacaaacatgtgtctagattcgttggtaggattaggtttttatgggacggagggggtattaatgaagtgtgtgttagaggacgctttcacggctacacgagtgtggtaggtttctatgagtatacggttggcagttgtgccattgacatgtgggttatagtaaagtagagttcacatgttagtgatacatgtgcaaactgcacaaagtcagatggtttgtttacgagcgtgacatactccctccaaaaaaacaataacttttggttatgaatctatagatataattagattttttttttatggaacggagggtgtatatgtgtcctccatctaaggaaaaaagaaaaggtttattttgacttataagagttaatcacatgatattgcctcagctgccattttctatcgtgcccgagaggattagatggccaaagtggtcccggtcaaaattagatggccaaattggcgggtatttacataagttgttcttgcagaaacaattgttcgcacatactagcattgttaaatacacttaccaggggcctagtagtatatatgttaaaatttactaaactagggggctattcactttgatatctaaatcaacattaccaaaatttgtataaggttgaaaagtgtaagcttgtttagtttgttctctttgtcaagtttttgtgagagattctagaattaccaaactttgataatggagacaaattttggtaatctttagattacttaccttgccaaaaaaattttagtaaacccaaaacttggtttgatttattttgggaacgaagtgaacagcccctagatttcacaacgaaaaatgccagggagaaatcaacagatcaatcatatggtccaacagcagcacagcaatggaacatatgctcaacatcaaaccaagcaagtgcactaacaaaagcaagacaatgatatgaaagaatattcagtctgcttgaacgaagatgataacatcagtggtagctgagagtctatttacaaaggaacctgatcatcatcattatgtacaaaggatgaagaagccacaagcaaccaaggaagtctataaatttcagtttcagtatatttacagttgagagtttctcccttcatttcagcagccataggcatgatcaggaaggcgttttcaacgaatattgtcaggtatcatcgcgaccgtcaccaggaagtactcacatcccacaggcagattgtacgggttcagcatggaagcgggcgaccggcggccaccgctatcaaggcgtgaagcttccatctggtcaccgtgcgagggcagctttgctatgcgccgttcgatgtgcacaatctgcccgattatgtaagctgggtgccgtggatgctgctccgtgaatagggccactgattcctctgataggtagtagtttgagcagttccggttgattgcttcgtaatgcccagcagggttccgaacaaagaccgcgagctcatgaacttcgaaacggccgaatgatatcttctccttactagcctgttgaacagtattgacaaccgaggatactgtcttgttatttcaatcaacaaaatttaacagactcaacctaacccatagagtaatatgtgcttattattgattagcgcggaatttaaactaaaacaatttcaaagtaattggcttcttatgaattcatttattttaataaaaacagtggcttaagaagttacgactcgtacctgtttttccagttgaagcttactgtacaaatttttaatcgactctttcttctcctccaacactcttacaatccttgagtagcgttctagcagctcagcactctgtcgtgatagaaaaccaactttgtctgccaggatcttgatgcattgctgaaactgaatggttgtatcaccttcatccttctttgcactgtttcaataaaaaagtattactcagccagtaaatctgctgtttcgataactctacagcagtaggggatccaaaggaagaaaatgctaatacttttataaagtaacagaactctatgcaaaggaaactactctgagcaaaaagaccaaaaacatacaatcatctgaaggaacacaaaattattttgacgaccaatatttcactgtaagcacaaaatacagtttactactccctccgtcccaaaatataagaacatctcccaaaatataagaacagtttactactcactgtagaaagcatgccaaggttaaataacatctaacatcttcctagctctgtttactacaaattatgcaaaaatgtctcgctaaaataacatccagcgcctctctaaatctcaacaatgagccaagatacagaaaatctggacatacttcctggaagctaccatgaattctattctgctgtttattttgtcggtctcactgactgccaactcacaaatcactaataacttggatatgttgaaccaagatacagcaaatcttagaagttccttcgatcctatttttcttgtttattttatcagttccatagacttggcatggatcaagcccaacagcacaacgaacttgggggtgggtggtttgtaaatgaaatgcagaactgactacacatgagtttaagcgaatgagagcagtaagataccttgctaatgagagagctaaagcacgcagtgagtccgcaaaaccagacatgcctggtgcagtgacacagttatttagtctctcaaacagaccatgtatcctcagagcagatgaacgcagggcatcatactcaacagcccttctgtcagctgaacatttgtttgtgcgggcctcttctcttgcctcgtgtaagcagttctccagttgcacacagttcatctatattaaaatttgtaaaagaaagtaagcagcaatttcaattgagcatgaaaaaaaaaactattgctgaatattctacctcccacttgacttacctgagactcatcaagcagaccctgggtgtgttcaagttctttcttcagagagttgacctcatccaccaaggcatt

SEQ ID NO: 25661 - DNA, 40784 bp, Oryza sativa
  unsure (1)..(40784): unsure at all n locations
gaagtattggaggaaaaagtaaaaagacatatttgcaaatgaaaaataatttatgaataaaacttttatatacaatgttcttaacgatctgaaagcaaaggctaaaaataaggataaaaatttcaaaattaacttcagatttaagcttaaaaatttaaattttgatcaataataagtataaatataggtgaaaaaatgaggatactatgggcctgtttgggggagcttaagattttaagaagcaactggttggtagtcagcttcttagaatctggaaaagccgggtttcccagtttctggcttctagttcattttctaaattctacaactacagcttctcagaatctggactaaaagctagactgtttgtgggagcttctgattataggagaaactgcaacagctagaaactcctccaaacagaccatatagttggctagagatgttgtagcctttctctcatataaaactcttgacacgaatttgatatagtaacaatttatcccctcacaccaccataccaccttgaacacatgcacaccataaccagcctgaattgccattaattttgataatttgactctttgcaaaaactaattttacaaataaaccgccgccaaaacttatttcaaaaatgacccttttgttcagcgccaaatagcgtggcactgaatttagatacctcagcgctaaatagcgtggcgctgaatgtacgttggcacgttgactcagccttccatccacgatggcacgacattcagcactagatgatgtggcactgaagtgtgtaagttcagcgtcacacgatttggcgctaaaaaaaagggtcacttttgaaataagttttgacggcggtttatttgtaaaattagttttttaaaaaggtcaaattgtcaaaattaataccggaattgccatatggacctatccaatcatgcaaccatgatcgatcaatcaatccaatccaatccaatccaatccaatgcatgcatgcggcgtcatgactcgtgccagatttttttcagggctcagaacagatttcaggattcaggcaggcagcagtagtgtgctggcctgttgcattcgtgcatgttgcagcaacagccacgcgtcagccttaattaaatgccgccgttgacgagctgtacggcatactagtagcacgtcgaatggacggccccgatctgtgtctgcttctttttggacggatatgatgatgtgatatgcatgcgtggtacactgtttattttctgcctatcatatagggtgcgtttaggcactgtttagtaataccaaaacttatctgaacttctaactttccatcatatcacatcacatctaaaacttttctattcacataaacttctaacttttttttccaaactatcaactttccccaaacttctcttcaatttcatgaactaaatacagccttagttaacgttaaaattggaagtttggttgaaattgaaacgatgtgacaaaaaagttggaagtttgtgtgtaggaaagttttgatgtgatgaaaaagttagaagtttgaaaataaaatttggaactaaacttggccatagtagtaatttttatcatgatttttgtaccacgttttttaaacaactaagtgtattctgtgcgaaaactttatataaaaaatattttaaattattctaaatttataataattaaaacttaattaattatacgttaataatttcattgtttttcgtgtcctaatttcatcttcaatagaaataacagccaccttagctaaatgttggaggatatggtcaacttatggcagttgctctcaaatcattctccctatgtagtttatgttattgaaaaattctaagaattaatatagtatagaatataaaaatgaactaacttagagattgaaaatcctagctttttttatttttattggtcggctaatctattatattattaaaggaatagaaaaaggagcctccacgttcactcttatggcctagaaattcccacattaatcggagaaaaagaaaaaacagagtccatataggaatacaatttaaaaataggtgaaattcggaattagaaaataaggaatattagaagaggagactagagtccatatagaaatacaattaggaaataactgaaattcggaattaaatataaggaatattagaagtagagtatagagtccatatagaaatacaattaagaaaaaaaaagaaagtcggaattaaaaacaatgaatattagaagtaaagtatagagtacatatcaaaatacaattaagaaaaaaatagaaattcggaattaaaaagtaaggaatattagaagtagagaatagagtccatatagaaatacaatttacagaaaattcggaattaaaataaataaatattaaaagacgagtctagattccatataggaatatatataatttacaaataactaaaatttgatattaaaaataattaataactaacacgtatataaaatacaatatgaatatgacacattagtagttttgtaaagttattgtaaaatttaaaattatgtttaaatataaaattttaatatatttgaataatataatgagaaaacatatatgctattatatgagagaaaatataataatactagtcgcgtaatctgtacgggccatcatgctagataatactaaattgtaagcggcttatcagaatctgcagctcccgaaacagcggctgtagcaacttagctttcgtttggttggtgcctgtttgggcgccggtgggtcgagaattgattgcaaagttaggagtcgtagcactagcaatcaattaataaacggcacgacggcgaggacgacggagagaagtagtgtagtcctagtgctgccattgttgcaggagtacacaggttgcaagtacaggccggcaatgaatgaagtgatagataggtgttgtgcatttgtgcatgagagcagttggctcttcgctggccccctgagtctgcctctgcctccctgcctgccgccggatcattcacggagctctttccatgtgccgtttgttatactgctactaaaagagtaattctacggtgctctttattggtagactagtaaaattaatctgaaccctctaggactatgttcggttgcacttatttcaattgtagtgtagccaattcgaacagtcctatgtgtttgttgctgcagcaataaggggtacattgtggtgtagccgaacagagcactttcatactactactttatcttctcgttttcccatgtcgtttaaaaattcattaaaaagtctagaaaactttaataaggcatgtcgatatatgatatgtcactcaacaaacgattcaaattcaatttggagagtagaaacgccaaaaagagtaaattaactgcatattggattagttttcttaatttgccaaaggtttcgccttgaactctcttgcacatttttttcacttttgaccagccttgtttactcatttttttgggtttggtttggaccaatggcccagctgtcagatcgtctatatatgagaacaaaaaacggcttccaaggaaagccctggttgtggagactggcgagctccctgacgaaatcctccaacgccatctacttggtgcaagttcgtcggcaacgagataacccaaagtgaaagtgtatattcggtgtaaaagtgaaaaaatggttcaagatgcaactgtggtaattactagttcgtcgtgcaaattcaaacaaaaataaataaattttactgcaaatcgttattcgcggtcaaatttgttgttttgtgtttctagtttaacttacatatttatctgttttgttaagagaaattaattttcgtgatagctatttagacgtacgacatgtataaaacggcgggaaaaaaatccacaggccgggcagaagcacatcattgtcaaagcactataaacagtatagtggagtactaactaatataggctgtgtttagttcacactaaaattaaaagtttggttgaaattggaatgatgtgacggaaaagttgaaagtttgtgtgtaggaaagttttgatgtgatggaaaagttagaagtttgaagaattattttgaaactaaacacagcgatagtaagtgatgtataaatattgagttacctcataatcaacgaaaaataatagctgtcgatgtataatatctattggatgattgcgagacgacgcatgcaaatgattcaatggttcttgttttgcgaacgatgtggcacaatacatgtttagttttcttttgtcttaattagcacaacatagtatagtagataaatgaggagaatatctatttgccactagtatacgttttagggcatgtttagatccatttgaaatgttaaatggcaaatggcaaaagttttggtggcaaaagttttggtattgtaaaagtactagttggtgtttagatgcatgttaaagttttgccattttagcactaaagtgagagagagagaaagaaagagggagtggtcccgaaacactttttggcacaatttgctactatggattagcaaatgtcaaatgccaaattaccaacttttgctactagtgtttagatccaaaatagcaaaaggtgctataaaataataaaacttttgttattttagaggatctaaacagtgcttcagtggttgggaagcataataagctgcaggaaggacgtgggtagagagagtaattaacgtgtcgatgttggtcgtctcaactgtcaaccccatgtacccatgcatatatgcgcgtacgtcnagccgtcacaaaggtaggattcacatgcnatgctagctagtcaaacgntgtgtgggtgagcaccggggcgttgcgtaccgctgtctcgccatgaatgatctacgaggtacccatgcatacgatgtcggcgagctaagctagctagcttgctcaccaacggtatatcgtcgaccagctcgccggctgcttgagccatctgacattgtagtcatatttagtgagattttgatagctatagctttttttaagctttcctaaactgtttaactttttatttagatgctaaaaagttgtggttatatattctacagaataaagtgcaaggtagaagtaagatgctgtgtttaattgttagctccttgagattctcataaactgttactcaaaatattaaacacaaataaacatatatatttttttggaactatattacactatatagtgactatgggcttattcacttcgttacaaaatccaatccttttaaatttccgaccttgatcaaatgcgctagctactgcgctgcgataacgaaaacttagagcaagtttaatagtatagtcaactactagctccaaatcatctatagccaatgtaatagccaattcatacaatagagacttactacactattaatatatggtcccacccatcatattcacattacgtcttgaagtccgtgatgcagctggctataaatctgtagcccgctgctcttctctctcttcttttatctctttaaaatatgtttatagctgacttatagtctgctattgtacctgctcttataaaccaacaaactaaacatgcatgcatatataacattatattaccaacaaatactaattaaattttggtaattccgaaactagcttcctactctcaaaatttctatcaaattttgataagatatcaaaccaaatactactcaaccatactttaattatcttattaaaatttgataacactaaaatattttttttctatttggttacactattatttatgggtgcgtcgcatgcttatatccaatacaactgaacacaatcctttttataatgatttaaataaggcaacaaggacataactacaccgataatattagctggatagtattaaagagagatacccttaacgggtaggtacactagcattgatcgaggatgagatggtgaacagctagatttagctagagagatctatcgattctcatgaaaggggacgaataatgctgcccagctgactcgctgaccgtccagtaatggatttggctgcgcgcatgtactgtaatttctgtgattcttcacaggttcagtaacaacattacacgatggatggatttgttttgatctgtccgttttcatatgcatggtgtttgctcgctgacaggctagctagcttagctttgctctgccagatcgatgcatatccacgaggccttgtcgccaaaaaaaacaacatggaccagacgtacacgtgtccttttgatctgcgcgcaatatatgctgagaagcagcggataaaattttgaaaaacagagggtttgttcactttgctattattttcaacattactaagttttggtattatcaaattttgataagcttgtcaaaattttgataaggttaccaaattttgacaagattttatatgtatttgacaataaactaaatgtaaacactttttttaaactttactaaaacttggtaaagttgaaaatggtaataaagtgaacaagtcctgagtttttatcaggttcttgctactaatttattttctaaaattatctgaactgttttagaaaacttctgaatacattactatggaagatgttacagccaccgaaacatcctcaaacagggcctacatgatgcccgaacaagacgaacattaatttacatatacaagtgtagttacctataacgcaaggtttaatttgatccacgagaccatgatttcaactttaccagtttgaaaaaaaaaactattattaatccgcgtatcacagttggatgtcgctgaaacttttacaaaattaaaaccgtgccattgagaagaaaataagagaatgaagaaaatataaaatgtgacaatgataacacgattctagttttgtaaaattttaataatattttgctgatatcgtgaacagtaatatcatcgacaaattaaaacggcatggatcaaaaactaacccatatcgcaatggtagttcgttcctctagctccgtgtggtgcctttgtgtgcatatacgcgcccaattagagcaggtacaatagcaggctataagccagctgtaaacatattttaagaagataaataattagaagggcagcgggctacagatttgtaaccagttgtagcacggactccaagatgcagtgtgtgtatgataggtgggactacgtattaatagcgtgatatataactattgtatgaatgagctattatattgactatagataaattggagctagtagttgactatactattaaacttgctcttatggacgtgcttacaggcgtacagatggagtaattaattaaggtacccacggaggagaacactcacgggagatcggacagtgatcgcaagcacgtacggcgtagtacttgctagcagcttgtggctacggcaattttaaccatttaatcactgcanaaaggcgtactttgctagggcaattaatcacttaatcactggaaaaaaagcaaagctacagtaattgttggttgcgatgatttgcagtggagttaattattggttgcgattgcgatgatttgcagtgctggtttgcgtgaggacatgcagatgcagagggattttgcctctccggcctgttgtttggtgggcccggcctgtgttggaggtagtggcgtgtcttcttgcattgtgagcccaatttggtggttggatcactcccattcccaggcccgtcctgtagaatattctagaacaaggccgtgacagccaatacaaaaaaattgaaaaagtatactagcttattctagcccaaaggccgtgagagccaatggaaaaaactaaaaaaaaaaagtgagacaatggggagaaaaaaaattccgttgccgggactcgaacccgggtctctcgggtgagagccgagtatcctaaccagctagactacaacggattacaagctgatgctgtacaattatccattttgatgtttgtaaagaatcacattaactatccaatgtatcctaaccagctagactacaaccgattacatgttaatggagtacaactatccagtgtcaatgtttcttttttttccatgtcacggattatatgttttacaattgtattgtttagaatcgtatcctacataggccaaagattttgaagggaatgaaacacacacatggaaaggaaatatacgccgtgaaatgccatatattttaaaattgtgtatggtttacaatcgtatacagatgcatgcatacaaaattcatcaagccgatgtgattgggtgaagatcataacacggatggcacgcgcccagtagagctcagcagtacagtcacggagagtatataagtggcgatctttttttccaagtttgcccgtgaataaccccttttccttcgccattggaaagctggaaaagcgtacgtctcctttccgttgacagctcgagctcattcatgccatccatccaccgtccacgcacttttccgcacagtgcagccgcaggtacatcttcttttaaatggagtatttcgttttcatgcaaacatttgctgatttcttaccctccatctgatagatcggccttccatcatgccattgtgaccgtccgatcagaaatcaacggtcatgattggttcgacggtgcgggaaagcaccaacaatgtagtgatggagttgttaatgcatgacctcatccatcagaattcaaattatggatttattacgtaaatgcaagtgaaagctttcaatgcgactttagcaaaatcacagatgtgctggatttctatctctttgagccagtgataaagacagatgtacaaacttgaagggaaacatcaacatatgaaaaagcttaattaaagcttttctaccaaagaggagaaactaggtaaaagttataaaataataaggaaatacttataataaaatatagttgtttggtttggttacattttagaatcaactatagttattataactcgacaaattaaatcatatacacacataatatctaacaaatccaaatgtgtttaagaaatttttgagagtacaaggtgtatccggcctatgctttgagcgcgtcttagggaatgcaaatcaaggatgtatgagtgtggtgtgttgcgtgtgcgtagtgatcatgtgtcatataataaaatggttcaatcgtctgacaaggcagggtgcgattcttttaaaattctatgtaactaaaagttgaattagatttttttaatcactatatactagtcgtaatattagctattatgcggttaagttaccgttaccagagcacaacgtaacgtggctatgcattgcacgctagggttcaagtgacagatcggttatataaactgctaaatggaccgctccattttccgtgcgcactgttcgtgttgaaaagtactacctccgttttttaatagatgacgccgttgactttttatcacacatttgaccattcgtcttattaaaaaaaattgcgtaattataatttattttgttatgagttgttttatcactcaaagtacttgaagcatgatatatatctatacatttacataaatatttttgaataggatgaatggtcaaacatatgttcaaaagtcaacggcgctatctattaaaaaacggagggagtagcaggaacaaacgcggaaatgcttcctatcagacgtctgacgctacaaacaaaaattggacaggcaaactactacttccctatccactccacacatccatacatgttataatgatatttaaaataattttacttctgatctacttatctaatatatgatatgatcataccattatatttattataattaaatctttataacaagatatcacatcattatattccgatgaaagaaaaacttatgtttcaatccgttaagtttaatgtttcagacacggtagcaatatgtttcattgtgagttttcattatgtttcatagaaaagttaaatatttcagtaacttattttttttgtttcaccacgtacaatgcttcacgctgaaaaagtatgagacgcatatgcctcacacacacacactctctctcatacattttattgtctttctccccacaccatgcatgcatgcaactatttagtgattttaaaaaatcttttttcttccaaactacttaacctatgagcgattcgatcacaccgttgaattcgctataattaaatctttacaacaagatatcacatatgattatattctgatgaaagaaaaacatatgtttcaaaccataaaaacttaatgtttcatacatgatataaatatgttccaccatgtgtttttattgtgtttcacaaaatttttatatatttcagaggctgatttttccatttcaccatgtataacttaatgttgcactaacgctcaactgaaacatttgtccgtccgattttttttacaacatcggacgatttggatgtccgatttgtagctctctccgaacaaacgcagccttaatcccgtgcaccagcgcgcgcggatctcaccgtctccgatccgatataaatatctctcgcacttgacgcgcgcgggcgtcggcgacgcctcgtctcgttctcctcctccttccttccttttcccgaccatctatcctccccttcctttcccgatcgcccgcgcgcgcccacgagaaagattgagaaaggaatccatgcgagcaccgagccatgcgaaaaggaaaatccggagagtgctacggctcgaacgtccggcatcacaccaaaaatcggacgtctaaacgagcgcatgtgagaacgaaccatgtcactgtaacgtatgtgcatagaagatgtttcttttcattctttcctcctctctttaaatatttttttctcctaaattacttatccgatctacgatccgatcacaccgttgtattcattgtaattaaatctttacaataagatatcacatgattatattatgtcaaaagaaaaacatgtgtttcaaaccgttagaacaaaatgtttcatacgtgatagtgatatgtttcaatatgtgtcttcggtgtgtttcacaaaattcctgaatctacctgctactactctctctccacctcatgcatgcatacatgcatgtattttagcaagcttcaaaatgatttttcttttaaattacttattcaatctatgatccgatcacaccgttgtattcgttgtaattaaatctttacaacaaaatatcgcatgattatattttgatgcagagtaatccaaaccagagtaatccaagaggtcgaatgtactgatgcagccttgaacgacgccgacgtagacgatacaattgcctggactggtggaacattggacttatcccttcgccggagatcgaagacgatgcagccccacgtcgggtgccaagttccgtcggaacgtaaaaacaaaagtagaagtaaaaagggtggcgatgcgccgaattgtattgatcgtgaagatagattacatagactccgggtgtacatatttatacccatgggttgatacaagtccttgtcggacaagaaagaaactaacctaaagataaaaggaaaacataaagtctttatcggacactaaacacactttcctaaagataaaaggaaactaacaaactattcctaattaatagataaattgccataccacatcctctttaaactcggtcacttattgataagcttcctttagtagattgatttccttaaccgaatatagcaggaatccgactattggcgacttgataactcccatcggctgattccgagatgctgcagccgataatgattctaaaccgatgacgtctttgccgattaccaaatttcactgttaacagttgccaaggtggcatgaggcgccattactttctctctcttaatcaaactttaaacaaaattttattctaaaatatatatccaatctataatttataacaagatctcacatgaatatattttgataaaaatatatatgcgttctagaagaaaacaaacttatgttgaactatttaaaaataattctttcatcacttgtggagatgtttcaacccacttcacaaattgttccaaagaggtacaacatataaaaagtattgacggcaacaataatcattattacatgaaacattaagtcccgactagtgaaacattttttatatttagattgaaacatcgtattataattaatgtttaaacataataaatgtatttgctgaaacatataaaaagggatagcatgaaacattgctaatgaattagtgaaacatcaacaatgcttgttggaacatttcagtaacaatgtgtgcaacatttgaaaagtaaatttaaaagtcgtcggaatatagtcatgtgatatcttgttataaagatttaattgtaacgaatccaatgatataattagtttgaaattcggataaatagtttaagagaaaaaatcatttaaattttaaaacatgtttgaatgcatgctccgttggtttgtcgtacacctaaccaaccgtttcaccatgcacctacactgttgttattttagattgagacgtccaattttttatttctggccggacggccgatggtaagcattttcgggaaaatcccccttcttgcgatcgatccatccatcgatttaaatcgatctccgcagcttggcctctcgagagagagatcgggatcgagagactacgaggtctatcgtccatggccgatcgagacacatagctagggtaatttgttgtgtgtcgtggtggggggctcgatcgatcgatcgatctccatggagaaggggaagaggcggggagggtcgtcgtcgtcgtcggggccacaggcagtggcgaggaagagggaccagttccccagccgggccaaggactacgagctgctcgagccggtcggggatggcgccaccgccgtcgttcgccgggcccggtgcctccccctcggcggcgaggtcgtcgccgtcaagattatgaacatgtcgcagcgctctgaagacgatgtggtacgtacgtatgtccatttcttcttcttcgtcgtctctggatcatgcatacttgcttatgcgagtcgactgtgtcgtgtcattggtgcatgcagcatccaaactcatgcaaacttaagttcatcagtaatttctagtaatctagttgcatgatgatttcataaattttagtggattataatttttttcgtaggaattatcacggccctgaaggttctaagtttatgcatgttttccaaaatgatcagttaagtctttaggtcaaaaacgtaattagtatttccaaaggtagaatagaagacatataaaacaaaattgtatactatatgcatactataagcattactgaatatcaaatgaacttgatacacaaattagacaatgaatctgaaggtaggcttaagtataagtttatttacttaactaatacttaagtcttcgagtcgaaaagaataactatttctaacaatggaatataatatctacgtaacaaaattgtgtatatcatgcatactgcgtgcattactgaatatcaaataaacttggtacataaacaactaagaagacttaagtataagttttacttattaagaggtcttgaagtcttcgggttaaaaagagcaactatttcgaaaagtggactagaacctatacatacataacaaaattgcgtacgacatgcatactgtgagcattagcccctctctccctctgtccctggaaaagcgatggtgctagcattcatgatagcaagctaagcaatgcacatgaggcattttcccaacacaaatatctctacattgtatctaaataagcaacgtaatcaactctttgtttcgcataatgaatttaatatatgtctttgggtgaccgtcaccctggccttaacttacttcttcttactaagttaaatctgctatgtgtttgggatttagacataataactaattaaatttatagtattgcattggagatgacttcacaacgaaacagtagatgcgagtgttgatttgtagataattgtagtcttattaataacatggttgtgcatacctctagatgcatagtgtgcaagaatgaaattatgaacatattactcgtcagttgtattgagagacacctatatttctttactttctgcagaatcatgcctctgaggaagttaaaatgatgagtactattgaccatgacaatctccttggtgcatattgttcatttacagaaggtgaaactttatggattattatgccctatatggctggtgggtcatgctttcacttgatgaaatcttcatatccaaaagggtttgacgaaaaatttatagcatttgtcctacgcgaaacattagaaggcttagcttaccttcatcgctatgcacttgtacatcgggatgtgaaggtatgaatctttctcatgcagagtttaataaatatgaattaattcataatttatatggctaacatgtattacggtaacacaccatatacttcatacgtgatcttaggctggcaacatactccttgatcaacacaaaggagtgaaacttgctgattttggggcctcggctagtctttatgacccaatgattaatagacatggtaaaagaaagactcttgtggggactccttgctggtaatttctaaagaacagaaaagaactatttgtgaattttaaactacccaagtcaatttaatgctaatatactatttattttgtttttccctttaggatggcacctgaagtcatggagcaaaaggaatatgatgccaagtacttatcaattttgattattggcttatcatctttcagttaagaatgagtgtttttatttttatatttttcaataaaacaaaagtcaactgtagggcagacatatggtcttttgggataaccgcacttgaattggctcatggtcatgcacctttttctactcaacctccagcgaaggtatttgtttagtctaaattttttattttttttcatagcatcatgataacttaataccttttatcaaatattgtataggtctttctcttgacattacaacatgctcctccatcacttcacaatacaaaggataagaagttttcaaaggttcataaatatttatatggtggctcaatatgtgtatttttaactatactaccttaattgtacatttgttttgcagtcctttaagcaaatgattgccacttgtctaatgaaagatccatcaaaaaggccaaccgcacaacatttattggaactcccatttttcaaaaaggtaaagtttgaagacaatgttttgaaatccgtgctaaataagttgccatcgttgggtgatcggatgcaaagtatacaggtatgatccctacatcgtcctatcatagtcaaatattcatcccttcataatattaaattctataagttattttctgtaggagaatgaagcaaagctgcaagctgagaaaaaacctcttgataaatgcaaagagaaggcatcacaggtttatagtactaaaaatatactttgcaatttttgttacactaacaacattgttatgacaaatgcattttctctaattttcatttgctagtgcaattattacttgttcacacctataaattgtattattgctattagaactaatgaatgcatctaaattggtgctaacattaactaagattatgtgagatcaggttgttatataattttaatttatggtaaccgtcattatctagaaatcgatactattgtaacaatctttgaacatttttttacgtacaggatgagtatatgagaggagttagtgagtggaactttgatatagaagaactaaaggcacaagctgcactggtacgagtatacttttttttgcaaaggttgtaacaaccttttaactattaactatataaagttttttttgaacaatgtttagtacccagatgagaatgatggcggcgaagatgagtatttgcgttttctttttgaacttgatactatttgtgaaagtgctcccatacatgacgttcaatcacgagattactctaaaaatgaaaatgagaaggtaattttatttttgagattttttatttttattttagtgactatgttaatatatacatatatctaataaaagtcacattttcagaaggaaagcaatgaaatcacaagaaatgagaaaatagatacgacgcccatacttcaaaggttcatcatcgacttcattcctttcacaatgtttcatttttttaatacaataataattttcattaaaataattatgcaaatcatttcacaataataggtgttccaaatatgtattctttaacaataaatgctcaatgttaatgccacaatcttttttttgagccaagtatgttattgatgtaacaactctcataagatgtttacaatgcattgtgtggttatttgaccattattgtgttttattatatcattgccctctacttatattacatacaagctctatcattttggttggacatgatttatttaggaatgattccatgagattctgatgtaatcgcaagcataaaaaagtttaatacatcatatctaacttagttgtttatgtcagtgtgaaacaacttgagaataaaggaagccctaatggcctcgtgcgccacgagtcatttcaacatcgacccaaatcacctactaagcaaatcacaagagcaggcatgtttgtacatttccttatcccaactaaaaaagtggcggttaaatgcattataatagttttaaattaagtattgggtaattagtattgttcatattttcttatgcttattattgtttcacacattttaaaactttgcattttgaatatagtataaattttggagtggtttacacacattagagcaaggtaagaatgatttgttttttgcagtatcaaattgcaaggactttgatgaatatcttaaatcggccattcagaaaggccgttttaaagtgacggtagaaggtgctgaggttgagaaggtaagtcttttattatacgaaaattttctatatgtgatcaagtttttaaagcattacttttgacttgtttattgcatgatattttctctaactataagtaggggtaaaacaagttatatgtgacatggtactcattttgaattagtttatatcataattactagtttatgtgcttatttttgttcaattcatttgtccttctcttgcaatttacatgttttggtagagtatattcgccgagtaaaaaaaaagaactatcagacgaacatcatatttgatatatatcatttcatatatagggtataaagtcattttgcatgcaccctaagttatgtaatgccataatcttcaatttagtttatcttggtcatatgattatctatattatgtatgtttcttaatttgtagcttcaacatatctagttttagttgttaacaaattgcaatccaataggcttatgaactagttaacgtataaatgctattgttaaacattgataggaacatttttaaagtaaccatttgaaatcttctttgtggcagttggaagtggctacaccacgagaaaaggaattattagaacggattgctagtttggagcgaatgtacgcctctatttgaaacaactttcactatcttaacatataattctctagtttaaagtgaaagtaatttatttgtttataacatcatattttgtaaccatatatctttgtaggctccatgatagccaagaggaggttcagaggcttagagaaaagggtaattgtaattttgtcctaaaattatacttcccagagattaagaggtttactttagattcacagtttatattttgttccacatgctctttgcagagataaaaggagcaatgtcatgcccacagctacagtagcaaagtccaagtacaacccaagttagtctggaaaaagtacaagacaatttctatcttattaggtggttcttggcataacattgagcaatgtcaaatgctctagctgtcataagagagtgtatagttttagaaaacattatgacattatgtcttagttataatcttagctcaccttctattttattgtgtctaaattagacatattattatctagaagaaaaggatctaggagtgcaaatttgatgtttatgatcattggtcaagcacatggctaaaatagagcacatgttgacgtggaaggctaacttatttgcttgttatttatgtgcatgtttccctacgatatgtcaccgaagacacatgcatcttacttgtggatagggtttgaattttcttgaacaacatctcataagcttgttccatcttgaatatagttcaattatcaaaaaatatttgtttttttaaaaaaatctcgctcagtattttccacggcaatatcttttttccctaaatatactccttgttctcccacctagttccttacaagctagcactagacaatgcatgcaatgcaagttgcaacatattcccttcgttctaaaatagaccaacttctagtgtttgaattttgtcgcaaaataaaccaaggcctatcttcttatctaccatcgatccataaattgagatattttatttcttcaataccccttacccaccctacaaccaatacaactttcttattataggaattttatagtcattgagaaaataccttaaggtacctaaattttacactaaaattttttggtaccttgagatacttagtacctagaggtaccaaatttttacattataaaatatggtacctctaggtactttataaaggatggtaaaattacccttcttattaatcaaggatattttggtcttttatctctcctttaatttttcttgatgcttagggtttgggttttattggggcgcaattcattacaatttaatactacgtccatcccaaaatgtacgatgttggttagttcatttttaactaatcaatatcatagggagtaatataatacttatattttgaattctaatgttcttttcttctatgaagttgaagttagcgtatacaaaatgggaaaaccattagtgtatgttaaattaagttttaattactaaagactggaagaataattttatttgatattttaaagcaacttatataaagaaaggcttttaaaaaagtactgtttgtagttggaaaaacgtgctaacgaaaatcgaggtaaaatctacatcttaatatgaaaacaatgggccttaaaatgattcataatagcaagtttagtaaaaggctataaaccaattgtaaactcatgtgaaggtgagagaactagaaaaaaaaagaatgttggctctcattcgaaagctaactcttcacatactgcgaaataaatatgctaaatgtataggtgagagaaaaagagaggagaagaaaattagagacaactttataactaatctattatatacgtcagttttatatgggtttatagctgatagctggtttctacttttaacttgctctaagattttcaccaagatagcacccaaccgagcgattcaggtgaccgagccgaggccgcctcaatctccgggcccatcagctgcaccacgtcaccggcccatacctcactatacatgggctccctgccgtgctccggcccaacaaaaagatggcgttaatccatctggacctctcgccgccatcaccaccctgcctggcgagagtcccgtgcacgcgccttctttaccattacgggaagaaggcaaggacaacggttggggaggatgataaggaggaagaagagaggtgtatagaggtagatgtgctaatacatggggcccgcatgattcccacgctatctcagtcgtcacatcagtcaacaccaagagcaatactgccttgagagtccaaagttgggacccaatacgacccggtttcacaaagattaggaatacgctgtatctgatattccagtccagagacgatttcgaaaatcgaggacaagacgagggaccccaagtgaactttttcctatacacacggtactagtaacccaacctagagattcaggcctggtcaatctccaggcccatcatcagcttcgccacgccaccggcccatacctcgccgggacatgggctccccgccgtggtccggcccaacaaaaaataaaagatggcgtgaatccatccggacctctcggcgcgggcacccccaccaccactccgccattcccggacgcctccccacctcacgctcctcctccttctaataaccccagcgatgggtgggagccgagcccttcccctctcctccctcctcgccgccgccaccaaatcccccctcctccaccaccgccccctcccgctccgcctcgccgcctccatgtcgtcgtcgtccccttccccctctcccgctgctccggcctccgcctccgccatcgacttcctcacgctctgctaccgcctcaaggtgacgccgacgccgacgcgcgcgacctctgctctgtatgcttcctctgtttgtgccgccatggggattggcccgtgacgccgttggtgtgtgcagacgacgaaaagggccgggtgggtgaggcgcggggtgcaggggccggagtccgtcgccgaccacatgtaccggatgggcgtcatggcgctcgtcgccgccgacctgcccagcggcgtgaaccgcgacaggtcaagcgtggggattccatttccttcttggctcctagcgtcattcatgtcttggtagcgagtttcattgttttttttgcaggtgtgtcaagatggcgatcgtgcacgacatagccgaaggtatccaacattttcgtttgcttgaattggatctgtacggtgattgtgttggacatgtgcatgccgtgggtgggttgtgttgaagcgggggatttgatttggtggagtaggatgttgtagcattcaagtgcttataattgtcagaattgttataatgtgcgtgttttatatgttacacaaatttggtaaagtgatgatgcgttgcttgcataattagatggtaatcaaagtttatgcaaaatgctatagatttggtgtaaacttttcctagttacatttgtaatgggccatgacttatcccttacaaactttcttgtagctgcatgcacattttccatgttataagcagtttgaatgaaagtacttgcatttattttctttattcttgcaacttttgataatgattggctgtgatgcgaagatgctgggttgtttgtctcacttaaaaccttttttccctgttctccagctattgttggtgatatcaccccttcagatggcgtgccgaaggaagaaaagagccgcagagagcaagaagcattggaccatatgtgcagtttgctcggtggtggtccgagaggtaattatcctacatgcaaaagcaacatattaacattctttgccatgggagttaaatctgcttcgatcctgtcaaaataatatttgtttatcttttactaccatatactccctccgtcccaaaatataataacttttagacctcagaatttgtcccaaaatgtaacaacttacccaccaacattctcttcccaaccaatcacaaccctccaccattcacttttcccacctacctccggctccactactcatccaatcacaacccttcaccatccacttctacctactttcttaataaccgtattcaactctaaaacttcttatattatgggatggagagagtatttatttaaagtaactgtgatgctagcgtaaattgctgaaaacttcctggtgaccgtaaacaatattcttagcatgccagcaagatgatccaactgttcaacttaatgccttattccccactatgcttgaaagtccaacgagaagacctgagagaacaattacgatattgtttagatgctaaaaatattggttccagctgaaatccattgttagccttgaattaatactcatcatccttctagtgatgttcccttgacaaccagatcatatcatcaaggaattacttattgctgacatcaggaaaatagttcaggacctagagatcccctaaacaggttgtgttctcacactttggaacataacgtaaaagtcctttaggaagcactttgaaacaaaaaaaaagactaccatttggagaaattgttcttcttgcaggaagcaagatagataaaatactgttgtgtaaaggacagactgaagaatatacaaacagtgttgttctttgtcctacaatatttgatatacagtaaacatatgcctattctctgtgtcattttattcagctgaagaaatccgtgaactttggatggaatatgagcagaatgccactttggaagcaaaggttgtgaaagattttgacaaggtacagttttttttgtccagctatgtaattatttatcttgctacccacaacgattggaggggattgaggtgtggaattaatcccttcctcaacatgattaaccgaacaacgattggaggggattgaggtgtggaattaatcccttcctcaacatgattaaccgaacaagtcctaagtgttagagattttgtctaataagtaattagtatggatgtgggagtttgtaccctgtccctaacgtgcccccacgggggtcgccaacccctgtataagtgtatatcagtatatcaatgctcctgcacttgcactatcaactgctagtctaatgaggcatgatgtctgcactcatcatttagaagataagaagttatgtaaggaaataaaaatactggcatgattggcatcatttgttccaggctattagatgtcagaagtgccatagttaaaaagtattgttaacattaggtgagcactatagacaattgagtaaccctcaagagacttgagatttggatcactgttttccttaacttataattagttgtttttcttctttctattcaggttgagatgattcttcaagcattggagtatgaaaagggtaagctcttattttgctagtttaatattttgatgtatccagaatcatccttttcctttttgaattagctatgaactatacagatatacatttgtcaattattcttgtcgatatgcaaggatcaaggaaagttagatcaaatgtggaatatcttttgcattattgtttcacaaagcactgacaaactctaaatagtgtacaaattgataggcactcagaacatcttgactatattaatggagtttacagtatcagtaatgcttatgtatctgaaattttgcagagcaagggctggacctagaagagtttttccagtcaacagcaggtaagatattcttgggatttccctccatcaaattatgttctgttgtttgcatgagcattcggtatactcaattgaaatctgcgcaatggccttaactgttcaatacatcacaacatgcttgcaccagagtggttattgttgacataagttttgttttctcatgaatttctatattcttctgggggtttttttctccttgcacttgttcttaattttccaacatatctttatagcaaccatttgactaatgacctaacatttattttggttaattgctttgcagggaaatttcagacagacgttggaaaagcatgggcagcagaggtagcatcaagaagaaagtgaaattaaccaatcacatgacatttgacaggccccctttggtgtttcttttccaaagataacctcaaggtttctgttaaacttcacccttaaagactttgttagctctgggccatttggacccgatgcttagagcttgagaattgagatcagctggtttcagaggctagttgtttttttttgcttaagctgggttcttgtagctcacctgcctgcctccgggatgctgattcactaggaaagccttattggccgtcctcgttgttgtgatgtaaaatcaactaattcagtttttatgccaatcgagtttcctcgtctcaattgttgctatttgaatcgttgttttagataaggacgaactgtggtcgctaactaaatatatccccttatactgttaaacctttcattagccagcatacttttgtcatgtcaattcatgtttttgtcttaggctctgtttggaagtgattttggtagtggtaactttcttatttttcattagcacgcttttcaaactgctaaataatgtattccctatgaaagtttctaccgtatgtatttcccattttacacgtcgctaatatatcaagcctaactgagccagtctctctctccaattatttcggtagtatgcactaagacaagcgcatcgatgaagattgggaccaaataagctggaaatgatttcatctcttttctctatatcaacatatggaaataatttcgccagatttcaagatatatatagccatgtcgtttttttgttgaaatccatagccgtttcatttttgttggcagtagaaaaaatggcataaatttcatcttgtaaagtggggagaaaacgaaactgatggtaccgtacgtacattaacaattgaacctatttttatgaatagattggcctacgtatgtttttctttaatcttatatagggtgtgttttagttcggggaaaagaaaatatttgggtgtcacatcggatgtttgaccggatattagaaggggtttttggacatgaatgaaaaaaactaatttcataattcgcttggaaaccgtgagacgaatttattaagcctaattattttgttattagcaaatgtgggttactgtaacatttatggctaatcatgaactaattatgctcaaaagattcgtctcgcgatttttcatataaactgtataattagtttttttatctatatttaatgtttcatgcatacatatgtccaaagattcgatgtgatctttttgggtaaatttttttaggaactaaacaaaaccatactctatctatcccaactataaaaaatctagggtcggatggaacatttctcatagtacgagaaaatgtctcatctggttctatattttaataatgtggaatggagggagtatgtttttctttaaatctcctcgtgtatcaccctactaattaatgcaaaattaattctgcaatgtctaatcatgatagtcacagtcatacaaagatggatttggatcgacctgttggggtttaatttatcggcataatagtgattcttacggttacgccaccacctcattcgatttatttcattctagagatgtcggtattaccctaattaactcattctcgatcaaagtagtaatagtaagatgttagttaggatcgacctaattaattaacccacacattaattaattacttcatttgaggcttgaaccaaaatcatccaactttaattgaccaactagcaatttttaacaattttatatgagcatgtgtatgggtaaagcatactattattcactctaataaataatgtcatgtcagctctaatactccaaaagagtgggtcgtaatctgtaatgtgacacgtttgatagtgttggccaaaagctataacgaataaagtacagtgtcccctcactgcagtcgctgttgacaattgtatttcgtgtctttgtttgtagaattgataattcaaagctaagaaaaatatctgcttttgtgcatctaatttgatttagacatggggaagcatgtgatttgatggtgctcgacttcaaccagcggggtttaaattttggtgtccacgaatattaagcacgtacaagtgagttttcagcaggattttaataatatcagggaaatgtcattggttagtttatcccataataagtacttctaggatagattccactcctaagtcctaaattagctcagctagttaggtttcctgtggtggaaccaacctacccacattcaagttctaaatttgttcttgtggccacattttcaagtcctaaatttgatagggtgctcgtatttactgctaattagtctttcaatggtagacagagtattcgtcaacagtgagccgtccgtggtaacttcattaatctcaagatgtacctgacaagtcttatagagatgctcatagagataggagttgcgtgcgtatgttcataaggataagtgtgtgcgtgctgtgagcgtctacctttgtattgtgtttctaaaaaaagtttccacttgattaaacccaccatatacagattatcatatgattatcatattgtgtgagatctgaactcctttagcatctcttgctagttggcaagagacaaacatcttacaaatgtatcatcttcctctatatatatatataggggaaggaaaaaaagacaataaaaaatggctgccagttgtctagctagcttgtacgggtatgcatggccacgagcaacggtgcaaacggtagctgcagtagtacacacagcatacggagtaggtgacaattactccctccagttttttttaaatgaagttggctagttcaaatttatactagccaacgtcatataagccttccagcgaaattaattagctgcagctagctacaagccgatcggagtagttgcgacaaaatggccaccagcgatgatatggctgcagctcatcatctccggcgccacctcccgtggaggcatgtcaacggtggtggcggcggtcggtctcttaaggaagcccttgcacaaccccgtccagaatcgacggtctggctcactggcctctaccgtccgccgcgcctcctcgcctatgccactctgcaaccaagaaaatcaaattaatataaagagaaggaaatatctatagtatatatggtactccatccatttcatattataggccggttcactttgatgccattttcaaccttaccaaattttggtaaagttacaaaaaaaagtggctacatttagtttgctaccaaattttgctaattacataagaaatcctgccaaaattttggcaagctaccattttggcaatgccaaaatttggtaaggtttttttttggcatcaaagtgaacagtccctataagtcgtttaacattttcctttatcaagcatctttaagtttatttttggtgaaacacaatacaacacatacgctcacccctcctataaacatacacacttcccctatgagcactcttttaagtttgatcaagtttatagctaaatataataatatttttttcattacaaaacaaaacattatatcaaaatatactcaatgttaaatttaattaaactagtctggtgtcgtagacattactattttttctataaagttggtcaaacttaaagaactttgattaagaaaaaaattaaatgacttataatataaaaagagagggagtacaatgttatgtcaagtaagattctatatatatccctatagggatttggtacatgagttgtacgtgtcggtccaaaagctatatgctcgttaggtgtaatgtatgtgttgttatatgttgcacaccagtgctctataaagaggccttaattaaaagtacgttttggttatatgattcttttttggtttagagcctcatttaatttcgcatatatttttttcatatcaaggtctcaaatgtttagagatggtgattaattttgcactgatgctgcttaccgtgatggtgttgttattgacaagacggtcgatgaggttgaggaggatgtcactggtgtactccgggtggccctggatgcccaacacattgtcgccgacggcgaacatctccaccggcgtcttgtcggagtaggccaacaccctgcccattggaggcacctccaaaacctaattcaattaagtaattaagcacacatcaacttacattttcaggtcaatcgattgattaattatatattaaggtacaaacatatcttttgttaggtattgcatatctaaatatttcttttgaaaatactagacacttgttttgttacttggccaggaagagaaagtgatcacagggagaaataataatagtacgcatatgattagtatgcagtgctatgccatgcattaacccagaagtacacattttcagtgtcaaggttttttttttttgagaatattttcagtgtcaagttgagaggtaggagtggtgctcaaatcagcactccaaaaattaagtcaaacaccgcccaatctagccaagtgtccgcaattaaggttttaaaacatgtgcaaatggctatagaataatgcaaacacgaaatatacgatatgatattatcaaactgtgtaataattattatattattaaaatatagcgtaaaagggccatcacagtcgctcttactggttacaagaattatcatattataatatgggaagaaagtggagattgtctagactacaacaattaatgtagttgatctaaatcaatgtagatgatgagaagtagaattttgtttttatataataaatatctaacagccatgtaggagaaaaaaaactattactttcatatcatttcaagatttattccaatattcgttctatggaaacttttaaaaaatatgataagtgtgctctcacctcatcttggtgaacctcgatgatggaggcactttggggaatttccttgagatccccaaataacttggacccctcaaaatcacgcacaaaggtcatcttcttcaccccaatgttccatccacttcgtgccttgccaattctaccacccaatgctcgacacaatacctaattaaccacacacaagaaaaaaaacttaattctcaatatttattaatattttcatgaagattaaccttcaaatgcccagttcattccaaaatattagcatttctacatctgcataagttgtttgtttgcgctgtctttcatatattctccaagaatatgaaaattggaataattataacacactaatttgtgtacaatttattgatatatatgaaaatgataactacctccgtctcaaaaagttttagagttgaacacgggtattaaaacagctggtgaaatttggttgggaagagaaggcgaatataaattttgaatggtggaaagtttcgattggttaaagaaaacaaatgtaggcggataagttattatattttaaaacaaattttaaaggctaaaagttgtttttttttattttgaatgtgaggagtatatgttggtagattaacctggtggccgaagcagatgccgaggatgcgcttgcccatggcgtggagcgcccggaggagggagcagaggcggaggatccaccgctcgtcgccgtacgcgtcgtgcgggctgccgctcaccacgaacccctcgtaccgccccacctcctccgccgccgggaactcgccgtcgatcacccggaagcagtcccacctctcctcctcccctccgccgccgccgccgccgagcgccgagacgaagacgttgccgtacccgccgtacaccttcctcgcgtactccgagtcgttcagcgccagcagcagcgcgtacctcctcccccctacgccgccgctcgccgccgccgccgccaccgtcatcgcgaggagatcgagtgcgtttgcgccggcgaggtagcaggactaagctgtgtgtagtacgttgccggcggcgagctctagctagctgtagtgtgaaattgccggcgagaatgcatggtgtataaggagctcggcggcgacgcgtcgcggtcgggtgtgtggaacacgtgatggggttgccgcgcattattaaactccgccgaaatggggatccatccgtgttacactgttctgcagcatgcgcgtgataaagttttagttagcagaacaagcgtgtatatatagacgcgtgcatgtatgtgtggaattaactgtggattcggcttatataatttgttattcgttgttgagctggctggcatttcgattgaactgggtcttagttttttttatttatgttgttttctttacggatgactggacatgttataggcaattgctaatgctgatggattgaatattgtaacactaattgtttgtataagaaagtcttttttttccgagaaattgtagtaataataatccataagctcatataggctgaaagaatacaacgttagggttcaaagtctagcacacctgaaggcttaaattgaattgagatttcaagctttgtaaacataggttgacgagaatagcaggagtcagtgattattatatacacagtatatgaagagtacgtacgtcttgggagaggtgtccatatataggatagaaggcaacatgataatgacatatatgtgaataacaatttttgaggagatcatgtgaaatatgagataatacggttgtaggtgttgcacggatgttaaatatgaaaaagaagacacatactcttagtttttgagatatatgatttatatagcttttaaaatgatcttaccctttttcatagcttttggaatatacatactgatctttgctagaaaataagttcatgagttgaaaataatgcatccttagtgtttaatttaagtcagacacacccagaggcttaagttgaattgagatttgaagttttgtagtgagtggtttttcttgaaataggttgatgagaacaacaggagtcgagtaattactatactatggtacatggttaatttaaagtgataggaggttaagggactattatagatctatatgcatacagtacagtgtatgaagaggtccggcatgggatatgcccactggatggaaggcaatatgataatgacatatatatgcagatgataatttaaggagatcaggtgaaatatgagatggatgtacggttgtagttgttgcacgaatgttaaatatgaaaaagaagtcatactcttagtctttggagagatgtgagttatagcttttaaaacgaacttggaatagacgtactgatcttcgctagaaaataagaacatatataagctgaaaaaaacattcttattttgtgttatttctcatgagttcccaattcccgcgcgcgcacgcttttcaaactgctaaacggtacgttaatgtttacgtaggaaagttgctttaaaaaaatcatattaatctatttttaaaatttttatagctaatacataattaatcatacgttaatttatcgctccgttttgtgtgcggagaggagggattaccacaacccagttggtggtgtctttacacataggttggtgataatatcatgagtcaaataaatgatgattagatgtctagtcacatgttttatgccataagaggttaaggaactgctccatccgtccaaaaaaaaagccaacctagaaagggatgtgacccctactagtataacgaatctggataaaaggctgtccagattcattatactaggaggtgttatgttttgaatagcacgctcagtacattaagaggattggtatcggaggtaaatataggacggaatacaacatgataatgacatactccctccgtccaaaaaaaaccaacctagtactggatgtgatatatgttagtactacgaatctagacatatctctgtccagattcattatactagaatatgtcacatccagttctagattcgtttttttcagaactgagagagtatgcgaatgacaattgagactaccaggtgaaatatggtatagatgtacgaatgtagctgttgcacgaatgttaaattactagttgctccgtttcatattataagactttctagcattgcccgcattcatatagatgttaatgaatctagacatatatatgaatctagacacatatatatgtctagattcattaacacctatataaatgtgggcaatattagaaagttttataatataaaacggaggaagtacatagttttgacggctgcattatatgtttactatatatatatgcttggtagaggggctataattttataatgaaaaagcaatgttgtgcccagatcaaaagtaactaaagaagatacatttagaaaaaaaaacacaaaggtaaacacgtttgctttgcttgcttgccttcttatttaatcattgtggctcgattaggaccttgctgagatccataacagtggtgtgtaacagtctacctgttgatggacgtgtccatgcattatcgggtctcaatcgcctgctgaatcacatgacattgtctgaataataaacaattaaacaaataatgagataatcagtaactaatttgaacatagacaatgtcgatcttttcgtttttttttcttttgaaacaacccgtataaaatagtgagatgtttttattgataaagcaataataaaatataagtctatagtcctataagtgtaaaactatagtcaggagaaaagaaaatacaactatgccacgtgtctacatttgattctaatgatagaaacataacatgtattctaaacaacgcctccaagaaaaaaaaaaagacgctaagagggtcgtcgtcgcctgttctatagagccagattagatatgctggagttaattttgagcacgagataaacgggtgccacgtttctctacctaaccggaattaacaatacggttttaccatttggaccgagcctttttttagtactccctccatcccaaaaaaagtcaaattctagagatgaatctagacacatatgtgtacacactggtggagaaaccctttgtagtcccggtttgtaacccctttagtcctggtttccaaaccgggagtaccaatccgggactaaagataggatctttagtcccgggtgaaataaccgggactaaagatcgatctttagtcccggttggtgttaccaaccggaactaaagatcgagctgaccttttttttttgcatggccctgttgctgcatatataaaccatgcatatatatgcatatatatatatatatatgaccaaaatatatttacattatagaaaatgtgtacacatgcatatagaaacatatgtagtcatgtattaattacaatccattatatgtcctagctagctacgatttcgacgtagtagtagtactcgctgctagctcagaagctaaggatcggtgaattgtgtttccgtcgtagtagaattcacccttgggatcaaggatttcttcgttgatgaatcccatgagttggtcttgaaccgccgcgataaattccttgtgtgtggtcaggttatccctcatgcgaataaactatatgaatgtatgaaattgattagtaattaaacaagaaatcgttacgtaatgaaattttgaatttatttgtacgtacatcgagctctcttgtggtgatgatttggtctgcaaggcagtggcaatactcacacacgtaatagccgcacaagttagttccctgcttttgctttgcgcactacaaataaatgacaaacaacgagagatataattaatatacacttgtatgtatttgaatcggagaaatataaatgtagagcatgtgtactcacaggaaatttgaatttccgcctaagtctttctctccatttgccgcggatcaaatgacggaaccgataccaagccctacatggagtttaaagctatgattcgtagtagcaattaacataacaagattttcttaattaatagaggaacttatgacggtacctgtctataagttcgaaaaccttatcaaacgtagactcttttttatccattgagtcatatacgttgacggtgcaggccgacaggtcgaagagtaaaagcacccagtggaatctgcaatgtgcgtgggatgcattacatatgaaacactaagcaagttcgtacgggaatgaaatttggtatgtagaaagacagtaaaattaaactaactctgtgttgtacggcaacagtatgaacgtcttgtaatgctgcgccttcaggagatggacgagattgtcctctgtttcttgtggatattggtcgagcattgcgacgtttactctccgagggtcgatgaatccagtatcgaaaaccctccgccgtcgggccctttgaatctccattctacaatgataaaagggagtatattattttctatagtctacttatatacaaggacctaattaattaaaggagacgtatagtaagaaatctaactgaacgatatacttacaaaatccagcaactcataatagagacgtcgagggcgtccagctggtatagttcgtagattcccttgaaattgatccaaagaatgtcatctccttgcaagaagtccgtgtccctgatcctcgctccgatcatctctctaccggtggcgctcatctccatgtacagctgatggaacttgtacatttgtgtgggtagggactgcagcagctcaggcttgacaagcggtttaccgagttcgtacatgtatttcacttccgccttttcgattggtgcgactcctagcaattgatccgtagttagaccggtatcaataataaattgttctatcgtcatttctttaccggtcaccaacggctctatctcctggtttggttgctctccaagctgagggactggtttggactttctagaagatgctttcttcagcgttcgctcatagtccgatagcttgatggcctccttgacagatgcagacatacccctgaagaagttcctaacactggggtctataggaatcttcttttctggacttcgaggcttgaattgtctcttgacttctgatgcaacgtaagtgtcaagctcctcttgcgtgcaatcgtacgccgggtccttgttcttggcggcgtcaactttcgccttcttcgttgcccttgtgtgggcaggcggtggagctggggggcccttgactttgaaggtgctggaagaggagcttgcggaggagtaggtgtaggagcccgaggaggagtcggtgcaggatcctgaggaggagtcggtgctggagcctgaggtggagatggtgctggcggagcatgaggaggagacggtgcaggatcctgaggaggagatggcggagccggaggatatggtacacgagacgccgcttgtcgcccagggaggatgatgtaccgcctgcgccatagaataatggcatggcttgtgtctcgtagatgcgtctcaccgtctcctccagggtaatccagctcgaggtcctcgtacgcgccttcgaccaactcaacttcgaccttcgagtatcctgctggaatcggcctgcagtggtaagtacctgaagggtccgttgggatggccatgcccgacgccaccttcatgttatgagagattatttattagtaatcaacatatataagcagcaactagcggaatggctaaatctaaaatatataaactacgagtttacctttattgataagttcttgtaaggaatatgcagctcacatggtgtccgctgagtgatgtcatcaacaggacaggtcgattcgtcctgtgtttgcatggcgtccatgctctgtgatcctacttgccccgttgaggcgcagctgctacagtttcctgacgggctcaccattgcaggaggaatggtcggctggggatcatgggaccgatgtgcggccatgcgttcatcaaccttccttgccacctcctcttgcatgctgagttcgtagctcaatacccggaactctagatctgcaatcttcgcctcggtatctctcttactcctcatccgactcctgtacgtgtggatgtcctccttgaaaccaatcttccaaggaatcacccatttccctcgtgttcgtcctggatgctctggagtctacagggcgagtgtcagctcgtccctatctctgtccggtcagaacgtgccctgagatgaggcttccactgcatctgttagtcgtcgcgcagcctctcgtatctgatcgccgaagaccagtgagccatcagctgggttgagcgttccaccgtgagcataataccagaacttcgatcgttccgaccaattggcggttgccggttcgaaacccctctcaatcaagctagcctccatctcctcccacttcggcttcgcgacgctatagcctcctgaccccaagtggtgatggtacttcttcttggcggcattttctttgtttctttccatcatcgcctgcccttgttcacctgtcttatatgcaatgaactcgtcccagtgatcccttagctttgggaatgtgtcgaagttcggtgtctgccccttcaggatatatttcttgtacaactctcccttgaagctctgaaactgttctgccattttcttcagagtccaccttttcactttgtcctctgtacctgcgggaagggtgaatgtctcgagcattgtggtccacagcatctctttctccgaatctgggacagagctctcatgatctccgcgtgcccttgttcttcgccagtacaccgtactaacaggcacgttatcccgcacaacccaaccgctgtgacgtacatagttcttggcggcttcggccggggcactaggacgtccatcttcttccacttccgttatgatgtgccgaccctcaagcttcttcgctgcacctcgttgcccgtgtgccctcttctgtccaacggagggttgactaccactagcctcctcctcctggttcccctccacatcactttccacgtgcccctgctggttcccctccgcatccctctccacgttcccttcctcgttcaagtactggtttggatccccattcccctcttctttattccagtactggctgcttccctccgcgattgtatcatacaatatctgttcctcatcgtggtcagccatctgttgatacaagaaacatctgctaagtcacgagacatttatgttttaacaatctaagtcatgtatgctaagtgtaaatgtcgtacattagaaccctacacaaccttacgtgctaagtctaattacaaatcatgacataagctaagtctaggtgacgtatattatacaaccctagctagtaaataattatatactaagtctaattacaaataaaataatcttatattaaagctcaaataatattacatgctaagactaaaatagtcatgtatatgctaagtgtttcgtgcgtatatgctaagtctaattaagactacaatagtcaattgctaggagtcgcaccaattccgtagtcaataattgcatactaattctaattacaaataaagtaatcttatattaaaactcaaataatattacatgctaagactgaaagagtcatgtatgctaagtgtaactgtcgtatatgctaagtctaattaagactaaaattgtcaattgctaggagtcgcaccaattccgtagtaaataattatatactaagtctaattacaaataaaataatcttatattaaaactcaaataatattacatgctaagactaaaatagtcatgtatatgctaagtgtttcgtgcgtatatgctaagtctaattaagactacaatagtcaattgctaggagttgcaccaattccgtagtcaataattacatactaattctaattacaaataaagtaatcttatattaaaactcaaataatattacatgctaagactaaaatagtcatgtatgctaagtgtttcgtgcatatatgctaagtctaattaagactataatagtcaattgctaggagtcgcaccaattccgtagtcaataattacatactaagtctaatttgcaataaaataatcttatattaaaactcaaataatattagaacactacacattcttatatgctaagtctaattacaagtctaatattcttaattgcattacaaatataacaatcatttatattattacgtcatttgcctgcacgaattccttctagggctagctcttccactccggcttgaggaacgactccgacaacacgtcttttctgcaagatacaaaaaaatatgtattaggataaatgcgaagtaacatatatatatattgcatttcacgttcacgttcgttcgctcgttctcattcacattcgttctcgttcacgttcgttgtcgttctcgttcacgttaattcgttcgatcgttctcgttctcgctctcgttcgttcgatcgttctcgttctcgttcacgttctcgcgccaacgtacgttgacgtgttcgttcttgttcacgtgttcgttaacggcggtgtggcggcatcgggccgacgcttggcacagcggcgtggcggtgacgtcgttgcgcggcggcgaaggcggcggcgtggcgtgccggcggcggcgtggcgcggcgtcgtcgtggcgcggcgtcgtcgtggcgcggcgtctcgtggcgagcggcgtgacggagagagagatcgagatcggagatcgatgaaggagaggcggcagcggctctcaccccagagatgcggcggcggcggaggaggcggaggcggcggcgaggacgacgagctcgagacgacggcgagatacgtcggcgtcggcgcggggatttaccctaggcagtggcggcgaaggagagagtccgagagagatcgatcggccaaaaacattaagtgttggtggagaaaacgagggcgcgcatcggggaacaaccgggactaaagaaaagatctttactcccggttgttctcaacaaccgggactaaagatatctttagtcctggttgttctcatcaaccgggagtaaagatcttttcccgctatttccaaattctttttaaacccggttagggttaagaaccgggactaaagattatagcactgcatattattttcgcttacatatgtgtttctaaaatagaagttaatgcattaacattatttaaagtacaaagattaatgacaattacttcgaaaaattatttttgtctgtaataaattaagtggataaatcttaataagaaaatatatggcttaaaattaataaaaattccaataatcatatatacttagcatctgaatgatattattaaattggtaaaaactctaattaagatatgtatgtacatactgcatgatttaaaatgaataaaaattgtaatcatcatatatacttagtgtaggaattatattaaattaaatgttaaaaactctaattaacatatgtaaatgccacatgcatgatttaaaccttttaaaaattcgaatagtcatatataagtagcatatgaaagatagtaaattaaattgtgaaaaactctaattaacatctgtaaatgccacatgaatgatttaatacttttaaaaattctctagtcaattataattagcatatgaatgatagtcaattaaatgtagcatatgaatgatagtaaattttgccatacatcaattgatttatatggataatcaatacatccaaaatagtttacatcgtgtacacaataattacggcattacatcgccggtgacggttgaccgcacgtactttctcctcactattgttccctccttgtgatcgctgcgtgagtaaggtgtgtcttcatttgataggaggatgctagggtcaatcgtcaccgtgaaaaggggttgcccatccaactgatcataatcctcgtcagtcttgtcctcaactccgacgatttttcttttgcctgggagaaccacttgacgcttaggctcgtcaggccctctgcccttctttcctttgctagacatgtccttcacgaaaaggacttgcgttacatcattggcaaggacaaaaggttcgtccgagtatccaaccttgttaaggtcaacaattgtcataccactgtcatcaatcattacgcctccaccagtcaacctaacccattggcaccggaacagaggaaccttgagaggaccatagtcaagttcccatatatcctcgatggcaccgtaatacgtggcagttgttccatcgtgtcccatggcatcgacacgaacaacgctgttttggttcgtgctcttcatgtcttgggctctcgtgtagaatgtgtacccattgatctcatatccctggaatgtcgcgatcgacccagacggtcccctcgccaggaagacaagttgttggttgatcgactcgttacccatgagatgttgtcgtagccacgtggggaaagtatcaatgtgatgctgtgtaatccatgcatcggacttaccgatgttcctggcgcgaactagagccaagtgctcctcgatgtaaggagctaccaatgaagagtgttgcagaacaatgaaatgggctttacggaataaattgttgtctaccgtcattattgctttccttccgagagttccctttccccgtagtctcccttcatggcgtgattcaggtaccccgattgggcgaaggtcttcgataaattctacgcaaaattcgatgaccttctctgttccataacccttggcgatgcttgcctctggacgagcacggttacgaacatacttcttcagaacgcccatgtacctctcgaaaggaaacatgttgtgtaggtacacaggcctgagaatacggatctctttcacaaggtgacaaagcagatgcgtcattatattgaaaaatgaaggtggaaatatcaactcaaaactgacgagacattgcaccacttcattctgaagggcttctaatctatccggatcgatgaccttctgcgaaattgcgttcatgaatgcacatagctttgttattgttgcccggacattgtctggaaggataccccttattacaactggtagcagttgtgtcatcaacacgtgacagtcatgagactttaggtttgtgaacttcttctccttcgtgcttattattcgcttgatattcgtggagtatccagacggtacctttatgctctccaagcattcaaacatactttccttctctgccttgctaagagtgtagctggctggactcaagtaatggcttcctttctcctttggttccgggtgaaggtcgccgcgttgttccatatgcttcagatcattacgtgcttccagtgtatctttcg

SEQ ID NO: 25662 - DNA, 590 bp, Oryza sativa
  unsure (1)..(590): unsure at all n locations
cattcttttaaatatgaatattgttcgaatcatcaaaacgcaatgagcaaaacgcctaggagaggagagtcgcctactttgttgcgctgcacgcggcggccaccgtcttgcgccagttgagcagcacgtcgacggcgacgtaatgcgtgacggtcccgacaagcacgagcacgtggaagatctggtggctgtggccgacgacttttgagacacccggtcgccacttatacggcacgcgggtgacgtagaaccaagcgactgcggggtaagcgaggcccatggtcacctcaagctatagcgccaggtaagaggcggtgtggacccagatgagccacagagcgtgcagcgcccgtacgtacccgtggagacccatggggaggaacagcgcggtgcggagactccggaaccgttgacactagcagggtggagagagcatctcgccttctacgagcgcgctcagcgcctagatggcggagaggtatgccacgcgcgccggtcggtgtgacatgaaggcgtagtacaccggcgggactaacgaggcgacgatcatggcagagatgacacngtagtcgagctgtcagacaccacgc

SEQ ID NO: 25663 - DNA, 7263 bp, Oryza sativa
  unsure (1)..(7263): unsure at all n locations
aatatacatgttttgataattgcatgggatcagggaattacctatctgcttgtttgtgccatatttatttgatattcgtcctttgtcaactctgggtgataaatcgactagcttgtgttacttatgtgacctagctagaactatatgcttagccatgcttaattaccactagctcagttgatgggataattgcagtattagacctttctagtttcagaacgagctgcgtgctcgggacatccgaccatgtttcattggtcgtaattacccaactgaaatgcgacataatggtgggctgtgggtgcatggttttgctagtcgtgcccatggcaattaaggaccggttcacgggaaatcctagaagaacttatcatgcttaccacaagccagcgtgggcaacgactgggcttgtagtgtagctttcctctagccgacgtacccaggttagggtgggcgtgatggagttgggtcggccagggtgttcggttgatcggctttcggattcaccgtggcacgagagggtgaagcatctaggcctccggtgttaagtttgataattaatgacaagcgctaattgtggactaactgatgtctttgagctatatattttaagttaggtccacatcatgtgtgcgcatggatgactatcgatggattaaaattgatggcgcgaagcgaagaaaagaaaacggtaaaactagtgttttagttttaaaattgatcgaggtgaagggcgatcaaatttgctagtttacttgttagttttgccgtactatcaaggggggtaatgacctagtaaaaagatgattaaattgccacattaggtcattgcattttctcttgtgctcacatcttcacacacacacaatcacctttgttttcacttggttcggcctgactaggggcggtcagaccggccacacactggcggtctgaccggcgtgccctggccggtctgaccggtgccacaacggcggtctgaccggcgcataaggtcggtctgaccggcggcacatgcacggtcagaccggccccctggaggccaggatggtgctgctcagggtggccgatacagagccgacggagccgtagtcggttagaccgagccgatggtggtctgaccaagccgaggccggtctgaccgccctctcaacgtcggtctgaccggccaggccgatggggccctctgacagcacttcaacggctagttttctagccgttgcagagtagcacggtctgaccggccacatacctccggtcagaccggcagagcacaaagttgggggatttcgcccccaacggctagttttggtgggtgggagtataaatactcccccaccagcagcaaggggactcttttggcacccaattcaattgcatacaccccttgcacctctctcacacccacttgagctttgtgttcatccatctagtgtgttagaggtttgatctagccaagagtcaagtgcatttgcttccattgtagagctagtgtggcacttgattgatcatctccacaccgggtcattgcttgttactcttggaggttgccgcctactagacagcttgtggaggagttgcccggtgacctctctgagaagattgtggaggaggcatctggacgggtcaccacgtagttatcccaccccgcagaagcgggaccttgcaactggtgtgtagcaaaagcaactttctctttgtccgtgcattgcagtaggttcagcttcttctcaatagcacggagccagtcgttggcccccattgggttggtggtgcttgagaaagtgggtggctggatacgaagaaagtctaacagtttggacacgtgtgatggtggaggaccaaactgctggttctgttgcgcctgctgcaacatctgatggtaatgttgctgcatctgttgcatcatcattgtcatcatctgagtgactgttgggttctcgggcggcggagatgaactgctgccaggtgcaccactggtatgagcttcatctgtctgctcttcactgccactggcgtcgtttgagtcacggggatcattccttgtcttcaccatctggacgaggataggtagaaataagagaaaggaagaaaacagatggctcagaaactaatctctctgataaaattaagtgcaattatcttaatcttgattaaaacactaaaaaagaggcacgcaattcctaattaaggctgtcataccactcacacatgatatcgaccgccgactaacccacaagcaacaaacctaaacacaaaaactagcacgcaaacagactaagaagacgataaagctaagggcggcgactctgaggctcgagcggcgcttgcgatcgaagaacaggtctgacttctaaggtagacaagggatgggaatcaatgcatgctcaaatccaaatttagacaacgcaacaaatggcccaaacaactagccaagcatgatgatttttatgcatggaacatttttcatgaacccaaacaaaaaaacactaatgcaactgactaaacaatgacttaatgcatgaaataaatgcacgataataatgatgcgcataaagactgcatcccatcgaatctagacacaacttaatgcataccaccgaacaattcccgactgactgccaaataaattccaaataaagttttgctaaaaccctggactgtccctagtcaagagatccgattaaataggcgaccaagattttctcccaaaatcaaaagatcaaaccccaaagtttcccgaaacaaatccaagtgaaaaaggcatgtgcatatgaaaaggggtttagatggctcttaggttttccagttggcttgtcctacggtcaaggtcggctctgataccaacttgtcacgcccagaaattcacgaaccagaatttctaagctgaatgtgtattaaacccctgtccaggaccagccagggtacacaaatgacaattgttgacatacagatccacgtcttacaaaaatataaaagattacaaatgcagcgaaaaaaaaggtaaaagcgagctaagcctgaagacttgactcctgcagcgggcgattccattccacaggcaacccttaacggcagcgacgaaaccaacctcttcaagacatctccaactgagaagaacttcaactctggtgtgagggaaaagagcaagactaagtactacccactgtactcagcaagtcataccggaagaggaggtatgatgcaggatataaccaaaggaggctacggggttcatttgcataaagcaggcatttaaaaccagtagttgaaaacagtaaaaacagttgtagtaattaagcaatattaaccagtcactgtctaacgctacgccacgttgcaacaggcccaaccaaccacctgaactacaccagttcattaagcttaactaggggtgagactaatcacggtgaatctggtcgaccgcccataaccgcgggcacggctattcgaatagttttactctgatcagaggtgtacaactgtacccacaagacacagccccacgacacgttcccgtgcgccgacatgccaccacgacatactccggaaagaggccgtgacaggacccttcgcataaccctctctaaccgatcgcaccacaccttagggttcgcccccgtccccagcaggcaactggcagcccccctttcgtgccgcggtgaatccggaagccgatcaacaggacaccccggccgacccaactccatcacgcccaccctcgcctgggtacgtcggctagagaaaagctacactacaagcccagccgttgcccacgctggcttgtggtaagtacgataagttcttccagggcatcccgcgaaccggtccttaatcgccatgggcacgtctagcaaaaccatgcacccacagcccaccatgtagtgtattttaattaaccaacaccattgcggtggcactaatccaaagctattgccaataatcagtctatgccttaatgtgatccccttttgtgcactagttaaactaagcaaggctaagcatctcccaaaccaacatctagtcattttaatacccaagttatcaatggcgtaagggaaacaacatatagctgagtaataggacccatcccacataatattgtaaaacaatgcaatatttaatagaaatgcgggacatttgtaaattgggtacaatatgatcaattgcaatgtatgacttgccttgctctcgcactgatggaaccacagcaacgtcttcaagaaaccacgaatcgacgaaacgggcgaaatctacgcgacaaacaaagcacacaagcaaaacatgctataagactactgaaacaggaaacaaaaccatttttaatggattctatacatttttatgaatttactgagacttgaatgggcttaaacggagctcggatgaattagttatgaattttagaagattcactgtgtttattactatacaagaaaaaccttaaatcatttattgcgcaatatattccagggctgacgtcatcaaggcggggcgcggcgccggcaagcgggccccaccggttagcggctcgggagagggaggaaggggcgccggcaagcgggacccgcatggcagtgactcggggagggcggtccatggcggatcgggtccacggaccggggaggagcggcgcaccacgcggcggccacgcgacggtcgaaccgatggccccgatctacccaagggtagatcggacggcggcgggagctcgcggccggtgcgcgcgggcacggcgcaaaccggcccggcggccatggcgcgcgacggcgcggcgcgtatgcggcagcggcgcaaacgtccggccgccgccgaccgaccgcgatcggagatcgtcggcgtctcggcnaatcgacagctacgcggctaagcggcggcgcgacggctaaacggtgcggaagagagacagaaacagtaggagagtcctcaccgacaacgatcgacgacgccgagcgacggaggacgatggcgacggcgggacgagctctggaacctcctaacgaacaaaagnagaggggttatagggacaaaggagagtgcgaaagggcgagggccccggcaaaaggcgccggccatggcgtcactcaccggcgcacgacggggatggggctccggtggcgaacctcgacgcaggaggggtggacgaggtggacctcggccgcgtgaacccaacgccggcgacggcccggtgcggcggcgagtgtaccgccggctagagtcggccggagtagcgggagaggcgtcggcggatgggcgcacggcgcgggaccaatggagggcacgggagagagcggtggaaaaagaaaaaaaaggtggaggggagtgcgggcatgctttataggggctcgggagagacggacgtggccgaggcgagcccgatttcgccggcgacgtgggaggttggaggcgggggagagagagagagagcggcgggattcaaaatttgaatcccggccatctcggttgagggcgcggcgagagaaagagggggagtgggtgcgggaggcgcggcgcatgcacgggcgtggccgacgtggaccggagaaggcggggtgcggcggtttcgccggcggtgacaacgtgggcgtgcggccggaggttggggaagggcccgacaggtgggccccacctgtcggcgaccctggggagaggagggaggcggccggcctggctgggcctcggcctgcggccggcccagcagggaggagggggaggaaggagagaatgggccggcggcccattcgaaaaaaggaggaaaaagggaggaaaaagaaaaagaaaaaaggaaaaaggattttccctggaattaaaatattgcttgctcaattttaaatggttaaaattatttctagagctctgaaaattccactaaaaatcctgttaatgaatttcgacatgtagaactcaagaaaaattccacatgtcaaatccgattattatttgcattactttcttaaggattcatctctaggttaaattaaacaatttcttcggacgatttattttatgaatttagagcaagggaggggaacttcagggcgtgacgctgtgtcttgtgggtacagttgtagttgtatacctctgatcagagtaaaactattcgaatagccgtgcccgcccgttatgggcggtcgaccagattcaccgcgattagtctcacacttaataaatcgacccaatgcactgtagttcaggtgggatggttgggcctgttcaacgtggtgtagcattgttcagtggagatataatgttatcttaaccaactgtttcactgttttgctcaataaaatgttttacaactgcctttatgcaaatagccacaaacctccatttgtcttcccttgcacgtatgcatcattagggtggcttgttgagtacggtggttgtacttagccttgctattatttccccttttcagaagtgtagtgcttctgagctgaagacgaagttagaagaccaaggctcaaaccccagttgagttttgcctgtggagtggagctgaagccctgctatgatcgccttttccgctgctgtcgttctcattcggtgtgaggactaagtgccttttctgtaagtattttacgctttatttacgtttggaacttaatattacttgtcgttttgtataccttggctggtcctggacagagatttaatacacaaaatagtctgcaaatttaggctaaatttctgggcgtgacagcacatcgctggcaccgatggcggctaccggatctccctgccaccgacgtcaccgcccgccatcgacgcctcctatctcgcccccaccgacgcctcctctctcgccgcccgccaccgatgcctcctctcccgccctccaccgacgccttctctctcgtcgctcgccaccgacgcctcttctcccgcccaccaccaacgccatcctctgcactcccaggttgaagacgacaatgacgagctcgggcgcggtggcagcgatggagtctcggagcctctgagtggaagggcagagtcagtgatgctgcgtgggagggcagcggggccgtccccgtgtgccgtcgttcggcggccggcccccgccccttcgtgccaccgatgccttaccgtgcgcacctgtcgacctgcgtctgtgagagagagatttaggaagagggaaagacaaatggggggcaaaatgcaaaatatgttgccacgccagactgccacgtaagccagacaactcgctcagaggccctttagatctcaatgagtcacttaaacaagatggtggacctaagtgac

SEQ ID NO: 25664 - DNA, 27534 bp, Oryza sativa
ttactacaagcattccagcaaattgcacaaaccaagtctaccgaaataaaaagaagagaaaacagggaatgggggaaaaatccgtggatcttgtcgaccatcgttatccaccaccaccaccaccacgccgctcgctgccttcgtccccagccaccgccgctgcctccctctatccccacccgaactgctcactgcttccatccacgccccatagctccggaagggcgcaaggaagacagtgaggtagatgaggtcggcgacgctgctgtccgattcctcctgctttctcagatctagcggcgccgagctcggggacgcctgatccggcagcccgcccgctgtagccgctaaagaagaggtagaccaaatattgtttttcttttttcttttttttttgggaatttttggattggatttgtttccgtaagcttcggttcttgttgttcgtttggttggatttttttttatgttttgaattttttttcctttctccgattatgaggatgcaaagaacgcgatcggatttagggacgacgggtgcgatgggcgcaacggacgaaaacacggaacgaacgtgtactgactacggatggatgaagtaaaacgaactcttcaactacgcacgggacgcggacgaacgagaagttattaattttttaattagttgttattattattaagttattattataagatttagcatagcagcaacaacatcataaatcagttatacccgtaaagctacgatttttctcttttttttgaatttttttcggctcctcggagaggtttacacgtggttggtaactttgcaaaaatttatattactccggttgagttgttgtgtacctaacactgtgagtgagttggaagaaatttgcaatttaatttgggccgtaacgggatttgagatgaggaaagcccattagacccaaagtaccagcaccataaaaaccctagccgccctcctccccttcctcacagccgcctccactcctctcctcttctctcctagccctagccctagccctagggcgcgcgttcgctcaccgccgctgccgcctcggcaggtaagcattgatcgatcccctcgccgaccgtctctcttttcctctcttcttcttgaggcaggtttgccttgtatgttcatcgcgatcagtcatccacatgcaaagaacacctctctttttttcttttttgttaatttatcatccgatctagcaggatggaaatggttttcttcaaatcttttcagtactgagtgctctagttttgttgcgtctagcttcttgatttgccttctcatagatcggatgttccttttcagtattttgactgcacatgatttggttgtgaggatagcagtaaaaatgaattgatgtgttcttgataatagccataagtaatcatctttggtatcatcctaaactcgatttggttggtttggtatctgggttctgtgaattttccttgggcttattaacttctcctgacatagttgctggaagatttttggctaagattgcatgcgcttcagttttttttttgttggcttctaacgaggaggctcctttgctttttgtaaacaggaatttgcatccgtagcgtgatcttcaaaggctgccaagatggtgaagttcacggttgaagagctgcgcaggattatggacaagaagaataacattcgtaacatgtctgtcattgctcatgtcgaccatggtatgtgctacaagatttgatctattaagactaacgatgttttacagtagtacttcttagttctagcagttagtgttgtatttcgcttttcctattgtatcttgtttgcatttgtcctctaatgatgtatattttcatccgtgcatccataattccacctgttaccttctatatgtattgatttctgttaccttctatatgtatgactgatgcttacttttatatagtaccaattgtttacttgttcattttaacatgcctataattgtattagtcaattatttacttgttcatttgaacatgtgtaattgtattagatttgacatgaaatctcaaaatttacactgctttacttgtgtgcttgacatcgatgcctccatgcatgtcctattaatacaaatttgtttgaggttatctatgcttactaagccttaggattttttttggccaaatctctagtttctgtttttgtattgcaaatagtcaattatctttcaagttgtgatgctatttgtgtttttgttgtatataggctaatatgttcaatgctcatgctctaagcgtcattcatttcttatgctgagtatttgtttaattctaatgttttttgctttaatggcatgcctaatatgtgaaattttgttgattctaacaaggttttactgcttggtctgattcataattgtaacatgactatctttggactatttctaaatttctaaatattatgctgctgaagtgtgaattcatatgctatatactcctttaattggctatgcaagcatttcaactcttctgtaaatttgctgctgaccattccattttctgttagaaatacactatgctaatatgttatgtgttccttgcaggcaagtccacgcttacagattcccttgtggcagctgctgggattattgcccaggaagttgctggtgatgttcgcatgactgatacccgtgcagatgaagctgagcgtggtattacaatcaagtccactggcatctctcttttctacgagatgagtgatgaatcactcaagttatacaagggcgagagagacggaaatgagtacctgatcaaccttattgattcacctgggcacgttgatttttcttcggaggtcactgctgctcttcgtattactgatggtgctttggtggttgttgactgtattgagggtgtctgtgtgcaaactgaaactgtgctccgccaagctcttggtgagaggattaggcctgtccttactgtgaacaagatggacaggtgcttccttgagcttcaagtcgaaggtgaggaggcgtatcagaccttttcccgtgtcattgagaatgccaatgtcattatggcaacatatgaagacacgctccttggtgatgtccaagtttaccctgagaagggaactgttgctttctctgctggtttgcatggctgggctttcacactctcaagctttgctaagatgtatgcttccaagtttggagttgatgaatctaagatgatggagaggctttggggtgagaacttctttgacccggccacaaagaagtggaccaacaagagcactggctcagctacctgcaaaagaggtttcgttcagttctgttatgagccaatcaagcaaatcatcaacacttgcatgaatgaccagaaggacaagttgtggcctatgctgcagaagcttggtgtggtcatgaaggctgatgagaaggatcttatgggcaaggctctcatgaagcgtgttatgcaaacttggctgccagccagtaatgcacttcttgagatgatgatataccaccttccatctccttcgaaggcccagaagtaccgtgtggagaatctgtacgagggtcctcttgatgatgtctatgcaactgctatcaggaactgtgatccggaaggtcctctcatgctgtatgtttccaagatgattccagcatcagacaaaggtagattctttgcctttggccgtgtcttctctgggagggttgcaactggcatgaaggtgcgtattatgggtcccaactatgtccctggccagaagaaggatctgtatgtgaagagtgtccagcgtactgttatctggatgggaaagaaacaagagtctgttgaggatgttccttgtggtaacactgtcgctatggtcggtctggatcagttcatcacaaagaatgccaccctaacaaatgagaaggaagctgatgcctgcccaatcagagcaatgaagttctcagtgtccccagttgtgcgtgttgctgttcagtgcaaggttgcatctgatcttcccaagcttgttgaaggtttaaagcgtctggcaaagtctgatcctatggtcctctgtaccattgaggagtccggtgagcatatcattgctggagctggagagcttcaccttgaaatctgcttgaaggatctacaggaagacttcatgggtggtgctgagattattgtttcccctcctgttgtctccttccgtgagactgttcttgagaagtcctgccgtacagttatgagcaaatccccaaacaagcacaaccgtctttacatggaagctcgccccttggaggagggactggccgaggccatcgacgatggacgtattggcccacgtgacgatcccaaggtgcggtccaagatcctgtctgaggagtttgggtgggacaaggacctcgccaagaagatttggtgctttggacctgagaccactggccccaacatggtggtcgacatgtgtaagggagttcagtatcttaatgaaatcaaggactctgttgtggctgggttccagtgggcatcaaaagaaggtgcattggctgaggagaacatgcgcggcatctgcttcgaggtatgtgatgtggttctccacgctgatgctattcacaggggcggtggccaggtcattccgacagcgaggagggtcatctatgcttctcagctcaccgcgaagccaaggctgctggagccagtctacctggtggagatccaggcccctgagaatgcccttggcggtatctatggcgttctgaaccagaagagaggccatgtgttcgaggagatgcagaggcccggtaccccgctgtacaacatcaaggcttacctccccgtcatcgagtcgtttgggttctcgagccagctccgtgccgcaacatcgggccaggccttccctcagtgtgtctttgatcactgggacatgatgacttctgatcctctggaggtgagctcgcaggcgaaccagctggtgctggacatccgcaagaggaagggtctcaaggagcagatgacccctctctcggatttcgaggacaagctctaagaaaaaacccttttggtctcgcatatgtttttgccattaatttacctgttctaatagctgttctactattgttaaagagttataagacaagtcagaaatatgatgtgtttgttacacatcaagtatcggtgttggtagtgttgtgctgtggaactatatattttgctgtctggtgatatgcaacagatatggaactttgataatgtatctgttgatagtttttacggttttctgaatcagtttcagtttgatatatcatatccatatagtacctttcactttcgtttctgccgaaatcaaatctaaaccctccacatagatattattgtacgtgcctggagtcgtggactaactagctgctttgctgtaacctaacaactctttctttgcattaatcattctgtgcaactttattctttcttactttcttcaatattgtttcactcggataaaaacttttggaacatgtaaaaagaagctaccaatggttacataataagaaaagtcatcatgcaagtaagaaaaatatttaaattcacaagaccatgtctgtcttcaaattcacatcaattttagttatgaattaacacttactggtgcataattaatacacattgagagaaagtttaatggtttagtctgtttctagctaaaacaatacaaaaaaaatattaatacatattttttcagctaaagcaatacaaaaatattaatacatactttttcagtaaaactacataccccttcataaaagaatagaggatatattattaaataaaacgctctcggtgttattgatattcagactcttttttctcgttattgtgtaagatacttttacatttataagaaacgtgattattacaagaaagcagaattatctcctctttttcacattgtttaattttttaatataaaaagagtgatagtttttctgaaacaaacagaacgagttttttaatataaaaagagtgatagtttaaaatattttgtcgaatgatagtttttacagtctcctgcggcccttatactatttactccctccgtcccaaaatataacaatttaggattggatgggacacatctagtctaatgaatctggataaaaggctgtcgagattcgttggactagaatatgtcacgtacagttctagattgctatattttgtgacaaggtagtatcatataaacaactaatatttttcattattcttgtcattttcgtaaatatctactcgtttattgtacggactgcctggtttcgtcttcctctgatcttggtcatgctatcaatttttgtggcttttttttttttgcgtgtatggtggacggctaactagttttgggagatgaatgcatgatagcaaaatttggcctgtaagatgcactgcaacatactctgtcaaaaaaagcttaccgcattcctttatcctaggttatgttctatccttacctaggttaggttttttttgggacagagagaataagctacaagttttataagatgcatcggaaatttctagaatctgttgaagagatgagctatgagatgaacataactccaaggatttggggttaaggtttcaacagttggaatgttggtctagcttaatagaaagcaaagaaatggcagattgacataattgtaaagtttgttttggagcaaaattggttgaacataattccacgaaaattcatttcaccatggaaccaagaaaattctccagattttaaatcttacttcagaggtaataattattattatccgaaaacatagcctacaagagcctgcccgtatgtaagtttggttttcttcagatctttagatcgttaaaatcatattttctacacccatgtgtccattcatatattgatagggtttccaaatattgaaaacaaatgaacaatcgctagaaaacggagcaataggagattaaaatgttcatcacggaaacatgccataccatgtgctcaaatgtcgaaacaaaagcgggtcgcggaacatatcatattcgttacagggttcattttgatttgaagttttaggctaccagaaaataacatttggaagccaaccagctgacgatcgatatcagcatcttaagcagtgcgcaggatgatgtgaacaccactgtcagtgtccacagtgtcactcatctcaccaaccttgagagcaaatgtcgcatcttcgaagggtttctgcatctgcctcctcccaaaagtgcctgcaaggagggttacgccacggttagaaaagacctatagtactggcaaagatagaacccataccagaaaatcattatgcattatctgtaaagataacagtgcccaagaagcacataaaacataagtggccgtaatgcaacacaaagattgcaaagttattcccttaaagctatacttaaagatgcgcacacacagagaagaatatgggtgcttaggtaaattctcttaaagaattctcgattaaatatttctacttgaaacagacatgtgacactccctactcggcatgccgatgctaaggaataatgaagacaatgccataggctgatggaagacgtgtaatgtggctacaaacaagtcttaacagaataaacttgcacaataaaagatggatatcacaacataatggaatgactgcagaagtgcttgttacactgatataacgcgtgcaaccaaacaattgggaaacacaaaaggaagagaaaaaaaaatggtgcagtaattaactacaaaaaacattttatcagaggagctgaccatcaatgatcgaatgaagggaatcaacagtaacacccatttgggaattaatactctagttttcagcataagctattcatctgacttgtatgctcttacagctgaaccagctcatttcatttggcttaatttagcctgggttaattattcttgaaaggctatagttctacctgcaaagttagccccagtagtgcacaaattcgttgacaaaatagcaaatcttgtatcgcgcagacactacgtccactagtaggttgcagacactaacaacacagatccagtgggaggctggtgatctttcatgataaacagaccagcaaactatgccatcagaccaagcaaattattggatgtcctactcatgtcatgacatctgtgaatgttatacacgagttaaaattagaatttcattaaatgcctcatttcacactgtgacaaaaatgagtagatgatagatgtgaacaagctaactgatccttgtacaaacagttaggcaacaatccatagatgatagatgtgacctacctcctcctaggagctccaggaactcccgagcatatagctctatcgatcgataattcttgtttgagtagttactgttactattacaaacttacacataactcctgtatggattaagggttgcaattatagcgcaaaagttgattgaagtggcaagatgaaagaatcgcgtctcactcacagaagaaaggttgaaagatctccttgatttggctacaccaactaagtccgcaagaaacgaatggatgggccaagaagtggatctgagagagagagagatcagatcgggggacgcacccaggtcgccgccacggcgcgcggaggagcagtcggagtggcgggcggcgaggtcggcgaagttggcgcggccggagaggatctggtcgcggaggtcggcgaggcgcgcggcggcgtcggcgcgcgtggtagcggagatgacgcggccgtcgggatccttccaggaggccttgcggcgggagccctcgtgcttgatcaggatgtgcaacgccctcaccgtctccgtctccgtcgccgacgacgccatctcgatctcctcctctactcctccgcctcaccaatacgctttctgcgaatacgcttttcgagtccgtttgtgcaaaccacatggagtagtgatgaatgaatgaaataagggttttagagttgctatagggtgtgtgtttgcaagagaagttaccaacactcccctctcgttttccgcgtgcacgtttttcaaaccgttaaacggtatttttttgaaaaaagtttatatacaaaagttattttaaaaaaaatcatattaatccatttttaaaagaaaattagctaatacttaattaatcacgcgctaatggaccgcttcgtttttcgtgcatgggagatgggttcccaacaccacctccgaacataccatagtcctagtatgaacttgacttgaattccggatgttttattttccaaaatgataactttgaaagttcctcacttgatataaattcctaacacagccaaaattattcatattgattaaaccatatatattttggttgcttgtaattccattcaactttgtcaaatcgttgtgacttgtgtatatacttttcatgctctataatcaagatcatacacccacatattatgcacgtgctaaacttctacactggaagctagcatatatccatttcatccattccatctttatttccactatccaaataaattctccatgcttatatatgctttcttctcctaaaagaaaatcctttctaaaaaaagaaaaaaagagaaaataaatatggagggaaaggcatggttataaaaataattaagttatgctctctcaatattgagcatgatattaaaaaaaagtagccatgccctctacgtaattatgaaaggaggattttggagaagaaagtaagcacaaaggagaagtattttctttatttttcacatttcatttccaccatataccacacacacacattgcacgatcttgatcttgagtatgtttagtcatctattttagtccaagtttttgacttagtaataaatgtgaatacaagtatatcatgtttgattcctactaagctgtaacatcccggtctagggcttaataggattaatataatactcatatcaacaagttgcaacttcttttctggaagccaatctccaaagaactctagggttaagtgtgcttggcctggagcaatttgggatgggtgactgaccgggaaattcttcccgggtgcacacgagtgaggacaaagtgtgtagaaaagacatatgttggtctgtgagggcagtctatgacctatgaaagctgccagatgtaagtgggcccggcctgggagaggcgggtcgttacataagctccacatattaacttaagagtaggaataaaaaggcaatttggtgaagaattcatatgcttggagtgattgagtgaatcatttgaggaacttggatttcttttgaaaaatcatttgaaatcctccggaatgaaagttgaataaacatatgaaagctgccagatataagtgggcccggcctgggagaggcgggtcattacataagctccacatattaacttaagagtaggaataaaaaggcaatttggtgaagaattcatatgcttggagtgattgagtgaatcatttgaggaacttggatttcttttgaaaaatcatttgaaatcctccggaatgaaagttgaataaagattgggtgattagtgctctatttgctgttctgtctctcaagcgcttaaggcaaggaaatgaagtgtctcatgggaatcaggggtaagggtaagccactgtgccaaatttatttaatttgagagagagtacacatactttacacatttgagatatacagcatagtagcaactcctgatcaacaaccaagttttatttttgaggtgtctggatagttaatttctagtggttgcttcgtatccatcatggtgaaagtgaagcattggttatcccaatagtatgctaatgtctctaagctggctaaacaattatactaatatatgtagttgaactattataattactttaacttttattgatcttaactgagtttcattattacaaaactgaagactctcacaccactaaactcaccaacttcctaacactcaaaagcaaacaaacgcatgcacttacatcccaccactgatgtaaatcacatgcaagacccacacacacaaccaaacttaaaacaagcaaactaacacaacgatctaagacaacgactagacatggcactctagttcttccgagcatcgaaggtcgattgaaggctcgtcttcatcatcttgagttgctacccactcaatcttggaatggttgcgcttggattcttcttcttcatcatcacttataatgatgaccggaggatctgttaaggctggggcaacttctttttccaccacacggacctttggcgccaattgatagcgagggacaaatagagctctcttccttgcggtaagacgaatcctggccttctgcggcggtgcttctcccttcaatgcagctagttccttctccaaacgatccactttgtcctctagcttgcaaatcttaccacgattccggtcttcacgatcttgagccgctaacacagtctctgcacggctttcatccatagcccacagcatctcaaccaaatgccttgtagtagcatcattctcaattccttcagtctcaaggtagctgccacggtcacttccctggggttggcgaggatggtagcgatactcagtgtcggccaactgatcactgtagcgatcacggagctctcctatggcgatccttgccacctcctgacatgaatggatgtagtttcttcctccagcttcgaacatcactgaggggatatcttcactattactgttcaaggtgactttgactcgacacttctcttcatgacgatcatgaggaatctgggcataaaaaggggcagtcccaaatcctatggcaaaggacatcgtacgcaactcctggacaaatccctcaacaccaaacaagtactcaggcttgtagcgcggcatctaaagacaagtgaaaggagggagttaagacatttatccaattaatagcacaagtttttggattaatttgaataaagtttagaaaatcaaagtaaaaaggtaagtaaataaaataaaccaagcttgcaagataagttgaaacagttggaaataaggttacaaattttgtgcttttgaataacaggtttcaaaagaaatgaaagaaagttataaaatcaacatgttaaatttatttcagtgcagtaagattaaataaaacaatattgtaaaacttttgctggtaaatgagccattagtatagtaatagatgtacagtactaataacactggaataaattttgaatgagaaccattaaaagagattatgaagtgcatgtgccagtagtttggtttaattaaaagagaaagggaggagaacagttctacttttccaatatttttagagagcttctatggataaccatttggcataacctagggtcaagggggctctgataccaacttgtcacgcccggaatttctatccaaaattccaaacgcttacatgtgtgtgaaccctcgtccaggaatcagccgaggcacacaataacaaattgataatagagtacaattattactctaattaataagcgaataaaatgtcattacagaggtagatagttcctctcaatcaataaagatctaagcagtggaaaataaaataaacggcgcagacgactccactccacaggcagcttgaccagggctacacctaatcctccacaccatcagcatcattgtagaactcttcctctgatgaatgattgcaaggtgagtatatgacatactcagcaagccacgcagcaaatatgcaagtgcacaggataacaaaggatggcataatagggtttcatttgcaaaagcagcatttagcaaacatttgagaatttaataaaacagttaagtaataattaaacaatattaatccaacactatacaacataccctgttgtataggcccaaccattctgaacaaccatacccggctgtacagatctatctccaaaccaggaatataccattccaaaccaggagctaatcaaattattaccaattagcatctgttaacatgatgagaggtgtgagactaatcacgaaagacattgttagacccgcccataaccgcgggcacggctattcgaataggtttactctgatcagaggtgtaccactgtacccacaagacacaaccccacatcatgtcaccatgtgcctcaatacccccacagggtacctcggaaaggagttgtgacaataccccttgcataacacaatctaccggagcgcaccttcctggatcatattcccccccttataaataaggcatggactccccaccgacccccgtgggctcatctcccccacttctcagtctggtgccccgcaatgaaccatgctatacaaaagataaagccgttgcccacgctggcttgtggttggcacggttaatgtttcacaaccgaaactcgtgaaccggtccttaattgtcatgagcacgaccaacaaaaccatgtgctcacaacccaccattatcaggttttagttggcacattaattaattaaccaatcacgattgaccatcgtgaactatcattaagccatcattaaattatagtgattcataagttatcccaatagtgtgctaatgtttctaagcagggctaagcaattatatctgatatctagttgaaccaatatacataaagctcaaccagtcaaattataataacccaaggtatcaaggaataaggtaatcaagaacaaaagggctataacaaacaataggttaattccacccaatgacattcgaaaataaatgcaatagttgaatagaaaccatagctttaaacaggatcaacatgctctaagggttgtttgggatctgtgtgacttgccttgctggccttggaactcttcaaactcttctctagcgaaaacggactctccggaaacgacggaatctaagcagaaaagagcaaaataaccaaaacagcacataaacaagcatgaacagtacatgtggatatttttaacatgtagatctcaattttagaaaaatttagagacttgaaccaactaaatccgagctaagatgaattagttatgaatttttgaagattaaatcggattaaaaaacttaaattgattttaattgaattatgacgcaataatgaattatttttgaaaaggaaaagaggatttattgcgtcagcgggctagggtttcggtggaccgggcgcacggcggcggttcacgcgaacggacggccgagatcgacttgatccaaaacggacggccgagatcgatcggtccacgaccggctcacgggagagggcgacgatgacgtcagcggtgacgtcaccaccggcggcggcggctcggcggctcgaacggcgcatgctcaccggcgaacggcggcgcttcggcacgaacggaggacaccaacgggtagcggacggcacggcgaactcaccggcgaccaaagcgacggcggaagaccaacggacggcgacggcgacgaggttgaaacggcggcggtcttcggcttgacgacggcgatgatgcttcggcggtctccgacggtggcgaagcggtggacgaggacggcgacggcttggcgaccacgacggcggtcttctcgagcgacgacgacgtctggaacggcggcggcgcacggctggagcgacggcggcgacggcggcgctagagcacacggcgctagagcgctacgggcgacgagaggcgaaggcgagggtggcggcgggtagaggagacaccggggaagcttataaaggggttaggaggcggcggcgaaggcccacggcggccggcgacgagaaggaaagttcgggaaaatcgaatccgaaacaaactcgaatccacgaatttgcaaacgattttagccggtgtttccaaaggagaaaaggtagaggagatcccaaagatcatttcccctctatcaattcggccggaaacggaaagaaacggccggattggaaagcggcggcggcggcgcgaaactacggtttcggccggaggaagacgacgggcctgacaggtgggccccacctatcagcgggcagacgcgcgcgcgcggcggcggactgggccggactgggccgaggagagagagaagagaggttttgggccgactttcggccctaagctaaaagaaactttttaaaacctttttcaatttaaattatttatgaaatgcaattccatttattaaaaatacttccttagctcaaataaatcccagaaaaatctaggaattatagaattaagcaaagtatttaatgaaattttatctggcccctttttatattggaatttattaattaaaattagatcttctcttctaggcttttaaaataaattctaaaaattccatttaaacaacaatttatatattttgaattttcagggtgtgacaggcggcgcgaaactagggtttcgggcggcggcggccggaggttgacgacgaccctgacaggtgggccccacctgtcagcgggcggacgcgcgcgcgcgcagcggcggactgggccgaactgggctgaggagagagagaagagaggttttgggccgactttcagcccaaagccaaaagaagactttttaaaacctttttcaattaaaattatttcttaaatgcaattccatttattaaaaatacttccttagctcaaataaatcccagaaaaatctaggaattatagaattaagcaaagtatttaatgaaattttatctggccccattttatattggaatttattaattaaaattagatcttctcttctaggcttttaaaataaattctaaaaattccaattaaacaacaatttatatattttgaattttcagggtgtgacagaagtagagtatagagtccatatagaaatacaattaagaaataatacaaattcagaattaaaaataaggaatattataagtagagtatagagtccatatagaaatacaattaagaaataatagaaattcggaattaaaaataaggaatattagaagtagaatatagagtccatatagaaatacaattaagaaataatagaaattcagaattaaaaataaggaataatagaagtagagtatagagtccatatagaaatacaattaaggaataatataaatttgaaattaaaaataagcaatattagaagtagagtatagagtctatgtaggaatttaaaactaagtaaaattcgaaataaacataataaaattaaaagtagagttttgagttcatataaaaatacaatttacaaataactaaaattataaattagaaaaatgggatgaagagtctaaattcaatataggaatacaatttaaaagtgactgaaattcgaaattaaaaattaaagaatattgaaagacgagtttagagtccacatagaaaatagaaataataaaaattcagaattaaaaataaataatattagaagaagagcatagagtttatataaaaatacaatttacagatagcaaaaatttgaaattaaaaaaagaaatattaaaagacgagtctatagtccatataggaatataatttacaagtaaataaaatttgatattaaaaataattaataaataacacgtatataaaatacaatatgaatattacacattagtagtttcgtaaagttagtacaaaatttaaaattatgttgtcattttaaaatatttgaataatacattgagaaaacgtatatgctattatatgagagaaaatataatgatgctagccgcgcaatctgcgcgggccaccatgctagttacacatattcaaatagataaatcgtagtggtaattttctaaatcaaagaagttgtagtggtatatatggatccaattaacaaaaagaaacggagggagtataaattagaatttagacttccagtggatgaaatcatacgcccatgactccaccaccatagtctccttatagtactggtgttttttttaaaaaaaattcccaatttctaaagatgaaccttgacaagagcttgtcggattcatcacaagaaattattctattttggaatgagagaaagtactactcactctgtccacaaatacaggttctataaaaactcacatctataagggatggaggccagggagtaacatccaaaaattgtcaaaaacaaattgtttaatcgacttgtctgcgttttcagtattgtaaaaaaaaatcagaaactaataaaacatggtaaatatctagaaatattatttcctgttaaatatttgtaccatatgatatatatatatatatatatatatatataataaaaaaatgctgctgcagtcagccactgtctatccacccaaccagccactgactgaagcttcaccatccccatccctcccatggccatggccgccgtcgccgcaacttcgccgacgacgacgccgtcgccaccgaccacgcacccaccttccacctaggcgacagtccgctccctgaccgccgcgggcaaccacgccgccgccctccgcgcgctctcctccatcaccatggcgtcgccgcagcagcagctcgaccactcggcgctcccgcccgccatcaagtccgccgcggccctccgcgacgcccgctccgcccgcgccatccacgccgccgcgctccgccgcggcttgctccaccgcccctccccggccgtcgccaacgcgctgctcaccgcctacgcgcgctgcggccgcctcgccgccgcgctcgaggtgttcggctccatctccgactccgcgcatgacgccgtctccttcaactccctcatctccgcgctctgcctcttccgccgctgggaccacgcgctcgccgcgctccgcgccatgctcgccggcggccacccgctcacttccttcacgctcgtcagcgtcctccgcgccgtctcccacctccccgccgccgccgccgccgttcgcctcggccgcgaggcgcacgccttcgcgctcaagaacggcctcctccatggccaccagcgcttcgccttcaacgcgctcctctccatgtacgcccgcctcggcctcgtcgccgacgcgcagaggctcttcgccggcgccacgcccggccgcggcgacgtcgtcacgtggaacaccatggtcagcgtgctcgtgcagagcgggatgttcgacgaggccgtccagacgctctacgacatggtggcgctcggcgtgcggcccgacggcgtcacgttcgcgagcgcgctcccggcgtgctcgcggctagagctgctcgacgtcggccgggagatgcacgcctacgtcatcaaggacgacgagctcgccgccaactcgttcgtggcgagcgcgctggtggacatgtacgccacgcacgagcaggtggggaaggcgaggcaggtgttcgacatggtgcccgactccgggaagcagctcgggatgtggaacgccatgatctgcggctacgcgcaggccggcatggacgaggaggcgcttcgtctgttcgcgcggatggaggcagaggccggcttcgtgccctgcgagaccaccatggccagcgtgctgccggcgtgcgcgcgctccgaggcgttcgccggcaaggaggccgtgcacgggtacgtggtgaagcgcggcatggcgggcaaccggttcgtgcagaacgcgctcatggacatgtacgcgcgcctcggcaagacggacgtcgcccgccggatcttcgccatggtcgacctccctgacgtcgtctcctggaacaccctcatcaccggctgcgtcgtccagggccacgtcgccgacgcgttccagctcgcccgcgagatgcagcagctagaagaaggcggcgtggtgccgaacgccatcaccctgatgaccctcctgccggggtgcgccatcctggcggcgccggcgagggggaaggagatccacgggtacgcggtgaggcacgcgctggacacggacgtggccgtcgggagcgcgctggtggacatgtacgccaagtgcgggtgcctggcgctgtcgagggcggtgttcgaccggctgccgcggcggaacaccatcacctggaacgtcctcatcatggcgtacggcatgcacgggctcggcggcgaggccacggtgctgttcgaccggatgacggcgagcggcgaggcgaggcccaacgaggtgaccttcatggcggccctggcggcgtgcagccactccggcatggtggaccgtgggctgcagctgttccacgccatggagcgcgaccacggcgtcgagccgacgccggacatcctcgcctgcgtcgtggacatcctggggcgcgccggcaggctggacgaggcgtacgccatggtgacctcgatgaaaaccgtgatggagaccagcaggtgtcggcgtggagcacgatgctcggcgcgtgccggctccaccgcaacgtccacctcggcgagatcgccggcgagcggctgctggagctggagccggaggaggcgagccactatgtgctcctctgcaacatctactccgcggccgggcagtggactcgggcggcggaggtgaggagcaggatgcggcggcgaggcgtggcgaaggagcccgggtgcagctggatcgaggtcgacggcgcgatccaccggttcatggccggcgagtcggcgcacccggcgagcgaggaggtgcacgcgcacatggaggcgctctggggggagatggtggcgcgcgggtacacgccggacacgtcgtgcgtgctccacgacatggacgacggcgacaaggcggccgtgctccggtgccacagcgagaagctcgccatcgcgttcgggctgctcagggcggcgccgggcgccaccattagggtggccaagaacctgagggtgtgcaacgactgccatgaggcggccaagttcttgtcaaagatggtcgggagggagatcgtgctcagggatgtcagaaggtttcaccatttccgcaacggccaatgctcctgtggggattactggtagtgaagtactagtctctcaaattaatgatgaattatatatagcatctaatacacatggttaagaacaaaaatgatatactcattcacataaggtgttcttgtaactcgattaatttacagcaaatgttcagttcatttgttgccactggagagacggggaagagagaagagtggggaggatggatgaagatggaaacgtggggattggaggcaaatgtattttagatgcatctaaaactatagaattatatcctatgttagatttaatgaaatattgctgatcaaacttaataaaatttcactaggaaaaaaaatctgttgtaatatacaaacgaatgttgtaatatgttacggtaacaaaatacaagttcaaaataagtacttcctctgtttttaaatattttacaccgttgacttttttaaatatgtttgaccgttcgttttattcaaaaaattttaagtaattattaattcttttcctattatttgattcattgttaaatatacttttatgtatatatatagttttacatatttcattaaagtttttgaatagaacgaacggtcaaacatgtattaaaaagttaacggtatcaaatatttagaaatagagggagtagcaaactaaattctagctagtgaacatatattgacaagtaaattttgttttttttatttattgcctgtagaagttgaagtcttacgtcacattcacatattaatctaatcttattattcttttcaaattttgtttaataaccatttaccccctccgtccaaaaagagtcaaacgagaggagagaatgtcgcatgctcttaacccaatttgtaactggtggtagtataataatttcctgcatcctccatggcctagttggatccggtttccagtgtcggcttcctcccgttccgtccagccaccgccaccgaccgggggatttacaattataacactacaaacattaacttttgctataataatattggacccacatttcatagacacagatgggctcatttctcattcactcagagtgtcaaaacagcgatcatgcgtccacaagtacgctgccggagccagtgagccaccaccacatcgatcacgcgcagctgcgcgcggccgcacataggcgaggcgcgaccgacttacctgctgtccggacaaggtcgcggaggacggcagagcgcgcgcacgccaggtgttcgacgcaattacatcgagaagaaaactctctggtagatagaattctcatctcggcttcggctgtgtgataagcaaatggtgaatttttggtttgctgtgagtgacgtctgttctttctgggtcttgaccagatgtcagcctgcaatgcaggtcatcaaagcaggagcatatgagcaccactgaggtcaggtagcagataccgaggtaactttggtccatcgttaccatctcagcagccacgggttccttgtgtatttgtcctaggctgacgcactccagcccttttgttttccaacaatttgcactcccaagtcccaactggcaactgctgttgacatttaagttttttagatcaaaaggctaccgcccagctttacttgaaaaagcataagatgtctggatacaggtttaaggctggggattccagcttacaagacaagcatttagccaagtctggcaacataagctgctggcccagcagaagcagagacaaaccagagagagcgccaaaactaccaccagattactgcacatttatccggcaaatcagctgcttcttcctgcttcttggatactggcatgcagtgaggccctcaaagcttccagctctcccctcaatttcattgggaccagatttttccactgtaagaaaaaagataaagctttatacggcacatgcataatgtcagaaatgttgacatttaagttttactcttgaatgccgattacagtacgaatcatatgatactctcgagctcaacttcctggaaggtgcaagttgcgatatttgatggttgatgcttaccacaaaatatagtctaaagtgtggcgtacatgagttcaccccatcgccattggtagcgtgagcgatcagttcaacaccgctcaacaactattcgacaaaacaccttcaaggcatctccctggcccttgtgattcctggctggctggctggttgcgaagaattaattcaggttccttctctcgtatctcttagattaatttgatgggtggtttcgatttcatacttccataagaagggtgttcggctatatcacaaattagattgtgtctatattacatttttatttcagtgctagatggatattttgtttgaaagctcacacaatcatttgttttcgatttaacacaacttttcagcaataccagtgcaaagtttgtacatatgatgatcgatgtttcacgtccaatcccacttttcaggtccactgataataactgtaattgagccagctatatttgactgcaagatttgaggactggatggcagaggctgtggtgtttggaatcctatgcaagattggatccatcttgagttcacatctaacacaggcgttcgttgcacacttgggaaaggaggtatcagttttcattgaaattgaaagcagtattaagcaaatcagaagtgagtttaggttgatgcaagctttcctgcaagacggccaagaaaaagaaagtcatagcaggctggcagaaacctttctacacgaagttcagcaggtatcatttgaagttgaagacattctggatgaatttgtctatttgtttggccaaaaacaaaccgcatctctaaaatcattgaggaacttctttccaaaatctaaaagtatgatgcactggcagagactagcagcagagctcaaagaagcgcagaaccgcctccagaatttgcgaaatttgaaggttcagtacaatattgacttatccgaagaaagtcctagttctatcaggtatgaagatagccaagttcacacaatccaacacataaagcataataacaaaattgttggttttgcaaacgagcgagactgcctacaagagctgctgatgacaaacgagaaatcatgctcaataatttccatatggggcatgggaggttcaggtaaaactactcttgtcaaaactgtttttgaaagaaaagctatcaagaatcgttttgattgcctgatctgggtaactgtgtcacaaacatatgacattactgaaataatgagaaagattatacaatgtgcattgaaggaaacttgcccagctgacctagaaagcatgtgtagtgaaggtgtagccctgaagctccaggggactttgcagggaaggacatacatgatgatcttggatgatgtgtgggatacaaatgtttggttcaacttggaaccttttctagatttgaacagcagaggaagcaaggttgtaattactactcgcataaacgatgttgcttctttggcagatgacaagaaccgccttcaactacgaggactaaacgaggcagagtcttgggacctcttttgcatgtgggcattcagacatactgaagatcaaacatgtcctctcagattggagagagtagcaagacagattgttggcaggtgtgaaggtctgccattagctataacggctgtaggcaatttgctatcattcaaaagactggattcgtttgagtgggataaattctataatcaactaaattgggaattgcacaatcgattggataaccaaggacttaacatggtgacccgactcctaggtttaagctacaggcatctaccagcccacttgaagaactgtttccttttgtccagtatctttccagaggactatatgatacacgggaagtggctaagtagactgttaatagcagaaggtttagttgaaccaaggaaaaatatgacactggaggagattgcaacagagtacattgaaaagctagtagatcgctgcctgctccaagttgtcaggagggataagcttggaagaatatggcaactccagatgcatgacattgtgagggaactggcaatttcaatatctgaaaaggaaggattctgcatgatttatactagtaaagaagcacatacatcagtggttgggtgcgagcctcgtcgtttatcagttcatgagaattatgacagagtccagcaaattataaatgctcaacgtattcgttctttctacccatatcaattggatagtgattattccgtgatgtcaaatgtgcaatgggtgtcaacaagtgctagatacttgaaggttctagaattaagcaatattccaatcacaacactgccgagagacattgggagcttgttcaatttacattatttaggattgagacgaaccaaggtcaagcaacttcctgaatcaattgacaggctccaaaatctccgaactttggacatctaccttactgaaataggaaaactgcccagcggcgtaaccaggctaaggttgctacgccatctgattgcaggcaaagctgaagctacttattttggccttgccgatgtctactcaggtgtgcaaatgcctaatggaacatggcaatcgctggacataaatgtattcacaggcatttctgcaagcaacaagttggtggaacaattggctaagttaacacagctgagatcgctgaagctgtcagacgttaaaagtactcactatgccaagctatttgtatccatcagcaagatgcgtcttctacagagcctgctaattgagactgccaatagggatgagtgtgtgagcttggaagccctgaaccctgcacctcatcaccttgaactactctttatgaaaggcaaactccatgagagcgtcataggctgccacctgtttgaggtaaataggctaagcctccgagagctgaatcttcagaatagcaggctcagcattgatccgcttccatcactctccaatttttgtaacctgacccttcttggtctgttcaacacttacagtggagaaagcttgctctttcaggcagggtggtttcctaagctccaaacactcactttggctgagctgcaaaatgtcaattcaatagtgatacaggagtatagcatggcaaatctctacaacctagctctcatctgcttgaaaaatctggagtatttgccccaaggcatggaattcctaaaatctgttgaagagttcaatctagtgggcatgcaccacaagttcatggaagatgtacaagctggttcctcatatgagaaagtcaaacacataccggtagttgactactttgaccaaagcaaagggaggtgggatcgactttcacgagtttatggcaaaggtaacccatgatctgctcatcacctcatcttctataagctgcataatgcattcttttgaccttcagtgatcaattccctatccttgcagaccaagacaacaagcatcagcagtaagcaaataaaagatggaaatatacccggtctccaagttatatatatatactagaaaatcaacgtgccttttggcacgctcatgttatagctctgcagatgatttctgtgggctattaagaaatagaaattttgcaaatactacagaatatgttcaatttccttaaaatttgaaaatccttaattatattttgttggtattatttagcgtttatttgttgtgtataattataattgaattgtccattaaatgataaaaatgtggtgatatttttatacttgttctaagttttgtttggaaacttatgcttgatgggtgtaattcatatgtccaagccggaataaaatttgtaattgataggtactacaagctaaccaacttgcatctgggctccgttgatatatgcttgatatttgctcccttgttcaaattattttgagcctcaaggatccttctagattaatccctaattcagaggccaacacctcttctgtaggtagaacaggagacctacaacgcagcaacattcaagcctttttctcaacaatgtatttttctttcacataatatgtgatttgtttggaaagtaaggggttgccacgtggcccaatcaaaactagacactgccaacatgagaatattattatattatagaattttttgtatctccatccattgtaactgtattcactcttttgccatccaaaaacaccttttatattttgccaatcttcgttagtatttcttaaagtaacacctgtcactttacctgtaacggacatgaccgttttgtcataccacggtaaccaaactggcgtggcgaaacaacgttgccacgccactcagaccagcgtggtagtgttgtttaaccacgccagcgaaaagattcggatcttgaaaataaccccccccccccccccacacacacacacagagagagacaaacacaatgtccttgtatatgtccaaaaaaaacaaaaacttaaaatataacttaaggatcatctctgaaatgttcttacatttttttgaaaaaaaattatagatatggatctaatgttctcataaaaaaattgcccaaggaaattatgctattacatagtaattgagacaatgttggaaatttttgaaatccttttcaaacaaccttggaatttgccccttcatttttgtgaaacttctacttgaactatcaatgccttcttttcttctcatgttttctggattttttattattttttgggtaaagaaaaattttctaaaattggaagttcgcgtgaggtcggatatggttttggggagcaaactagtgcttattgaatgacaatggcaaaagattgagcactaaaaaaaggaaggaaaaaagatggtaaaagatagaagggcaaaatatatgcggcagaagagagaatacagattcagttagtggcaatgagaccttcagatgatccttgcaatgtttgaatacagattcagtgtgtcaaagtctcaaagatggttgggtgagggatcgtgctcctgttgggattactggtagtatattacttgtcttctctgcgaaattaataatagcatataatacaccatacatgagaacaaaattgtaggccatttgctggtacggttaagtggaagctgtgccaatttctagatgaaatcatgaagttcaattattagaatctttgcagaaattatcataccattttgtccactgacgaaattattgtgatacggcaagctcttagcctcgcattttagaaacaaatttgtgcttgtggcgaacaaattgtgcacgcctggcaaaatgcttggcaaaccgtgtttgttatccaaacaaattggccacaaataacaaaagattaaatttgacagactaacaacaggaggctagaaatataaagtgcggtagtcatagaaaacgttgtggcacaggtacatcgcacagagttttgccttgatgcacaacacatcatatctaaattatactagtacggagttccaggtcaacaaaaggtaaaagattttcagttcgactacgaaccacccatgagtacccatatctaaattatatatatagtacggagaagacaagttcttgctatcactgctaaagatctagagaggcagatgcaaacccttcagcaaccagccaaccacccttgagaaaactctgtcaatcataagctcttctgttggcaagtggggatcttgatcgccggacaggaga

SEQ ID NO: 25665 - DNA, 19989 bp, Oryza sativa
tctgactagcttaggtaacataaatgttctggtgtcctcaagaaaatatttgcttagagaactgctgctcctagcataacataacatccccaagcataaatagtgcaatccaaggaactacttaaatgaatgtatgaaggacataccttcgatagcgatcattaacaggactcctgtcatacgaaccgtacacaggactcctttgacgaccgtagtcaggacttgggcgtgacctgtacactggactaactgatcgacgatatggactatcatctcgcctaccatagccacctcttgcaccatcatacctgtcacctcgttctgtatcatccctgaaggcatactcaacagaaatcaccctgtccaacaacttgctgcagacagaaggaaaaatacagaaggcatattggttacatgctacaataatttcaaaaatatcaaaatcattagtgtgtacagaattgcatagatttcagaagcagcataactgggtagctgtgtgcctctactgttgtgttttaagcaagactagaagaatgattgaatagtaacattcctaactgaatcgaacaattaaagcaatatctgctaattttccatgcacgtcagaaacaaaataatcaatgaagcgcctatgtggaaatttcatttatcctatataagcttgagaaagttccttatttgccatgcaaagttatccaatttccttatttgtcagcgacaattgattgtccccttgcgacaaccatatgaaattgtgacccttacatgccttcaataccattaacgtttctctgtttttggcatatcctaggaattaccaaaagatactccttccgttcacaaatacttgtcagttttgactttgactaatcatgctttctatagttatacctttcaaattatataactattgtatcaaattggtgttgttagatttgtgatcagaagtactttactaatattgtacatttagagctattcacttttgtattacctaattaaaaaattaatggtcaaaatcatattcataaaagtcaaaactgacgaatattcgcaaacaggagtcctttaattaacttcactatctcccgtattacccaatctacatccaactatctcccgtattacccaatctacatccaagccagtagctgctcctatgctatttcctcattccctcccatcagctcaagcagaaaccttcctccccaccctccacggcggtcttcgcccagaatcctccccggcactatgagcaaccatagcatgagtccggcagcactacctcccaaatataaaagctgctactcaggatccccatggctgcatggaatttgagggcaagcaccatcaccatgtccatggcaaccaccgagcagcccccaccatggaacgtttctactactgcaagttgtaatctgtaccaacaaactgcaaacagcagtacatgttgggccaccgatctaccacatatggtatttcgaagaggaactagatatatagcaccactatggttcaagggttcatgttttgttggccggaccaccagacagatttggcaacagcggcatggttgcagttgagggaaactctaggaagatccacgtgcaacagatttggctcattcatttttctataagcagtgggatccacatgccatgtttttttttgttatatccaaattctgaacgggttgcgaagaaaggtagactttgcatatgcacccattaacaaccctctaacagaaaattaccatgagtggcaaataagggagcaattgagaaaaggtagcaaataaaggaagagacaactctcagtggcaaacaaaaaattcacgtaactttacatggcaaataaggaaatctggtaacttcgcataaggaatctcaacaaggttaagaagaggtgaatcagattcatacgtagaatgagtagcttcaagtgcttttgtggcctcttcctgtgtttcaaactgcacaaaagcaaagttcctcctgatccgaacattcgaaagctttccaaatggttcgaaatgcctttcgatatcagtgactctggtgttgatggggtcaaagttaatgacaaatagtgtcttcgtgggtttagtattcacaggtggtttgctatagccatcacgcctggaaccacgatcaccctgtaataaaggccataataacgaatgcaatactttgacattaaagaccgactaaattaaacaacaaaactctcaacatgtaagtaaaacatgtttcaattttttcagggttataggtggtgacaagaacagcaagagaaattacccgtgaccactccaccgaaagcctgcgcctcccagggccaaaaggatagccatcaagggctcgtatggcctcatcaccatcacgctcatcctcaaagtagacaaaagcaaatcctaaagaaaaggtaaacacaattaagaacagagaaaaaataaataatgtctttgcgccaataggtgcaagcatttccagttttcctttatgataaacaactcaacacacaatccccgttcaatcagacctaataagaacagaagagtactgcacctgcaaaatatctgatggtatgaagagcactagtgtggttattggtagattccattgatggatcagagctaagcatgatgttgtaataacttatatccaaagtaagacgatacgactcaggagatactgagagtgcttcaccaataacagaacaatctcacaggcattgcttattgagacagcacgcacagaacattgtgatgttgatgccgggaggatggcatggtgatactgctagtcatggcatggtatggaatgatggaactgacggcacggcatggatcacatgatggtgccagtccccgctaaacatgctcgggcagtggtaacaacagtaaacagcgcgcgtcatgtaatggatggtcaagtgaaggggatggccggatgagtgcatggagggtgtttcaggagttgagttttgcctctgtagttcctgcgccagagtaaacatttaaaacatcttgcttcctgctgtacatatattgcaactgcggctacatgggcatggaccatcatacatatgcacaatttatgtgttccacgccgttggatgttacagatgtaacgacgacaagctaatcttaaacatcctaattgcttccacaaaacatatttaacataaagcacatcgacatgcttgggtggttattcttggtaaattactaaagattattattgtgaaaacatatcataaacatgagagtggtaaccaagaacagttcaaagttggaaaagaacctcttgttttctctagggtgaaaagaaaagaaaatttattagacaccatggactcgcaatctcgcaggagattaacaaatcggtgccgtatatgagcaccaaaccggatctaataattcacgggggaaaaaaaaagaagacaggtggagaggagggcaaaggcagacctgacttcatgtcgatgcggtcgatcctgccgtagcggtagaagaggcggtcgagctcggagtggcgggtgtcgtagtcgaggttccccacgaacacgggcctcatcttcgccttcgccttcgcagcaaatcaaagatcccaagacagcaagaaccagaaaaccctagcaaggaaagcagcagacagcgcaaccggatcagcccgaggactctctccaggtcgaggggttctagctcgagaaaccctagcgcctagagcctagcaccgaggaggaggaggagggtcacctgcgtcgtggtctcgtggagcggaggacgaagggggaggcggctagggcttttggggcttttggaggaggagggcttcttggtcggcgtcggtcggtgtcttgtgttggttggtttctgtttgggttcgttgggctgggccatactcgacatgggctggtaggcccatgcaatcatggactgtttggggagtcccaaccttcccgacacagtctagcttctttttgttaagattatgagaagatgttagacagtctccttacaaattataaaataataaaacccactagaaaccacagtctccttacaaattataaaatccacaagtgatattaaacagtaatatataaagctccaagacaaaccatggcttgaaaaagatggaaataagtaggagaataatatcttttttttcttggtgtttgttattttagggcctgttcagattgtagccaaaataaaccttacgaaattttggcaattccaaaattttggtaagatggcaatattgctaaaattttagcaggatttcttatgtatttactaaatttggcaacaaactaaacgtagacatttttttgtcaactttaccaaaaaatggtatggttgaaaatggcatcaaagtgaacaggcccttaatgtgtcacaaacattatggttgtctaatggcgcctttcttacaccttgaattatgtaatgataattctcatttgctcaaccaaaaagaagaaaagaatcttgtagtcaccatctacatatcattatccatgagagaaggaaaaagtgcacaacccttgaaggcttggagcattggatattgctgagccatcgatcttgtggataagagattctgaagctagggtgctatccatctagcaatcgagcttcttcagcaaaactacaaaagaacactatgtcgagcaacgtggattcaaagacatccaacaaagcctcctatcctcttgcatcttaagccattgaaacaacagcagctcaatcccaacatatttactcttcttaccttctccattgcatatataatagacacagctagctttgttgtaccattgaatcaatcatcaattttgcagcaatagctagacaatcagcgagacaaagtcacaaaaccatggcttctgcagatgctatcctgtcttcgcaggtggccggtgaatgcctgaagatcaacaaggtcagtcagtcacttcttctcactcaaatcaacaaagattcttcacgaatatatatacatatattcttgatcttgcacatgctgctgctggtgctggtcttgctcgattaggaccattttacatctggtgatttcttgggaaattttttcctggtgaattttgcagctggcagcagcaagcccagtgaaagtagtgcaggtgcagaagccgagcaaagagacgaagaacatcagcggtgcacctgtagctgccgctgccgtcagggtggttgtgagcaagcaagtgatgaagccacggtttgccgtggagctggatgggctcaactgcttcgagacacttgtccctcgctgatgatatcatgaagcgcacacacgagctgctagctgtgttccatctgatttgttgattttctggtcattatttttgcggggttatattatatttgttcaaattttctatgagttggatcctttcgcacgcgcgattatgtattttctttctttgaagtgatatgtgtaatttgctcttacgagtgattccgactgtgaagtattatttgttatataaagatatacgtgctattgatatctcagaggttataataaggttgggaaacgatttttctatgttgtaccttcgtactatatcatgagctttaaattttatgttttagtagaattcttcttatatcttaaaataaaactattttagctattcaaggacagaaggtgatttttccaagaaaacagttgattggtgctatgtgcagtgctacaactataatcataacaaaagcattgaattataaacattggtttaagaggttaagatgataagatcgaggggtggttttttcatgttgtaggggcgccatactatattatgagctcaaaatttcatcttgtatgaagatattgtttttatatgtagaatttttttagctactcaaggaaagaagaagttgctttcacgacttcttccaagaaaaagttgtttgtgtactaggcggtgtagtgctagcataacaaaataatggaattatcaacctaccaatgtgagtggttttcttcctcatagatgcattaattctttggaaaacacatacaacattaatcaagtagtagtattataaaacaagcttaatttgcactatctattcactatctacccacattgtaagtactaatgtaaacagtgatagtataaattgggctattgttttactcaagtagatatacatatcaacataaataccgcttaacacgttaaatcaatttgagaaaatcatattttcttcgagcatactctagctattcacatgatagaactacatctaaatttatcaaatacacattaattttataactgacataacaatacaataaaactgtcattttatttaagaccttaattgactgcatcaaatgagcaatcatgtatgccttgagaatttttttttaaagacaaagcaggacctataccaacattcattgaagagataaaaaatttttgctaattagagggaagtctaccttagacttcaaactccttatgtttgcaatatagctaccaattaagaaaaacccacatgactgaaaacactacatatgttacatatgttagtcttggcttttacacatttgggttttaatgtacttgaaataaatcaaaagtgccttatttttttttcttttttttttttggcccaaacctcttctcagtcaatttcacagtcaaatttgttggcctacccacggaaggacgatggatagactaagtccatacgaggctcctagcatatatgcaaaactaatgaaacaagattagatgccttgaaattatcttagagcattattaattgttaacttttgcatgatgttactcactactctaatagacatgaacaaatatttaatagttttatattaaaaaataaaaataaaataaaaagatatatatgttagcttttccataatgtttctcactactctaattgatgtggacaaacatttaattgctctttgtatcaaaagaaaacaagaataaaataaaaagatatgtccttatattatattatattatattatatgctaacacgaaattttttgtttgctgcttgaaaattaacgtttgaactttcaactcaatagcttaaaaatattttacctaaaagactacaatatataacttaaggtttttaaaacttccacatgagagctcctagatattttttttttgcatgaacagcagagccagcccctgagctggtcaggtggctactaggactctattgttgtaatgcttcactgtggattatcaagaaacccataaaaagttgtcgtcaacttataatattcttttatcacccaggctgaacaataccagtggcttcgtcattgattattttctccgtaaaattgtaatgtccgctttattttgggccctgtttcatcgtttcttctctattgggcctaaatttcccacttccctcccctttcatctcagcccacaatcagtttgggccacaactagttcatttcccctcctcgcctaggcacagcaaaccaaagccctaattcccaaatcggccaaaccctaaccagaggaccgaggacgtgcgcggtgtggcggcgaggacgtgcggcagtgcggcggcggcgacttccggctgcgtcggcggaaggcggcgccaaggcgggtaggagcctaggcagcgcgtcgggcggcggcgactgcagtctagtctgcagcgtgctcgtcggcggctgcggcagaggcttccggctgcggcgtgcgcggctgcgtcggcggcaggaggcgccgaggcgtgcaggcggcgcgtcgacggctgcggccgtgcggcgttggggctcggccaggcgtgcaggccgccagtccaccaggccaccatacaggtacgcgatgcggcagccgaacgaccacggcttgccggcctggcatggattgcgtgaggggcttgattcattgattcattgcattgatttgttctaggtagttcaatagtagctatgttttccggtggcgacggcttgtttcattgatttgttctatagtagttcaatagttcactagcaccgaaggattcaacttcctcagttcctgtcttctttatttttcagagtgttaactgttaagtgtatatttattgacagattgatagtataaagctgtaaatattaggaatttagataacttagaaccataatatttaattttcagtgtgttaaatttatatatatgatgatagtatgaggctatatatgagctgttgttaggaatttagagaatttagagagggtgttttcttcgatgaactatataaaaacaagaagcaagatgagcaacaatctacatttattggaagagaattttttgtacaagttaaaggatgaggacatcatcactcatttttaaaatatcaagcattgaaaagttctcctctaaattgtaagttttttttatcattttaccattttctatcctttacatgttatatatgttgccactttcatatgtcgaacaattagtacttatatatgttaaagaatttggacttatgatcaattctatcaatttataaagttatggccatatgctataatattatacaattagtaatgtgtaatattataccaattaattattggacttctagaagtaaaaagaattttgttttacccctacctatttcgaatacccaacctctaaatcctgggcccgccactgcatcaagcccagaaatttcaacagaagaacaactatcactttcccacttcaaagtgatggaattctttgataagcctgtcagctaaacattaagagagtcatcacttagcacaaaattgtacaagcagtgccttttatcttaaccatcataactacacactgagggaaaaaaaaaaagaaatattggtgagtgttcacttacaatgtcagcagtagccaatttaatggcttccaactttggaaagcaagctcgtttactctgcagaagaaacatatgttcaggggaagcaagtagcatagtaacataactagtagcaatgtggtaacaggacaccagaccaccaacagactttactttgtaagatagttgtgagagatgtacacacaggcaacctgttggtatccattggtattaccagtgcacacaaattataaaaacaaaattattttcccacacacattgttttgtactgttctaaacagtataagatacctgtagtagctgatgcccttcattaagactgtagccaagaatccagaacatatacgccaactgaaaatttatataatggtatcaggatcagaatattgctgctctcaagataatggacaccatcaaatcatagaggatcctgatactataatcatcaatccagcgtgaaacttggacaggcatcagcaatatcatgagagtgaaagtcagttgtgatactattggattatttaagtactataacattgtgcaaatagaacaatttaccgactatacctgtgatgattatgttatagtctaggactcactagacactagttaatgttcattatttgggaatgtatatatgtgttttccatttttcttccctttttgtgggtgggccaacaactaactgaacaggaaagaagaagacaatattataatgtaaacctaaacctattataagaattcttgggaaacaaaaaagaaaagaccatggaaacctactgtcacagcaggagctctcccaagtccagcggtacagtgtatatatgttaccccaccattatggttgacaagcttgtgcagtttgctaatcacagcaggaagcctcaatcgcaaatcaaaagcatcaaaatccctggtgtaattaaacattatgccactttaagactttgaaaatatggacagaacagacaatggaaaaggcattcaagtcaatgcaggaaaagttacatttgacaaataaatgctgattcaaggaaagatgaatcatctattccaaaaatagaagagcataggaattataattggaaagagaagggggaaaagagatagacgttcagatcatgccatcttgtagacattattaatgaaaataaagggatttctattgcatttgacatagactacaccaaatcaccaaaattcttagtttctcaaagtaaaacgaagttatagaactttaggtacctaatttcggcacgacagtgctctatatctttacattgtagacaatattcttgaatggcacagatgtcaactccaaaatatctgaactggttaaggatggaatacaactattcactgaaagaacacattgggcagcaatggaaacaacaagcaactatgctgtcagtataaaatagaactatttttatgagatgtacaatatgcattgtgctgaatatcatagctgcagaagaagtacagtagcagggaagtgaggagcaaatgtaattgttcaatagaattatggttattgtccaatagcacagtaacataattaggaagaaggcatgctgacataaaagcactccctattccaatagttattttgataaaaagccatcaccagaattttataattctcttcgatatagttggtgtgattcacagtaagtgacagcatacatttcaagaatcaagaggctcaaattctctaaaccaggagaactatggaaaaatgatgtattatctatttaattatgagaaatatattagtccaaatcaacatatatgtagaaaataaaaaacaatatgaaagaattacggaaatacgtactaatgtagttatcatatataatacaatgagaaaagaagaccatagtcaaatgctttattattgagcaaaaatgatggtattatttttatcatcttttagaggaatctatctaaatatagttaatcagcccgtgttagtagaagcatgtatcgtcatgcatcaacatatcatgagattattagttatagctaagtacaccggcgtaatcatacttagcatatcacgagactatcgggtaatggacaattatctttaattgtgctagagaaaaaatatcatacttagcatatcacgagactatcaggtaatggacaattatctttaattgtgctagaaaaaaaaaagtactcccttcgtcccataaaaaaccaacttaggactggatgtgacacatcctagtaaaacgaatctagacatgcatatgttcagatttgttgtactagaatgtgccacactagttctacattcgtttttttggaacaaaaggagtaaattacaatccatactatgtattctaaaaaattcttacaaattttcatataatgttatcctttaaccattttcatttacacaatagctaactttacattttaatttggaccaccatattttatccatctccaagtccggtgactcagtaatcacgtcgcacattaactctctctctctctctctctctctccattttcttctttcatctgacagttggataaccgatagatctagcaagaaagagcccggatatagcgccttcgctcttcgtcgggtcagctcctgccttccaaagtccctgcaagcccgacatctccgacctcaattgcaaccataacaatagtgtgcatcatgataggggaggagaaaaagacttgtcggttactagaggttaaggctgtgcatgtaaggcaaaggggaggaacgatggtggctcatggagaaagagcggtgatggcggtgcgtagagtgacagttagcagttgcaggtggtatgaggaatttgtcgtcgacacaatcttttaatttttttcctaagtattgatgatacgtgggtcaccagttatataaagaaatagcttttaaaatattagcttgccctaaaataaatgtcaaaacttttgaccgtccgtctttgaaaagtttatgaaaaaattaaaataaattagtcacacgtaaaatattattcatgttttatcatctaataacaataaaaatactaatcataaaaaattttaaataaaaaaaaagttaaacgccggacgtaaaccgtaataaaaaactacacttaattagggacggatggagcggtaaataaaaatatggagataaggttggagtatcgctacttgagataaagaaaaagaaacctctcgttgtctcctccgctccttgcctccttgcgccgccgccaagacgagtggcggctgaacaagggagggccgggcggcgatctccatcgcagcggaggggaggggatcctggtgcgtcttctttctgattcatctctctctctctctctctctctctctctcccaccccaccgggactggaatttgcgggattgcgttcgtaaaccctactagcttctcttctagatcttctcctcctccttaatttgatagccttaaacctctcttaaataaataattcaagtaataacagtttgtttgttcacccaaaagtttgggggttcaactgaacccccatgtcccaagttggatccgcccctgtgtcgaggtcttggtggtggtgggtaccatttcagaatcaaacctcatttcccatgcataaagtagtatgtatagtgtgtttacttaattttaggagagaaatagaatgctccattcacacatactagcactcattttgtcatcagtaatggagatgtcatcactactactccccatgccatgcaaaataaatatccatattaccgtttcattgcccacattatgatctttaattcggaaataataaggcattgcagcgagaaatccatggcatggggaggtctcttcttgagcttcagccgtccctcacaggaccaacagaagtcatgcctttcagctgctggtggtttcaactatgatgcgcctctccatggtgcctcaagaccaaaatcagtagctaaattgactgcgggagatactgaagcaagtgacaaagcgcttgtcgagcgcggcttcttcgtgaaccgttcacgtgttctggttggctctggcactaccaccttcaaccatgccaaatccgcgcttctctcctggaagtaaagcccaagaactacaaattttgttatgttgttcatctggtctccataaccaagcaaactggtgtatatctaggcatttggcactaggctgggcaaatgtggaacccgacacaccggtgaaggctggaacaaggttctgcatttgttacaaggagctgatcccttgggtcatgttgcccctccagattgcctatgtgaccgatggcaatggaggcaactcctcaggccatggaaaaggctgcgtttttgcttatggtagcggcactctacaaggccatctgctggtacgcctgcctcctaatctcatcaagtaacaatgaaacattgtagtactcactactcagtaatgtaaaatgttcagaatgcagtgcagagttgcaggtgtttttttactgaatgagttggatgatcatattttgatggtttgcaggcaggggaggagaggttctcggtgcagctggacgaagacgatcaggtgtggtacgaggtgatgtccttctcgaagccagcacacatcctgtccagcctctgctacccgtacgtgcagctgaggcagaagcatttcgcgcatcagtcagggcaggcactgctcaggcatgttgccagccgctccagggacacacggtgatcgacttcgtctgcagatttgatcttttcttcaggagtagtcttcgcatgttgtgagtgagcctgcttgtatgttcctgtatctatgtccgaatctgctcctgagagcattattagtttgtagtttgaatttttgagctcagggtaattatttagcatttgtgctttgttgttaagttttagatcaaattgaggtgttatggtgatgtaaattcagatttccatggtttgttactaaatcaaaaggaagaatgaaagataagcacaagaggaaccccacagttccacggaacaggtagaagagacgtcttgcaccaggcaaacgccccttgtttatagtgatgagagtatggattatctgtttgtcccctttaccatggtagtagagtactcaatggattagcaactttttccatgtctgtcactgtcactagaagaagctttgctagtgcaagtgttatctgagttgagcagacttgcagcagcaactgctgcttgattttcatttcattttattgccttcattattggtcagcttagcgttaagcattcaagcatagcctctgctcatcagaggaaagagaaagatgatgtcaaaatttatgcatgtttgctggcctgcacattagtgcactgtatattgttctgtctgtccacccataaagtttgaatacaaacttcagtcttttttcatcacattaacctattatacacacataacttttcagccacatcatctttaattttaaccaaaatccaaacttttgtactgaactaaacacagccaaaaagaagaagaaagcgtcctcccctccacgcaagcaagcaaaaaataaaaaaaataaaaaatttttcatgtgatgaagttgataaatctcacatctaataaatactcctccagtttcattttaattgatgttttggacaatacacggtctaccagatatatctttgaccttatttttctattataatatatacaatatataaatacatgtttacttttattaaatatttttaaagttattgatggttaaatttataaaagtttaatctcaaccttattcaaaacgtcaatcagagcgagcagttagtttccacggtatattttcccggtttgggttaggccatccatcctccatccctgggcgcttgctgggcctcggcggatcccccgaagcagccgccgcaacaacgagagaaaggcaacaaatcaatcaattcccccatcttcctcgttctctccgcctcctccccactctccatttatactcctcttctcctctccatcgccgcattgctcgccaccccgacgacgacgacgacgacggcgacggcggaggagtagagacagagagatggccgccgcgtcctccttcaccgccgccgccaagttcttggcgccggtgtccgcgagatccgccggggactacaagccgccgctcccgctcccggcctccgcctccctcaggcccgggaggaagcccgcgccccgcctccgcaccgcgctcgccgtctcctccgacgtgctccccgggaacaaggccgcccccgccgccgccgcccactccgtacgaaccaaatcccacatctcttcttgcttcttctctccctctctgaaatgatcccaaaatatatatatatatatatatatatatatatatatatatatgtgtgtgtgtgtgtgtgtgtgtgtgtgtccgatcttgcggggcgccgccgcagtttagctacttgagatgtggtaaaatttccgatcctgggtgttccggtttgtagattcgtcgtcattcctgaggtggtttaattctagaacatagttaagattacacgcgctgcttggaattttttttatgctaggctactttactgaatctcatgttgagcagctagttctcagtactaaaaatggcactttcttttagttagatcgaaagtgttccggaaagctgccctcttggcgacttccttactgtgactgtccaaccttttaagcggttttgtattctcgattgagatttctttagtgcaaataagaggtcaccaacaagcaactagaattcattgtttgccacgaatttggtgatgcaatttactactaaacctgatggaatctggaaatgcaaagtttaaagggaaggatccgtccttgcaatttcagaactggagaatgttgcctcacttcttgaaatgcagcttgcaattttgtagccactgtggtgcttcgatagggaaaactcatcttgtctgctgttacaagtgttaatagtagccttcttgattcatatcgtttcattttccacaggctgtcacgcgggaagaggctttggagctgtacgaggacatggttcttggccgtattttcgaggatatgtgcgcgcaaatgtactaccgtggcaagatgtttggttttgtccatttatacaatgggcaagaagctgtctccactggcttcatcaagctgctcaaccaagctgactgtgttgtcagcacataccgtgaccacgtccatgccctatccaagggtgtccctgcacgttctgtcatggctgagcttttcggtaaggccactggctgctgccgtggacaaggtggttctatgcacatgttctctgaaccccacaacctccttggaggttttgccttcatcggagagggcatccctgttgctactggtgctgcctttgctgctaaataccgccatgaggtgctcaagcagtctagccctgatggacttgatgtaaccctggcattctttggtgatggtacctgtaacaatggccaattctttgagtgcctgaacatggctcagctttggaagcttcctattgtgtttgttgtggagaacaatctatgggcaattgggatgtcgcatcttagggctacttcagacccagagatttataagaagggtccagcgtttggaatgcccggcgtgcatgttgatgggatggatgtcctgaaggtcagggaggtggctaaggaggccattgagagggcaaggagaggtgaaggaccgactcttgtggagtgtgagacttaccggttcagagggcattctcttgctgatccagatgagctcaggagacctggtaagggtcaccttccttgttcattttttagttcaatggtgtctactaggctaactaaacagagaaatggaaactataaggaaaatattcaggcacttaggtttctaatatttttaataccgttttgtttcatgtctgagtaagtacaatacacttcacaaactttgtactaattcaccacataatttccctcaggcaaggtcctctgatcctgtttagtgacgtcgtaattttataactatctagaatttttgatctgcttatatcactgaaggagtacttatatccttatttcaatgaaggagtgttaataagatttctgcatgtacatgcaaaaattttgcttccaaatttagtatatcctgtttcatcagatcagtatacgcatgatcttctttgctgatgaataactaatagggttatttgatacttaatgaaaatttattaaaattagttattgctatagaatagtctggtggaatgtttgtatttttatgccaattgaactattgaacaaaaagaaattctcgaagtctgtagcttttgttcttatcgtcatcccagtcatcttatctgacatgtcaacatcctgacagttattgctagattgtttggtagttacttcataggacatttggcaccccttttttcaactatcattttgacaatgaaaaacatcagtttttgggagaaacaaagagttgttgattaataggatctcatgagtcatcattgtttaaatgtgcttgcaatacatacaatcattaagtagggttgatatgtgagttgtgtcctacatttgttagttttttttgtctactttgatcttgagtaaatatgcccttgtttatatctaccaattctgtttgatttttgtaacctcaccgatattcttcatgatctatcttttttgtttggctgtgtatattcgtcatatttagttttatactttgattcatagccactgtaactcatgatgtttttttattggtctatatctgaaactatattctcattattcattttatggtttgtatcatcacacagttattgaatccttaagtcagctgtacagtttctttcctcctaatttgctctgactaaatcgtcttatgacattgtgcacagatgagaaatctcattacgccgcaagggaccccattacagccttgaagaagtacatcatcgaacagaaccttgcaactgaatccgagctgaagagcatcgagaaaaagatcgatgatgttgttgaagaggccgtggagttcgctgacgcaagcccgctccctccccggagccagcttctggaaaacgtgttctcagatcccaagggctttggaattggccctgacgggaagtaccggtgtgaggatcccttgttcacgcaaggcacggcccaagtctgagaggctcaacgagcacgcttatcagttattatgtcatgctttttcttgtctctctctagctctaccctatcctagtttttgtcgaacccatcgtcgtgttaagcgtaatgtaagcacaacctacttcttcatttgtttcattcttagacctcccatatcaatatgctcaactgctgccccagtttttgctcagtgtgttcgatttgctcttcagtagttctattggtttcagaacagctgggcctgtaatcactcactcctatgtctggacatgcaaagatacttctggtttagagtttcagctgagttacagtgattagtttcctgcctgttatactatatttataaacatcatgatggaatgtgagacaatatctgctgtccttgttttacttttggctaaaccatggacattgtcccagtcaaaaaggtactccctccatatttttttgttggttagctaaaaaatgaactaaccaacgtcatacatttgtgcaaggaggtagtatgaaatttagtatttgcaaatgttatagtctcataaggaagggcaggtaatggttagcggaacttaccaataaaaaatatcaaataaaggtttgaaaatttgatcagtaaagtttcttttttatatataaaaaaatgaatttatatccctctctgtaccataaccagtaccattagactacatgtccttttgcaattgaagattacaaagaaagtcttatgtgccaaaggatcctctttgaatcccaagtcatggtttacattagttctggctagagttatgtaacgccccgattttcgttcgggaataaaaatcaattaataatgcatttctagaaattatattaaaagttaaatcaatttaatcaagtgaaattatagaggaaattaaaatttcctttaaaaaaatcattggccgggaatattttgcaatattctttgtgccccaaaaatactctccggatttttccgcaaattttcggagctcaagaaataattttaaagtcacaaagttcatttaaccaattagaataaaaagaaaagaaaataatcttccccttcctcccttttgggcttagcccaagccttcccctccactcccgtgggccgcgcgcctcctccctctctcggccggcccgcgccttgcgaaagtctactttacgtcccccggttttcctcccctcctccttcctaggccggcctcctccctcggcccgctcggctctctctctccctcaagtctgctttacctccctcgcccgttttcccctctctctctccccgacaggtgggacccgaggccccacctgtcatcttcatcccttacctcccgtcgccccaaccgccgccatggccgccaaatcctcccacgtcaccgcctctcccgcgcgtgcgtggacgcggtcgtcgcccacgtcggcgccgttttcccccactctccccgcgaaaatcggcgccggttaacccctccaccaccccacgtcggcgccccacttcgccggccgattccgccacgtccggcctcgatcccgccttcccgagcccataaaaagcacccccgtgctcccctcatccatttccccttgtttcccgggcccggcactctctccctcgctctccccacatcgttcccgcgcgccgccacactccggcgaactccggccgccgtttcccgtcgctagggtcgccgccgcactactccgccgccaccgctggctttgccacctcaagggcacgctcggccgccgtttcttcctccccttccaccacgcgaaccacctatccaccgtgctcccgttctccatcggtccctggcgagctccggccacctctagccgccgccctagccactg

SEQ ID NO: 25666 - DNA, 2729 bp, Oryza sativa
gtcgagctcccccgcctttccccgccccaagttgtcgcgtccttggggagctcctcctctccctccttgcctccctcctctgtctgccgtgcgtgctgccgcgccggtgcccgccgccggcgaccaccgggccgtgcgccgccgctgttaggtcgaccggccggcttgtcgccgccccgctcgcctaggccgcccggatccccttgccgcgccgcgccaccgctttcccgcgtgcgtcggccgtcgccgcagaaggccgcgccgccgtgagccgtcgctcggccgggccggcctgagctgtgccgtgctcagccgcgccaccccgtggccgcccgtcggttcccgtggaccggtggtggaccgcctcggtggtcccggtccacggtggaccggcgcccttgtgccgctgaccggtggggcccgcttgccggcgccgcccctcccctttgatgacgtcagcaaccgtctttgcctttgtaaaaataaataataattgcgcaataattcgtgaataattctagaaattcatttaaatggctcaaaacttctaaaattcatatctaattcattcgaactccgaattgagccattcaacttgcaaaattcatctaaaattgagctctacatgtttgtttactttttatgtactgttttcttggtttttattagagtttttcctcgttttgcatgccagcgtgtagtttccgtcgtttcggaagtccgcggtcgcgaggaaaagagttcggaagatcaaagtgaagaagcaaggcaagtcacacatttcccttgagcatattgatcccaatttacagatgttttactgtttgcaaataaatatgcatgttttgctaattacatgggatccgggtattacctatctgctcgcttgtgccatgtttacttgatatctgttctttgtcaaccatgggtaataaatcgcctagcttgtgttactttggtgacctagctagaactatatgcttagccatgcttaattaccactagctcagtcgatgggataattgcagtattagacattctagtatcttgttgagcttcgtgctcgagacatctggccatgcttcatggtcgtaattatccaactaaaatgcgactgcatggtgggctgtgggtgcatggttttgctggtcgcacccatgtcagttaaggaccggttcgcggaatgccctggaagaacttattgtacttaccacaagccagcgtgggcaacgactgggcttgtagtgtagctttcctctagccgacgcatccaggcaagggtgggcgtgatggagtttggatgggccctgcgacggcctatgcggcttccggattcacctaggcacgagaagggactgcccactgccttgcgaggagtgggggtgaaacctgaggtgtggtgtgcttggttagagggggttatgcgaagggtcctgtcacggcctctttccggtatgtcgtggtggcatgtcggcgcacggaaacgtgtcgttgggctgtgtcttgtgggtacagttgtacacctctgatcagagtaaaactattcgaatagccgtgaccgcggttatgagcggtcgaccagattcaccgtgattagtcccatcttaataagtcgacccaatacactgtagttcaggtggattggttggacctgttcaacgtggtgtagcgttgatcagtggagatttaatgttactttaattactcaacagttttactgttttgctcaataaaatgttttacaaccgcctttatgcaaatagccacaaacccctccttgtatccccttgcacatctgcatcgttggtgtggcttgctgagtacggtggttgtactcagtcttgctattattcccccttttcagaagtgtagtgcttctgagctgaagatggagttagaggaccaaggctcagaccccagttgagttttgcctgtggagtggagctgaagccccgctaggatcgcctttttccgctgctgtcgttctgtttcggtgtgaggactaagtgcctcttccgtaagtattttacgctttatttacgtttggaactgtatattacttgtcgttttgtgtaccctggctagtcctggacagggatttaatacgcaaaatagtctgaaaatttgggttaaatttctgggcatgacaagttaagatttaccaaacgttctaacgattttcttccgttcttggctagggacttgcattctgcctgtaaaaccgaccctgagaccatgtgtgttcggctagatgccgcgctcgaatagagctgtggcttaccatctccaattgtaggacaactcgactcgtatggatgaaaatgacttgtgtacggagaaaactgcctctaccacatctatacctaataaaaaaattcgtaatgcttccgtgaggtttttttgtccgtcgccggtttcctgaacgcacacgcggttttttcgtccatcttttgtccatgcacaatcctattcggttagcaatagccatggaaaaaattgcaaaaaaaaaagggcggccgacgacgccaccaccgccgccggagggagccgccgctgccggatccgcacgcggatgaagccgacgccatcgcagccgttgggagggcgccgtcgccgtcaaggccgacggtgagagagagagggggagggacggccgtcgccgtcgtatccgccgcaccccgccgtcgctgcgccaagccgacaagacgggaaggaggggggagagggag

SEQ ID NO: 25667 - DNA, 9582 bp, Oryza sativa
cttgaccctctatatttatagcaagggtggtcttgcgtctacagaactctttgcatgttctattaggttttttttggaaattttacaatcaaggacaccccggatcaatgaaagaaacatggggaaactctacttgaattcggactttgtgctgaatgtctaaccgttcagacacctgagtctgatcggccatacaatggcggttagatcagtcttcgtgggaaagcttcgattttttttaaatttggtttgaacttgctatacgtgtaaattattgccaaatttgagtgtcaacaatattattgtgatagtagataatattaaggatttatgttaagtaaaatatagaaattataaataccaaagactctttagtttttactaccatgaatctctagctttagttttgataaaattaaatcatttttaaatttgatattaacaaatacaaagttgcacccatcttgaaatcctaatttattaatttatattattgtttaaacacggtatagacacatgtgcctatacacatatgcacactcaccactatgaatatccatacggataccgtacccatatgagtaccttcgaagactagcctagcatatcttgagattgatgaagtcaccatagatgcttcgttgtcgacggatacatcgtctaacactaatactgaaataatttataagctaattctaaaatagaatgaaaacaaatatacaagtgcatgacacatagatttacggttaaataccatttctaaaataaaaacttagacaaatgagttaggactagaggtacctagtctaggtctttgtttgctatacgctatgcaaggagacactaacatattgctgtggtcagtcaaaaactatatgatacatttttcaacctgatacagctatgcacagggactcctcgcgtgcatatggaaagagagaggagccatcaacaatattgcatctataacattctaattttgttatgcctctttgcaacccaaatttgacttagttcccaatttcccatccatgccgtgatacatcgcagcgagctattctggtcagttttcagcaaaggttggtctgcaattttgggggaattccagctgtgcgtccaatggacgatgcaacttcccagtgaccattaaactaggtcatgctgaaagcaatcctcttttgataccttctcagaagctacacaacaaagacaggcgtaccagcttatttctctgtgcttcccaagttagatgtttacagggtttacaatcccgatcggtttttagcaaaaaaccgatcggttcttatgaaaccgctagggtccggtttgctaaaatcaagcctgtttatttatttgtttttggagttgatcgaaagtcatcagttttttttgcggaaatcaagccggtttatcttgttttttatggagttgatcgaaagtcgtcggttttgtttgcggtcggttttcagtaaaccaacatgaccgggtctcagctcgaaatctgtaatgtgaacctggctgttactgtcaatcttctctctgaagttagctgttagtgtcaatcttcagctgtgctgaattaatcaatgatccctgaattaaagtttgcttgcggtattaaaagtgcaggccttacttagaccactactgttgcctaacatccatttttttaggtagtaatgacatgtccttttttacttggagaaagcacattggctagtggagaattgatgccttctgaaaaagcagttcaatattgtgagaagcaagaatgactaggtgttaatagaaaagataaagagaggacaagaaaagcaaatggaatgaaagaaggaaaaaaataaaggaagagggcatgacacacgctaagtataagcagtcacatgaatcctgcgtatacaatacccatttgctagtaataaaagtataaatgggtgattttgtctcggggaagtatagtaaatctccaaaaaggggtcaattttcatgttgatagaatcaacatgttcagctgagataatttgacaaatccaatggagatggacaatccaattgaaagcagatttctctgaaaaatattcaacaagaatttcaccatgcatgtcaccaccacccataggagaaaacaataaatgtttgcgacgacgagagcgagaattcttgtaacaaacaatagcactatattttatagcacctcaaatttgagcgttaatacattgtacaccatacaaccggttttttggtctcaaaatcccagcttagctagttctaatcctcagaaactgcagtaacagcagtatgcccctagtctgctaaacgaacactcctttttgtctcgaactagatcttttcatgaactgatctaacatggacaaaccaacccagaatatgcaacaatggcactatctgaactgcaaaaaaggcttgatctgcatcatctgctgtattggactattggtacgatgacagctttgcgggcgaccttttgtaccttctgttgaaaaatgataagcgaagaattgttcattaggacttaacttcatctccttcctggtcctgcaaacctcctcgccgtaccaaatatgagagcctttgttaacagtccatggtcaaacgtgcatgccagggcaactgcgccacctacaaggatgactttgggtatattgcctgtccagtgctttggtttctcagcttcagcgttgttggttgaactggcctctgtcttgtcctctgcagtgatgagctcatcaggatcaaccttcgtgttgacatgtgccatggcagcgcattttgaaaggggctcgccagcagtccttgcgatttggtatgccctcaagccaggctcaatccttttgacgcagccccacatcccctgccgaacaccgagctttgcaatttcccttggaatccccatttcctcatgatggaacaggagcacctcacatgcggtcattgagccatcaccgtttcttgattcaactgataaaaagaacaagtgttagattcattggcctcacaaaatgtgtcatcccgcaaaatggagcgatggaactgcaaaattacctggacggatgcaccaactagagtagtacacgtccacacgacgaggtttgttgcaccttggaacagaggggcgaggcacaccctgaaaaattatgacaaaagttcaataacctaattcgcgcatatacggttaaatatttaaacatacaactgctatatgtagctatagatgaccaggatgcagcaagtatacttagcactaccagaggtaaaaagggcaaatgtaacttctcttagactcattctggaatccacaatagaacaaaaagcatgccattatcatgagcaactctacaggcatggccttgtcggcaaacataggaatttgaaaaggacctcataacagctaataatgcctttactcacaggacaagcatctcagccattgtgtggaatggcctgagaatatagtattacctagactgcaaggttgaaaacacatgataagtttggttatccggacctaaatagttggtggttcagagaattcatgcctactgcgtgctgtaaacaaacaaaaacggagtttttttttcccttgtgcaataggatgataatgcagtatgcaacaaaatttccagctaaacagttgcttgaaaggaactatgagaattgtaaaagcaattacaggaacttatgtaggagcattaaataacttgctaatagaaaaaaaaagcagattgtttcgttctatacctttgttacacagtaatacgtctttccagatgcccatatcctgcgaccgataatgtactccctgtcactgcagaagaacgggaactgcacagccaaggcatatagtataagcaaaagatatagtttgctggtgctctgtacaaagaataccagagatatcatacgaaaagctcaccttcctgacccaccggagaaccatcgttccagtctttgtgcactcctccaacgtatcgtgctgaagaagcatgtcgtcccaagtgttcttaatccggaactcgtcatcccagaagaaatccctgacaacttctggcgatgcatcctcaaagatagtgctactgcggtattgaggcgggccaccctagaacgaaacaaaccacataaactctttaattctaaagaattagggcttaatgaccagatattttcaactatgaactttattatcagtttatcatctaccgtatttcttagcagtaattcaaaactaacacagcaacaacaaacttgagagacaattcggccggtgctccccaacaaacacacaatcccctaaacccgaatttctcgattgtagaatcaagaaatattcctccatgtatgtactagtaagtatccatcgaattgagttcacgccgctgcggcgagatatcgattgaattgaatgttcacaccggattaagtagtactacctcaggatctctcctccatgcttggtagcgcatcgtgggcagcgtcttgtccatcatgtgaatccacgccggcccgccgtccttctcctcgacaaggcggcggaggtgcatcaaatctccggtgtcgacggccaatccctcatcctcctccggcgcggcggcggccatcgcagttctgcatccacacccaccacagtatcagtaaacaaaccagatgtccactcgaattcacccaatcgaggctcgtttgatttctgaaacaccataaaccctcacctaggaacggcggcaactagctcgttcttgcggcaggagtcctcggcggcggcacgcggcggcggcggcgcctccccgacgacgacgagggcccagcgcgggcgccacgcccagccgatgagtaggccgacgagggcggcgagccaaagcggcgcggcgagggaggcgagctcgagggcgacgccgccgagggtcggctggcggaagacccccatgagcagatcgagcaacgccgacatctcgcttctatttttcttttttgaactaatcacacacacgcctcaggaattaatcaaggaggaagaaaagatccgatttatcctcgtcgtcgtccgcccaaattctgaatcctgaatacaactagtacaagagcagcagcagcaatctgacaatcctcctactggtgatgcaatctgagaagaattttccaagacgcggaagagtagaggtttttgggcctagatgatgatgaaatcagtgtgtgtctattggcaccaaaatctctctctggcgctcatggcgtctgtttttgctcgctggagctcactggaccactataagcaaacgcaacgcaacaacaagcacaaacaccaagcgatcgagaggaggggaaaaaatcagggaagaatccaaaacggcggaggcgagtaatgtgcggtggagaagcgtctgcgtgggggataaggaggctcccagccaccgatcgattccgatggatttgatctgatggagaagaagaagacaatggagaattggagatggaggaggatatgccgggggatcaccgaggtgataaataccgtgtgttgggttgggtctggctcgtgtttgttgtggttgtgaccgtgtggggttaagacgtaagacgtgtgtgtgcgcgctgaccgggcgaccgtccacaaggaaggaaggatactggacgacggtgtgtgtttcttggtaatgggtcaccaccatcgatcatccatcacactactagtactacgatggagtatgtacgacgcccaccgtccgtccatggaattgacccgcacgcacacccgcgtgccggcgtggaacacgtatagggccttatttatacttgggttgaacgagtcctagctactagtatcagtctgtgcatgcacagcacggctgttaaaacttgggaacttccttcttgccattggtgccataggacattggtgccataggattatgttttatttgtgtactttttatcttgggttagcagtcattagtttatttctggttgatggttggtttcatcttttaaggctgtgtttaggattccggcacacaaaacaatatttgtattaacacgtaattaattaaatattagattttttcccccctaaaatggatcattatgattttttaagcaactttcgtatatagatttttttttaaaaaacacgccgtttaatagtttgaaaagcatgcgcgcggaaacaagggtgaggagttgagaactcccagcaaagaactggcctaagtttctttcaacttcacttattttagtgtgagattgtaataattggctataactctttgagcaaaggccggaatgctctattccattatctaaaaagaggattacgtttgatttcatacttacataatactccctcaaagcttgattcatattataactttttatttgactctttttttaaattaaacttatttaactctgaacgagaatgactccataaaaatcgtgatagacgaatcctaggctacctaatactccctccgaactgataatacttgtctttttagacaaggatgagatcaaacttcagaatctttaattgtgaatcattttaaaaatatttatctttcaaagatggtgactacatgcatatattggtctttaaaagcactttaataaaatcacatatttgttaacactcttattaatggtcaaagttgttttttagagaccatgcccttgtccaaaatgatagtaagtattatcaacccaaagggatcgtatatcggagtgtatttagagcaagtttaatagtatagccaactaatagctctaatttatctatagctaatctaatagctcatttatacaatagatacatactacactattaatacttggtcccactagtcatacacacattgtgtcttggagtccgtgctacagctgactataaatctgtagcctgctgctcttttctctcctcatttatcttcttaaaatatgtttgcaactggcttttagcctgctattgtacctgctcttacaaagagagatgctatacatacgatttttcatgtacgacactcgtacgacgtaaacgtttcccaatgcaagcctgtggcgtttttcagtcatttcccggcgatgcaccacaccatgttcaccatccgttaataatcgtatatgaattgcacgtacaagtcatatgcatactattttcgatttacaaaacaccctaaaaaattactaccatgtaggaatgttaacggcgtaagtttatagtatgaactagagattacggcgtaagtactgaaatttgcactaagttttgaaagctacaatgtattttgtaaatttagtgtaaatgcatattatttattgtttaaagaatgatttttttctttgaaaaatgtggtgccataaatggcaatatagctagagtaacagatcaagtctatctcattatttcatattataattaattgtctcttacaatattggcgaggcaaaccatttcaaaggtattttttatttgcagattataaaacatagtattttaggataagacttttgtattttataatttcaataaaacttttatattcttacaatccaaaagtcaataccaagaaatcaaaaacaaagtaaaaactatattaattcaaaattcatctctaaaatacataaccgaagctgccactaaagttttctcctttttatacaccacgcgtgtttggttcttgatttcactatcccaccaccattatttaatggaatctttacaactccaactttgtttaaaaaaagcctaccgtccaccccagctgacgaagacgagatgaagaagaagagaagaagcacgttttgtttcttttatttgtgaaatttgcgcgtgtgttgaaattgtgtgtttcctaaaaggggaagagtacaagtccaaatcactcacacgcatataatttatttaatattttaaaaagtactcctactctgtgatcatcggtaccaacatggcgtggaattttaatgaccgcagatacgtatatagagtagggttgtgtttagatccaaagtttagatccaaatttcagttctttttcatcacatcaacctatcatacacacacaacttttcagtcatatcatcttcaattttaaccaaaatctggatccaactaaacacaacctagctagctttagctttttcgtccgtccattcgtccagcagatgtgcttaattaattaagtttagctgcctgcagcgtgtgaaagtgaaatttagcaaagcaattaactgtggccacagtatgggtggcagactggcagtgaacgagtactacaggtctctacacgagcgttcttgtatgcatccgtacgttttgttaacattaatagagtaccacaattaataatcaattttgatgtattatattttatatagtggaaattttatatcttctacatatatgtgagaccttaattaatttgttggctttgggttttatttttaagaaacatagtataaacgcagacgctcataacgtacacacactcatctaaacacatacgcacaccctatctctatgagtatatccggaaaactggaccggcatatatttagcacgctatggtattttttagctctgaatggcttcttgaaaaactttttcatcttcagcactgcttagataaactttttctaatttatttgttagcttgacaatgtataatatttaactaaaaaaataaatggatggggtaatcggataatccggcccaattcatctgtttcgaacgagatgcactggcaataattcgtttgtaaataaaaagttaacgagacaaaaagatgatattttgtatcctctatggtactccgccctatcagaagcatgttttatatcgtccatatgttacttttttttctttagaacttgcatattttactgttgtgtgcagatttcattctctttattagtagcgtgtcatctcaagctggttctcagctttattacacttttacagtgtactatgtaaggcttcattccttcttggaaaaagtgcacccaaggtccctcaacttgtcatcgaattacaaaatcatcccccaaccataaaaccggatatctggcgtcccctaactaaccaaaactggtcataataggtccctcagtggttttaaccccgtttttgtcctatgtggcggctgactcagcgtgggactcacgtggaccccacgtgtcaggctgccacatcagcacatactctatttccccctcttctctctctgtctctgtgttctctccttccttcctccccctcgctctctgctctcgcacgagcggcaacgcgcgcggccggcgacggtggctcccaagtggcggcgcgtgggctcgccggcctccccgtccccctagtgcggttggtgatggcggcgtgcggctgcgtccatcatgtggagatcgactcgacgacgccgccatcaagtcgctgccgtcgggcgtcggcgatggcggcgcatggctgcggccagcgggggaggcggaggaggtataagcggacgccctcgccctcattgtcgatgtcgacaccaatgaagaggtccgcgccgctcaccagttcgcatgcctcgtcgtcgtcg

SEQ ID NO: 25668 - DNA, 16103 bp, Oryza sativa
atgtggggcccacgtgggtcccacgctgagtcagccgccacataggataaaaccagggttaaaaccgccgagggacctattatgaccggtttggttagttgggggacgccagatatccggttttgtggttgagggacgattttgtaattcgatgacaagttgagggaccttgggtgcactttttccttctttctatggatgggcagtttgtagggcttttctagctttcggcccataaccggccgaaactatagacccaaactgttattcacactgggccaagaaagtttgctttagtgggccacttgtattaaaattcctttggttgggctcaatgtactcggaaaaatagaaagggtgatatatggctcactagttgctaccttttaatgatgatgacaataataatataaggtctaaactaagtgtgtaatcgactattattgtgcgtttcagtatctacaatgggagcagagttgccaccaggaaaaaatatatcatattttacacttagttctatcatatttagactccattcggtactatttgctgaaaattttcctcgtttaccgtagagttttccaaaatgctaatcaatgtgttcaacttatacaaaatgagtctagcctttatatttttctggttgtattcaagatagaaatgcttaattaagttaagcaaggagtataatttaaattagttcaaatgggggcccatatgtgtggatgggccaaaactgaagcccatccaaacaaggtccaagagcatgaataatagtttagactgtatttctatataattcttatttttctatttaagtagtagatttattatatagtagtttgtctatctagttgatttatttatttgaccaatgatttgattctacatgcattaatcctacaaagttatgaaatttttatggtgggaattgcttgtttcctccccctcccccaaaagtagtaacaatttgaacctttatgttcataagagtgttttagatatttttgaaaaagaatgcccaactcgtattatagaacgattgataaattaagtcgttggtatattacagaaaaagataatattgataacaaatcgttgaactcgaacaaactcagtgatataaaatatattatctcacaagtataaccaaaaccgccctgtcacctcttcaacgcttagtcaaaagactcaaaacaagagagaaacaattaatcgaatgagccatcttataatacgaattccatgcaaaaaatccaaagaagaatggtgccacgtggcatcaccggcttcgcggaagtggctagacggaatgctcttgcgcatgcgcgtgcagcagtccagaaacgctcttgcgtgtgtgcaccaatcctcctgtagccgtacgattagaaatcaatgatgctggtgcaacggaccaatgtgtaaaattttatattcaaaaggagttttaaggaaaaaaaatgtcagatccagaaagtttgttgcccctcctaaaatgaatcaagatctgccgttcctcatatgcgtgggaaaaaaaatcctaacaaagtaaataaaaaaaatgaacaacatacatctccatatacatcgacttcccaagtatctgttcccttggaaactaaaaaaatttccattgctccatcctttcttatcaaatattattattctcaagccggcagttttacaggattgtgattggtccacatggcactataaaaactgagataaatcaagcaattactaatagaatgaaatagaagtctagaactttctcaaatctgaactagaatgaaatagaagtctgctctcttattcttcattggttgtttcaatacccaactagctcagtgatctgattatgcactaaatatatctttatgtattttccatcttactcctttacagggtcactaatagaaaaataaatatatgagaaaaagtagcattagaaaaaaggaaatattgtgttttgttttcaaaatacaacatacttcactacaatattataagatactgattacattgaaagctaaaacacagtaagaggttctttgaagctcctgtagcaaattcaaaaaaaaattcaacttatttcactaaaatatatgtatgtgccattgactaatggtcatataagataaacacatgatggtcatatagtaagcgcgtcaacaggcgcgctgattttctagtgatatctgttttataacatatagtactagtattagatttgttgcatcaatacatagaaattatacccttttttttttaaaaaaatatacatatggatagaaaaccaaggagccatttctaaaaaaaaaacagcaaaaaaaagatttaagcaccatatatagatagacctccacactctgctacatttactagtcacaaatcccaacatattttttttaaattacatggcagacacagacgcacatacaccactacagacgcaaaaccacacctacacccccatgaatgcgtcatctaacacatactttaatagatggaaaccaacggcacatccctaacacatactctaagagatggaaatcaacggcacatccctgatctcactaaaatcctgttgaaagcccacctacatatgtgtaatattcatggcactaggatttaaatcctggtagatagagtcatgcacccacaccgtaaaattttggcattaaagaaaacatcaggtgacttttatttcccttaaaattgtaacattacaatagggtagttaattgaaccaacggaaaatatttattggtgaagaaaggggctactcatcgaagaaaaaaccaaatcaaatgaccatacaaaagaaattaaattgcaaatcaacatataaagtcactttttatataattttgatagatgatggtgtgctctattagctttggcattattaggtattggtatatatattggtatgcagataattgaaccaaccgaaaagatttgtcgatacaaaattgttactagaataaataatgaaaaaaatccaaatggcaatacaaacgaaatttaattacaagtcaatatagaaatcgaaatagaatgatagtcttgcaatttacacagacggttgtgtgttctatgagctgatccatgcctttgcatgttctcaaatttctatcatggcctaaacaatttgacaaaaacaatggatttataattatctactagggtttaaatatttaattttctcagttacacaaacgggttaactagaaggcgtgctacatggcacacgccaattttctagtatagtactatattgcagctagcagcgcctagtagttgctcacgagcctctgtcttggtttgcacctgcaaatggaccgacgacgacgaccacggacgcctcttctgaccgcactgttgctcgtctcgctggctgcggcggcggcggcgagcggcgcgccctgctccggtctatcaagccgctcttcgtcggcggcgagttcggctacggcgatgcctggaacgagagcaccgactgctgcggctgggaaggcgtggtctgcggcggcggcggcggcggccaccacgtggtgtcgctgtctctggtccaggccggcatcgccggcgccgtcgacggcgcggcgttcgcggcgttcacggcgctgcaggagctggacctgtcgtggaatcgaatctctgccttctctcttccatctgcaggaggtatgtacgcatgcatccatcttcgtcagaatcgaaccaagcataacttaatttgaagttccaaaatggacaatttgatttagaattgcaaagtttttcagatttgattttatcttctgcgaggatgatgatggaattgattttattttaatctcaaccagcatgattgtgtgcatgcctatatggattctgcgggcttaatcttattttaatcatattaattacagtttttttatcagcgaaacactaaactgtacattatgaaaataatagttactattaaaatatttaaaagatatataggacagtatgttgaatattttgtctcgtgcatatataaaacaacaaatctaattttaatggttaaaatataattattattatcgtcaaacttcatgtgagattttatggatacgaattcaatgatataattggattattaaataagtgattgtgatgatcattagaggccgagagaaagaaaaaggagagaagagctgttgagctagtgggcttgggctgctttggttcgccgagctttgctagcgttaagtgcttgctggcagcaagcagcaggcctttggacattgtgcccacgttagggttgtatgataccattctttaactaaaacttgccatgttgtaggtagcaaaaaaattatgaaatttgatcaaaatttagttaaattagttcatgaaaagttggtaaaacgtagaaattttttgaaagaacccatttcaccctggttggtccgttgtcacaacccatggggaatgcccttcgaattgaaagaacacacatgttgctcttcatatttaattgattcaattcgatctaatcatacaaattacagaaacactggaaagcctttcaccaagagagcagctaagcatgtatatccgtatctattgtcactcaaacagttcaaggttattttagtgtgtacggctaggacttatcttaaaagtagtagaatttaatttgtagctcaatgattttgcattttagtttggataaatttgaaccaagtaacactggtcgaaggatcagatattcaaaggaaataagttatagaagggtaaaagactactatttcagatattcaaggctccaggccattggtgccggcgtaacatggtctgtgttggtctcagcctcgccgtggtcggccgccacaatatactgtatggccattgtttccgctactttgtttgcaccaccaactgaccaacataaatgcccaagacaactagacagcgagagttgccagaccaagtaggtcatttggtcttccgtttgcctaggaacaagggcatctatttaagccacaaatgaataatacatcctatattttctctgaaatatttgggtatgccggtgcatacccggcaccacccctaggtccacccctgatggtcccatctcgcgagcagcattagcagtagcgtggccgaatttaaaattttctatgtaaagtgaggacataaacgtaaacggttatatcagaggtgtggttcaaccaattggtttggatataattatttttggtggatgcactaaattacaagaaaaaaaaattgatacccacatgttattaatcttttacttatcgttgtatgtctacgtgctcccacatagtattggcccaatgtctgtttttttcctcgagttgggtacacaaggaaaagcattttccttgttaaaaaagagctaattgcaggttgggcaatgtatttttctagcaaagattcaatttgatcatcttttgtccaatatttttgcttaaaaccatatatatctttggataggggtgggcatttagtcagaccgaacaatttggtctcggccttcagtctttagtgaaatttcggtcatcagattcttgagacagattaatcctgaacaaaatcgaagatcgactactttggtcagtctggttcagccttggtcacaactgaactaagcgctttgtgttcacagccaaaataaaaatcactggtgaagaaacaattacaccatcgaactgactgcaaaatatgtaattacagacaaaaagatcacagaaaacaattacacatatacatgctgtattgctgtatagggctattgggctgcacagtgaaattcggccattttcagttaaccgagccatataaccagactaaatttggttagtacactttgatgactgaatttctcagtctcgttttttttccctcaatctgttcggctcggtctattttgtctacctctatatctttggcttggaggaaactatcggggtctagtggctagcagcatggttggtgagttagtcatcccaggttcggttcctcccttctacaaaatatttgggggatgtctctccctccaaatattgtttttttatatctttggctaggctatctcacactttttgctactgtctctccaatctcttctccacctccaattcctgacctccaccatggccatcgtcagctcaacccttgacctcaagctcatgatctagctctgtccacctagagctccaacgattactttctctagatgacaatagagagctgaagctcggtagcaggcctctctaatgcactcagatcctagcaactggcagggttggcaacggggtggatcagggctgggttggacaagattagccttagccttgactttctcccccaacctctggcctaaaggagaaaacagtgccaaataaagccccgcccctggtcttgctagggacctaacctcccatcaaggcctcattagttgctggcaggcaacaaagacacataaaggtggtgtggaggtgaggttggtgggcatgtggtgggtggtggtgggaggcatgtagtcaagggagccgagggaggcggcggagcagcagctgcacgtttcgtgcgatgaaaatgagggtggcgtcactcgggactgggagagggagttgttgtgcatggacatacacatcgatccttgagctagtaaggtatgtggggattagtttagatccattttatactccaagtatttgggccagcctgatattgtgggtttttctcttgtaacttgaggagatatcctcctccattgagattagtttcttggccctaggccctcatgatgtcggggcgccatgctgatggattcgcaggtgcagattttgctctcgtcccttagatgcgggtctctacacccattagggaaactgtcacccatagcagccagatttgagaaagacgaactcagcccttggttgtgcttatctgagagtccaccctctgctaagcttgatctatgcttgcatcacccaaaactagaagattgaacttgtgcaccctaccccaatgatagagctccatttcctacaaccgtgccatgctgcccaagctcgaggtccatcttggcctatgtcctcatggcccgtggattttacctctacatctgagtgccgatttgagtagtgggaacttaaggatatagtatatcgattcatgtctaactctacatttttttaaaaaaagaaagagttttgcttgccagtatgttttaacaatatgcacaataaaatagaataactcagattgttatgtaccaatttaggtgagcgtgcatttcagaagcttagcaagctctcgctttcgcacaacagtctaacaaatgaaggcgttgctgctctagttatcaaccgaactacactttcagagctgtaccttggcggaaaccagttacttacaacaagttggatatccaatttgacgtctcttagggtggttgatttatcccagaacttcttacacggatacaacggtatatctccgctctttttgttagtatccagggcaatttatccaatatttgtgttttagttttgcaggtatatgtaacctccatcaactagagtacctacaccttggtgtcaacatgctacatggaaccataaattcatgcttgggaaaactacaacaattgaagtacctgaacatgaaaaacaagggggaaaaaaaactttctcatgggggagattgcaccgaacttacttatcaacttgaccaaactggagactatacacctgggggtgaacaatcttaccggcacattcatgctctcctggctagcaaacagctcaaacctcgttgatgttgtcctctcacacaactacaatctgaaaatcgaaaccgagcttgtgagatggacaccgttgttccagctggtatacttgaatttaagcaactgtgttatcaataggcgaagcaatggagttgtgccgacttttctgtcaacccagcttagcctatccgggatcgatctctcgcattgttcgctccaaggcaggattccaccctggctgttctacaatctatctgattttgtcttgctcaatggcaatagaatggatgtcattgatatggatgggcttggtggtaacatacctcaccggtgcaggtgcttgatttgtcagagaacaaaatatcgatgtcgatcccgaccaactttggaagcatttttcagtttttggactactgtgacatgtcctccaacaggttgtacggtgggattccatcattggcagaggcaacatcattggaggtgcttgacttgtcatctaacaacctcaatgaggaaatattgccaacattaatagggaatttgtcaattctaacatctcttctactctccaataatgacctgacagggcctatgccacctttccattggaatttgggtagtttgaagcacctcagccttgagaacaaccgattctcgggatggctatctccattgctgtcgaacagcagtaatctcaagacactcaatgtgagaaacaaccatctatcaggaatcatcccggatggcctcctgagcttccaacagcttggtgtgatcctccttggagggaatgattttcatggtccaataccattggacctttgcttcaacaactatctccactttgttgatctctccaacaatcaattctctggggagataccaaattgcttctacaatgatttctggacagatttgccaatgtacttcaacgatgacccattctcaggcaatatcacagagcgcatgtctgtcgacttcacgacgaaaggcgagaaccttacctacatgggagagcctctagtgctcatgacgggcattgatctgtccatgaatcaattgtcaggcgccatccctccgccattaggtttcctgaggcagctcaagtctctaaacttatcacataaccaacttgttggcccgataccagagacattcatgtatatgcaggatatggagagccttgacctctcatacaaccacctcaatggcagcctgcctatgcagctggcaaatctctccttcctgtgctcgttcaatgtcgcctacaacaacctctctggtgagatacccttccaacaacagcttgggacattcgatgaatcggcattcgaggggaatgacaatctctgtggtgaaatcatcaacaaaaactgctcatcagtgctgcatcagaatcaaggagtgttcgacgccattgacacgtcacttgttttctggtcctacgtttttgggtgttttgcacttggattttggggcaccgtggcattgctgatatgggatgaagtgtgcaggaggagactgtgtgacttgatggatgctctaatgtttaagctgggttgggaatttgtgccttgaatcctgatatgtctagctaagagtctaggagacatggaaagacagagcaatcccttctttttttttgcacgagatgcacatgctgtcacatcctgattttcgtttcaggatttataaattatttaataaattaataatagaatttatattaaatgttctttaatttacaagtgaagttaaatgtgggaaataaaatttcttaaatctaaagcatggatggatttaatttttttattaaattctccatgattaagtcaactctctgaaattttctcggatttttcagagctcaattcctaaatgatacaaagaacagttcagtaattatttgatcattaatgatctaattataattgttaagagcttttcttgtttaaaaatccttaaattataaattgttgtttaaaaggaattattagcaatgattttaaaagcctaaaagagaagatctaattttaatttgttaaatctcaatataaaattgggctagataaaattttgttaaatacttttcttaattctataattcctagatttttttgggatttatttgagctaaggaagtatttttaataaatggaattgcatttaagaaataatttaaattgaaaaaggtttttaaaagtcttcttttggctttgggccgaaagtcggcccaaaacccttttctctccctcctcggcccagccggcctagtccgcagccgcgcgcgcgcgttcggtcactgacaggtggggcccgcttgtcggatccatcgtcttcgtcaagccgccgccgcccgaaaccctagccgagccgcgccgccgccgctttccaatttcggccgcgtctttcccgatccagtgaaatcttttgaggggaaacgatcttctcgatctcctcttccttttctcttatggaatcatcgcctaattcggtttggaaactcgtggattcgaggtcgaatcggatcggtttctttcctccgaaccctaacctttccttcccatctccggtcgccgtgggcctccgtcgcagctcgctagcccctttaaaaggatccccggtgtctcctctacccgccgccaccctcgccttcgtctctcgccgtcggaagcgccctagcgccgtctaacctcgagccgccgtcgtcgccgtcgctccagccgtgcgccgccgccgttccggtcgtcgtcgtcgctcggggaggtcgccatcgtggtcgccaagtcgccgccgtcctcgtccgcctcttcgtcgccgccgtagaccgccggagcaccgccgtcaccgtcgacccgaaaaccgccgccgtttcttcctcgtcgccggcgccatccgttgctcctccgctgttgctttggtcaccggtgagttcgccgcgtcgcgctctacccgttggtgccctccgtttgcgtcctcgcgccgtcgttcgccggcgagcttgcgctcccgagccgccgccggtgctgacgtcatcgctgacgtcgttgctgacgtcatcgttgccgttccccgtggcccggtcgtggaccaatcgatctcgaccgtccgttttggatagggttgatctcggccgttcgtttccgtgaaccgctgccgtgcacccggttcaccgcaaaccttagccgctgacgcaataatcctcttttccttttcaaaaataattcattattgcgtcataattcaattaaaatccatataagtgttttaatccgatttaatctttgaaaattcataactaattcatttgaactcagtttaatgtggttcaagttgcaaaaattatataaaataaagatctacatattaaaattgtccataaattgaattaaatttatttaattctttttaaatgggctttaattagatttaatcttgtaaaattcatattaaattcatattaagtcagaatgaggccgttcaagtctcataattcatctaaaattatgatctacatgtttgtttactttttatgtattgtttatttggtttttattagtctttttcctcgttttgcgtgttagcttgtcgtttccgtcgttgcgaagggtcgcgagtgcgccggaagtattcaagaagattaattgaagaccgattattgcaaggcaagtcacacagatcctaaacacaatcctttgagcatgttgatcctatatttaaattctctatttatttcaactgtgcatttatttttgaatgtcaccgggtggtgtgaacctattcctttgttatggcctgtttgcattgattactctattccttgataccttgggatattataacttgactagttgacctttatatattggttcagctagatattagatatgattgcttagccatgcttagaaacattagcacattattgggataacttatgactcattattatttaatgatggtttaaagatagttcacgatggtcaatcgtgattggtcaattaattacttgcaaactaaaacttgataatggtgggttgtgagcacatggttttgagagtcgtgctcatggcaattaaggaccggttcgcgagctactgttgtgaaacattaaccgtgccaaccacaagccagcgtgggaaacggctttaccttttgtataacatgattcattgcggagcaccagactgagaagtggcggagataagcccacgggggtcgctggggagtccatgcctctggtttttgaggggtgattatgatccaggaatggtgcactgtggtgagttgtgttgtgcagagggtattgtcacagcctctattcgggtactttccagtatcgcgacgcatggtagacatgatgttgaggctgtgtcttgtgggtacagtggtacacctctggccagagtaaaactattcgaatagccgtgcccgcggttatgggcgggttgagcaatgtttttcgtgattagtcccacacctcccataataattatggatgttatacctggtaataatttgcttagctcctggtttggagttagatctgttcagccgggtatggtgttcagaatggttgggcctgtgcagcatgggtgtgctgttcagtgttgattaaaatttctgattaattactccactgttttacttctcttaaatgttttgctaaatgctgcttttgcaaatgagcctatattatgccatcctttggtatccttgtgcacttgcatatttgttgtgtggcttgctgagtatgtcatatgctcaccttgcaataatcaatcaacctcagttgaagaaaaaggatccagaaggagaagacgtttggcttataccccagttgagctgcctgtgggagtggagccggagcttcgctagattttattttccgctgcagttttcttcttgttgaggactaagtgcctcataagtaagtatttatcgttttagttaatttgatgaatctgtatattaaattgtcagtttgtgtacctcggctgattcttggacgaggattttatacacaaataagttcggaaattacttgtgaatttccgggcgtgacacatgccttgcataatgcattgacagacaaggagaaaaccagagttcatagtgagaaaggcccaaaacttattggaattgtaagtgaaatacttgtctaaggacaagaatttcctttctcctatgaaatacaagacccaaagttctaaggtgcagctctattttgggggtcaatagaggctattatcacccttgtaaatttgagattttgaggtgcagagctactttgggttaatagaggctattatcacccctgtaaatttgagattttgaggtatagttctacatgtaactatgtaattattaacttatagttgtgctagaataatctgcactagtttggccaactcttcctgttttgaccttcaagttcaaagcttaattttgcgatgtgcttaggggtggatatcaatcgagctagctggcttggctcgttatcttaacgagctagaagcatggcgcactcggcttggcttgtttgtcagctcgagctggctcattaagctcgtgaagcaacacttaaaatcaatatcatctcaagtttacaaattagtaacatataaattagcaaatgcattattaattccatactttatataatcaaccaaagcatagcaagatcagtcaaaatgttgatacctatgattgagtggagctgcacaagaagatgagtggatggaggggatgagttgtgttgaaacttaaagaatgccacataccatgggtgaggataataagcactgggttggagttttagggttcgagatgggcttgggttgctagcccgctgcttgctggtttgtttggcttgcgagtagcatacgagccagttcgagctagctcattatatctaataagctaaaagcttatctcaactcgttaacaaattgaaataagttgagctgagccaatcacaagctgagaaagatagatatgcttgtagcaactgctcttaattaccaatttttaagtttcaaggtgtagttttatgatattaattgatgctttgccgctataagtagcccccttttcaatttctattcatgctcaggctgcctgagattcttttgatcttggctagaaattgggcagggaccacacttaatttgtttgaaatttctgaaattaggtagtcttcccttgatattttatcagtttcatgtgtattcattctgttcaagagtgtcactctgttcaaagttatatcttgtgtggaaaaattctgtaccatcatcaattctgatgaactgatcgatggcctcaccttgtctagttagtcctggtttcatgagcagattaatctgtgtacacggtgcctaggaaattacaagtccaaaatacttttatacttgtatgtagagttctaatatgtacactacataggaatactatcagaagggcttaagtaacaatttaaagaaacatggacttataatataatactagtacagaaacgtctaaattacatgttcatctcaaaagtggtctattaattaaccccccccccccccccccccaaaaatcgggttcttcttagagggacaaaactagtggggtggtataaaggctactcactgcagaaaggactcaacagagaacattttgctagaatctatggcaatctcagagaggatttgctgcagtgagtgcctatgtgagtgggaactaaagcagttacatctttgcaagctggtagtacaatcatgaacagtgacagcagagaaccactaattcaccttctattttctatattgatttttggttttgccttcctgcacttgggtttgttatgcttttattggaatccagagttgatggctccttacatatttatcttcactaatctaaataacttagcatgttaattcactacaatgaagaatcctgatcatacatctagatggatgaagggcgcccttaactaatcctttatctagggctgcagttgccctaaaattaatgctgcaacccaattagcatcataaaagagatcatcatatattccctatatgtcgtcaagatcagggtttacaattctgacgaaaaccggtcgaattccgcgaaatttcgagaatgtatatatatatatatatatatgtatgtatgtatgtatgtatgtatgtatgttttgatgattctaattgcatgctcactcttgttggattggttacattgatatattctagggttgtcagatgtggtctgtcacgtcctgataaatccatcccgaattaaaaatcattcgctaaaaggaataatagaattaattaaaatgcgaaaagaaattggcaaacgctaaaaatacgtacaagaaaaattcaaatgtggcccggagaatttttgttaaattctccttggtctaaaaaggagccctcaaattttacttgaattttcagagcaccggaaatatttattaaacaacaacaacaattaacaaagtttattaaaaagaaaaacctaaaaataatcctcttcctcctttgggccaagcccagcccaaagtctccctttcctccctctctttctctccctctccttctctccctcctcctcttgggcctctccccctctcggcccagctccctcctccctctctcccgggctgcctttttcccccccctcttccctcccggcctgctcggcccaggccgccttcccctcctctcttcctgggccggccgcccggcccaagccgccctgccctagccgcgccccgcccgtgcagcgcgcgtgcgcgcgctgacgccgccgcctgaccggtgggtcccacgcgccaggccgggcgtcgtccccttcctcccgaccggccgtcctctctccctctcccgtgaaccctagcgccaatcctccctcaaatccgcttgattcactcggttaattccaaaattgattagggggttttaatccccattgaatcctcttcaattcccccgttttccccccttgaatgccgcccccaatcgtcgggaacggccgcgccaagtccggccgccttcctttgccgccggccaccattcccgtcgccgttcccgcgcctcccgtggccggctccctcccccatcctataaaatgggatcctcatcccccgttctctcgttttagccccatcccgagcctccccgtggtccctagctccctccccaccgtcgccctttctctctccggtgccggccggcctccagccgcctttcccgcctcgccggagcgtcgtccggccgcgccgtcaccttctcca

SEQ ID NO: 25669 - DNA, 22742 bp, Oryza sativa
  unsure (1)..(22742): unsure at all n locations
cactcctcggtttcgccggaacgccatcgccgcgaacctctacatccgcctcgccggagttgttcggccgcctgtccctcctcgccgtgcaccggtcgaccacacctccaccacctccggcatcgcagcggcaaggtcgtcctcggcatcgtttcccctccatccaaacccctccgcggtccatcatcgtcgtctccgatcgttctcgtcgtcgacgtcccgtcggtcgcccggctcgtcgtctcgcggcgccgcctccgtcgtcggcatcgtagcggcgtggtcctcgtcgtcctcgtccccgtgcagccgctgccggctgtcctcgtcgcctcctcgccggtcccggtcgtcgtcgtcgtcgtcgtcgtcatcctctcgtcgttcccggtcgtcgtggcgttcgtccctccgtcaagccgttctcgttcgtcgtcctcgcttcgtcaagatcgctgcagccccgtcctcgtgttcgtcctcggttccgcgtcgtcaagcctcgtgccggccgcgtctcgccttcgcccaaggatcgccgccgaagccgtcccctcgccgttcgtctccgttgtgcccgtctgtctccgccgcgcccgttcgtcgttgtcgttcccacgcctcgtcgcgtggtggtaaggatccgtcctctcgctgccccgttctcgtcctttcggtgtcgcccgtgcccgttgtgcggttgacgaccccggtacccgtgtaccggtgtcggtagtcgttcacgcgcgcgggtggtgaccgtgtagtgtccgtgttagtgtgcccgctcggtagccgcgtggtttccacgtgtgcaacccgtgtggtgtctagtggagtccgtttgtcggccactcgcctcggttgacacacgggatccgcttccgtcgacccgtggaccgtctctgtgtactcggtctaccgtggtcctttaggttgacatgtggggtccgcatgtcaacagcgcagccttcctgtctcttccaggctagcgcttacacctgttttataattgcaaagcttaattataataatccgcaaatctccatataacagcattaaacttcggatgatcatatcctggtcatacgagctccgaatcgacccgttcaagtctcctaatgtttgttataacctaaagaaccctgtgctttctttttatgtattgttattgcttctttataggcttgtagctttgcttgtgtgcttcgcgtagcttctgtcgttccggaggttcccgaagcgtggttcgcggtcgtcgccgaaggttcggaaggccgttctctctgagcaaggcaagtcacatcatctttgaacatattgaatcccagtttgtaaaattatgttgatttaaattattgcattaccgctttatttaaattcccgcgttatcactgttttatttagccatgcctatttacctttgttatgaccttaatattgttattgctattatttccttgttcaccctagaataaataaaaccccaactagtgggtactctattcctggttccactagtatgaatttaggtagatgcttcgctgattaataggacaacattaggtggttttataactttagactttgggtattctcatatcatttggacaccatggaatggttggcttatgttggaattggacacacacctctcttcccctttcaaaacccctaaaacctgttttcggtggggtttgggtgcatgccagttgtgggaagtagcaccccggccactataaggattaagctcgggcctctgttgcaaagcactaccgtacttccacatgtctaatgggtaaggcttagtttgtggctcagtctagtcataaacaaaagtacacggattggagatggatgaagtcgggcgtcgatggacattctccagggcaaatgaaggctacacgagctgcggcccggtagtcgagatgtcatacggcggagggttggtgcccaatgctaggggctcagttctgcctgcctgtcccgggtatcccggccgtaggtaggattgggtcggtactcttgtctaaggctaggatgggttggaaactatgtcacgtcttccgtccggataccgtggtggtatgtggcacgtggcaacacgtgaggaagatgtgtcttgtgggtaaagatgtacacctctgatcagagtaaatctattcgaatagccgagccctcggatatgggcaagccgagcaatgtacccaagtcagtgttctaattcttaaaatttgctcaacaactaaaatgtggaatggttggcctgggttggcttgggacgagctggaacccaggtcgggttgccagttcggtccgaatcatcgtaggccttgggttaaggcaggttcgtgagggttcacggccttgattaataatattgtatagctctaggatcgtctttacaaaatagctttgggcaactaagtgacttttaaatgctgtttactgcaaaacttaatccctatattattattcccttgtactcccttgcatttattctgcatttgtgggtgtgtcttgttgagtacggtggttgtactcagtcttgctcaatttttcccaagtccagaagaggagctccttgaagatgaaggctttggtgtctagctcgtgcctgccgtcaagcgcctgtggtcgtcgccctagtcttccgctgtttttcgttgtctttgagtgtgctgggccttcgttgcccatgtaataattttatttacgcttccgcttgataaactctgaattgtatcaacttttggtgtaccttgcctcctgggacaaggaataatacacgcacgtcaggaacgcctgttgggtgatttccggtcgtgacatggtcagcgtgaaagagaaccaaatccaccaaatgcataccagtcgaagctgggattttcttggaatggactacaggcaaccaaatggcctgcttgctaaagctaaatatggggatggcactataattggtgtcattgacacaggtaattatttgggaaggcaattaattagtagtaccttatttgaaaaggcaattgataattatttcctgcatggttatatagccgttccaatttcattgttttgttgattatatataccacgcgaattgaaaaaatatagagtgtttgtttggttatccgcaccactctaaccaatgtaggagtcaatcgaccatttcggcggcctgggtaggtacaaatggggttatttcattggttagattggttggtcctagatatggtgagatatcgtttggatgagtgtatgagaagcttctgtacatataagaggttttgtttgattggcttataagtattgagttcagccatacaatatactgctagtatatactgcaagtatatatgatctaacggtgtagattgatttaattttttatttaattagattgcagtataaactttgaaagggtaattttatcttttcttcgttattctatcatcaaatcgtgctatcgtcatgtgccttgtcatcaaatggcgctcaggatgctcctcccctaatgcacgataagatccaggaacgggtactctcaattagattcaatttgaaccaaaaattactaaagtgttgttttaattttctatcaaattcctaatatatatgcccttttatatactgccagtatatactggttattgtaccgtaaaaattctctatttttaagggtggcaacaataattgtaacgtcccgccttcccccaggctgggctcgcttacatctgatagctttcataggtcaattagattcaatttgaaccaaaaattactaaagtgttgttttaattttctatcaaattcctaatatatatgcccttttatatactgccagtatatactggttattgtaccgtaaaaattctctatttttaatggttattgtaccgtaaaaattctctatttttaagggtggcaacaataattgtaacgtcccgccttccgggcaggcctatttttaagggtggcaacaataattgtaacgtcccgccttcccccaggccgggctcgcttacatctgatagctttcataggtcatagactgccctcacagaccaacacatgtcttttctacacactttgtcctcactcgtatgcacccgggaagaattttccggtcggtcacccatcccaaattgctcacatgtcttttctacacactttgtcctcactcgtatgcacccgggaagaattttccggtcggtcacccatcccaaattgctccaggccaagcacgcttaaccctgaagttctttggagattggcttccggaaaagaagttgcaatttgttgatatgagtattctattaatcctattaagccctaggccaggatgttacaataatcttagttcaagataatttagggtgaggaggcagatttataactcatggagataataataaaatataagtctcagattcagcctattaactttttaataaaatttatccaatgcttaacaagttgcttggtgaattagtgaaacaaaccggttggatggtagagttgtctgttcatgactaggatttttagtacacacgtatttatgcaaacacaaatatttcttggtaaaaaataaatttaatttatccccaactgctgctagtttatactccgtccattgcacattataatacgtttggccactccattctagattcactaacatctatataaatttggatacatatataaagcagttatatgaatctattaaaaaaacccaaaacatcttataatatgaaacatagaatgtatttgcaagtctatgtcgctaggacacatctgccgtccataggatttctacagaagagagagtcgtgctaaagtatatataattaaattctacgcactccactactacaaaaatcgtttttctgtacgagggggtcggtaggttccatgcgggccgcttgtggcggcgcctgcaaaaaccgccccccccggggcgggttgattagccgcatgcgatgatccgccatatatgctcctccaggcccgagcttgaccatttgaaaacgaagctttctctctctaaagcaagcaccaattagggggggaggttttcaactcgaaatttttacttgaactctatacgaaaggtgaagaactctctatcttgcttcatttggctccatttttgttatatttcgttggtggaaagtggagtttttttaatattttgacaaggtttgttccaactattttttgcaaaatctagcttcaaaatatatgttttgatgggcaaattttgcatgtaatcaattgtacatactagttacatgtattgttgtattttttttgggagacaaatgcatttaaacttttgtatgaaatacctgcggtctatttttttatctgtaacttttttgcctttatataattagatggatcggtcgtcatggatgtatgagatgcggagaacgcagccgatatttattaaggaagcatctaaatttattgatcaggctaaggagcatgctttgagggagaatatgacaaagatcttttgtccgtgccgtcattgcaagaatcagaaattgttggtagatcctggtgaaatattgggtcacataatggagtacggattcaccgccaactacaaggtttggacctatcacggggaattcgccaatccggaagatgacgatgaagagttaagtttcgagatgaatgaggcagagaattttataatcgaagacatgtcgcgtgaaagaatgattgtcgatgtttccaccgatagtgatgatttcgatggtggttttgatttagaggatatgctacgccatgttgaaccagaggtgctagcgggcaggtcacgaggattggagaattggcaagcattagagaaggcatcgaaggatcttctttacgatgaaacgaagggatgtgataaggatttcacagtcttgcgttcagtgcttgaacttctgagattgaaggctaaacatggatggtcggacacaagttttaatgatctgatgagtttgttgcgtgtgttgcttcctaagcctaactttgtaccatcgaacacgtatcaagcgaagaaactcatatgtcctttatctcttggtgtagaaaagattcatgcttgtaagaatcactgcatattataccgtaaagaatatgcggaattggaatgttgcccaacgtgtggcacaagtcggtataaaacggggaatgggcccgtagattcagagtgtaccgatccagattctgataagggtaagcgcgggaagattccttcaatggtgatgtggtacctaccaattaaggaccgcctgaagcgtctgtactcaaacccgactgatgctgagttgatgagatggcatcaagagagccggaaaatagatggtatgattcgacatcccgccgacgctcgccagtggaagacatttgatgcaaaacacccagaatttgctaaggatcctaggaatgtaaggtttgcgttgagcactgatggaatgaacccgtttggtgacttaagcagctcgcacagcacatggccagtccttctcacaatgtataatcttccaacatggatatgtcagaaacgaaagtacattctactcactatcctcatacaaggtccaaaccaacctggaatcgacatagatgttttccttgagcctttgatggaggacatggaggagctttggaaagaggggttacgactatgggatgagtttaagcgggagcacttcaatctacgtgcaatcatattcgttaccatcaatgacctacctgcaaacttttcattatctgggcagattaaagggaagactggatgtctgatatgtctggagaaaacttcatacaaatacctgacgtcgtctttgaagacagtgtacatgcgacatcgacggttcctaccacaaagacataggtaccgtaagatggctagattgttcgataatacagtggagaatgacactgccccagtagcaagaggtggtacatacgtgtatgagataacaaagaagattaaggttgtatatggaaagggaaagaagaagacagtaaagaggaagaaagctgatggtgacaacggtactgcgtcgcctttcaagaagcactcaattttctttaaatacttagattactggaaggacctagagattcgacatgcaattgatgttatgcacctcgagaagaacgtgtttgatagcaccgttggcacattgctggacatcccgagtaaaacgaaggatggattgaagtcacgtaacgaccttgtagatttgtccatacggcatgaccttcacccagtactgctgccaaatgggaagaccgagattcctcctgcttgttactcgttgacacttgatgagaaaaaagccttctgtaaatgtttacaaggggttagagtgcctactggtttcgcatcgaacatcaggaagctagtatcaataaaggatttgtccatttcgggatacaatgcgcatgactgtcataggttgctaacagtgttcctaccaattgctataagggcagtcaaaccagtccatacaaaggtggttataacaaagttgtgctactttttcaatcgaatttcgcaaaaagtatttgatcctttggaattaggtccgcttcagacatttgccgtcgagactgtatgccagcttgagatgtatttcccaccatcatttttagatatgatggagcatttgatcgttcacatcgtccctcagattattgaacttggtccattatacttacatcagatgtgggcctatgagcgttacatgtcgatcctcaaaggctatgtacacaatcgcgctcacccggaaggatcaatgatagagggatacacaactgaagaggcagtcgagtgttgtatggactacataaaggatgctaatgccattggcattcctgttcatcgacatgaaggtagattgtctggaaggggtactgttggtaggaagcagttcttcgataatgattacaaaaaggtgtccgcggcacacaacagcgttcttcaacagctcgctatcgttgagccattcattgagcgacacctagaagaaatcaaagcctgcttcccagggcggtccaatgattggatatcaagagagcacaagcgtcgctttcctctgtggttgaaagatctaaacctgccagttggtgattctgtggaggaacttactttacaaagattggcatgtgggccttcaagtattgtcaattcatggcaaggttacgacatcaatggatttaccttgagtacgactacgaaggacatgaaaagcacatcacaaaacagtgggatccgtgtcgaagcgattgacacgagtggagaaaagaggtcgtattatgggaccattcaagaaatatgggaactggactatggcctaaacatccagatccctgtgctccgttgtgaatgggttaaagacacaataggggtttccgttgatgactacgggctaacgatagtcgatcacagtaaaacaggccacaaggatgatccatgggttttagcagagcgtgtggctcaggtgttttatgtgaaggacccttcagatgaaagaaaaactattgtcatatccggaaagcaacagatcgtcggcatcgacaacatcgaagaccccaatgattacaaccagttcgacgatgtaccattgtttactgatcttcctatgcgaattaagaaggttgagagaacaatcgatgaagcaaatatgtcgtacgttcgagcagatggtgttgccaaggttattaagtcatagttatttcgtaacctttagttctcattgtattccaaatgtacgtgcatgaatttaggtcccccttatgttgtaatcattagcaaatgtacgtgcatgaatttaggtcccccttatgttgtaatcattagcatgtaacatttgattacgagttttgagcaattttcatgagttttcttagtgccaaaaacatttggaatgtataattgtggcgaaatattgggaaaaaaatatatatggacagtttacttatagagaaaaaaaaatatgagttttttttggtaaaaagatctttctatgcggctggcttaacagcccgcatggaaagatctttttcgcatgcggccggcttaacagcccgcatggaaagatctttttcgcatgcggccggcttaacagcccgcatggaaagatctttttcgcatgcggccggcttatgtcgaccgcatggaaagatatttttccatgcggtcccttaagccgcccgcatgcgatgatctgcgcctatatatagggagcgcggggagccaaaattttctaagtcccggctcccgcgaaaccctagccgcaggctgccaaaatttcccaagtcgccatcgccgtcgtccccgccaccgccggctcctccccaaagtcgccccgccccacgccgccgccgacgccgccgtcaggacctctcccccctcgccgttgccgtcgccgccgccaggacctctcccccctcgccgtcgccgtcgctgccgccaggacctctcccccctcgccgtcgccgtcgccgccggcaggtcgccgtcgccactgcacggaactctcccccctcgccgttgccatccccgcccgccaggtcgttcccgccgccaagtcgtccccgctaccgccggctccttcccgaagtcgccccgcccctcgccgtcgccgacgccactgccaggacctctcccccctcgccgtcgccgtcgccgccgcacggacctctcccccctcgccgttgccatcgccgccgccaggtcgtcgccgccgccaggtcgtccccgccgtcgctcggtaacatttacttttaaaaaaagaaatgtgaaatgtgcaattgtggattgtggattgtttaattgtgcatcgtggattgtgatatgtgcaattgtggattgtataattttgagaatgtttaattgtggattgttaaatggagatttatgtttaaattgggacttatgtttaaattgggacttatgttaaattgggatttatgtataattgggactttgttaaattgagatttatgtataatttggacttttgttaaattggcagctatgttaaaatgtgacttatgtttaagttgagacttatgttatattgggatttatgtataattgtgatttttgttaaactgagatttatgtataattgtgacttatgttaaattggcacctatgtcaaatggagatttctgtttaattgtgacttatgctaaaatgggacctatgttaatttgagatttatgtataattgggacttatgttaaattgagatttatgtataattcggacttatgttaaattgggacttatgtcaaattgagacttatgtgaaattgcgttaaattgggacttacgtaaaattgggacttatgtcaaatttttttacgtcaagttggaagatgtcgaacgaaaaggttccatcgaacgcaccaatagcgcctcaagaaggtaacgctcctcaaaattccggtagcaataagcatccaggcgcttctagtgaagaaacgtggcgcacaccaagtgacccgtttccaatggaaataacacaagtcgccccccgcgatgatgatccggactacatacctatcgaacaggccgtaagtgatgaaaatcgttagccatgtattattccctaaatatgatgtgacatgaacctaatggtgtatagagttacctattctgtgcagatggtagtccgacgccgctcgaaacgtaaagccgggaggaacaggacagagcaagaagttgagatggacaccgctacgtctgcacctgaacgtacggagacatctacaagtgcaggcgggagtgggaaaaaaagacgtggtgagagaagcaagaataaattacccaaggaaacttacaacgtgattgctctcgatcaggatgggaagcccatcgagccaccgatagtgcggtccaagttcagcaacgcctgtggcactctagtcaggacgcgttgtcccattaatgtcaagttgtgggaaacagtggacgacaacatcaagacacttctctggaatgagttgcagaagtattttgtgttccctcctggatcagaggttagggggagagattacgcacttaaaaagatgggagatcgatggcgacagtggaagtccgatctaaatcgggattatgttcagaagaatctcccaccgtttacggattatggacatatatcgcaggctgactgggacacgtttgttgcggatcgtacaacagctgaagcattggctttgaggaaaaaaatgtccgagctcgcgaagaagaacaaatatccccatagattggggtcgagcggatacgctggtcacgtcgatcaatggcgggagatcgagcaaagatttgccgcggccggtaagcccctgctggtagaccccatggttgaacgtagcaagaactgggtttgggcgcgcagcacaggtcaagtctcggatgagggagacatactattcgagactccagacatagaagaagtgactactaatttgcagcagatagtcgagaaagaaagatcaggacagttcgtcccacggagggagagagatcagcttactgcggcgttggggacggctgaacactctggacgtgtaaggggtttgtcctcaaagacaagttggaaggtcgggtttccacaagacgcaccaagttataagaagagagacaaatacaaagaacaactatcggacaagatctatgcgcaagtgaaggaacacttctactcgttggcagctgaaaacccgacagcatttccaaggttattccctgatagccagcaacccacacaatccgcacagcaaacaactaatgtacccagcagtgtaggctcagtgcagacaagtaccttccctgtggatagtataactggaccaactccgtgcagtctcgtcgtaccaatcggccgcgctggaaagactaaggaggttgcaacgggtttagcgatacccggacgtcaattccacaacacggcaatccctgaggattacgcaagggtacaggtcgccaaggtccatagcgaccacgtttccttggaactagacatacctgcacctgaggggattgaacttctcggtgatgcagtgaatcagtttatcttgtggcaccgcagagacataatcctgagcgcggccgttcttgcagcaggatcttcaaccccatcctcatcgcaggcaatgactgctgccgctcctgcaccaccgtcgcctcctgaaccaccgtcacctcgacatccgccgtcaccaccaccgcttaggtcaccggctcgccaacctacaccaccaccctccccttctcaacaaccgcctctcccgaccccgcaaccagttcaagcctctcccacctccccaactaaacagcatgctcccccggctccgccctcagttcaaacctctccacctacaccccaatctgctctggtagaagaagtgcacataccagatggtactacatccgaaccaaagtctaatactttggaacctcgtcgtataattccaaagttgatatcgacatacgacccaaaggagattgacaaggataaggagaagttcatgttttcagctttcaggaattctgagaagagaaaagaacttgctcacgtcttgtcagactcccagaagtcagtactagcggcccaagatgaagtgcaatcctggttatctgccgatgtgcctgaaacttatgagtatggcaagccattcttgccaacttatcttatgaacaagctaccatgggaaatgagggtaatgcacgaatggtatatgaaggcatctaggaaaggtctcggtttcataagcgtcgccgtcccggaaggcgctttcatgagtggtcctaatgggatattttttatctctttccaagacctttacgccctctacaagctagataaaatggacgttaatctcgttgcggctttctgtctgtaagtctaaactctttattacatgttgcacgtttcattcgaaacaactaaaccaaatctcatttcttctttattcattgtacagtatgcaattccacgaagctgatagaactggagcaaaggttggatacgtcgatccaacaagaatatgcaaaacacaacacaccatagagctgagacaggactgcgagcaattggttggcaagaccccggaagaaaaggaagaatatgtgaagacattgcacaagaggaagaagctagaagtagcaacatacttggcaatagcaatgttggcgcacgccgacaaagatgtcttaatggtcccctaccagttcacgtaagctctctcttctttttgtttaattaatttatcttcttcggaattttctgtctccaataagcctatcttatatgtagagaccactacatattattccttgtatatccgaaagaccaattgatcatatcattggaccccgcacactatgacaaggagacatttatggaattcctcactattttgaatttgtaagtgataaacatttcattactataaattgtttaggtcgatcaccagtcttctaactactaataaaacaattgtttccttcaaacagagcacacaagtactaccgcaaaagaggtggaccagtacatattccatcccagaagaagttatccgtcaggactggctggccggtactatcaaatttataccaatacaactaattatcgaatagtacatatatactaaatatatctactgagatcggtccccataattatatcgcagtgctacaaacaaccaccaggaaccaacttgtgtggttattacgtgtgcgagatgctcagagtaaatgggaggtacaaaacaaccagtaaccgagtaggtcatcgaactcttctctacaaagaaacccatctcgcacacacttctcactgagtaccgttttattttcctttctgtgtgcagatccccgaaatcccatatattgcacaacgattcaaccacactactatcttgaacgtggccgctgacctctgccgattcatccgtcgcgatgtctgcaacgcaagaggtctcttctacgacaaccagagtgaactcgcaatggacgacaaatttaaacctctcagagagtgggagaaagaacatatgcaataacatgtacactacttatacatatgatgaaaaaactgtgccacttgtattatatatttgtatgtaaattacaattgaattaatggttatgtattacatgtttgttactgcggcacttgtcttatcttatatgcttactactccgaaatacgataataaatccctcaataatttaatattaattacgaatcaccaaaatgctagaataaatattattttagctattcggaaattgaatttcgcatgcggtctacttaagacggccgcatgcgcaaatggtgatctttgcagaccatttcgcgcatgcgggccggccaaccgcatgtgaagatcgattccgcccgtatgaaaaacgctttctgtagtagtgctctatcatcaccttaattaattgtacttttgaatgaaatagtcggtacatgcaacttgataactgtgatttatcaaataatatttagaattttaattaatttgctattttcttataggtgtcacgcctgagtcagcaagctttgccgatactggatatgaccccccgccaaaaaaatggaaagggatttgccaggttggcccatcgtttgaggccataagttgcaaccggaagtttatcggtgcacggtggtacatcgatgacgagattctaagtagcatatccgataacgaggttctttctcctagggatgtcgaaggccacggcacgcacacagcctcaacggctggcggcaacatcatccacaatgttagctttctggggctagctgcagggacagttcggggtggagcgccccgtgcacgattagccatatacaaggcctgttggtccggttatggctgctccggtgccaccgtgttgaaagccatggacgacgctgtctatgatggtgttgatgtcttatcactttctataggtggtacaaaagaagatgtgggaaccctacatgtcgtcgctaatggtatctcggttgtctacgctggtggaaacgatggtcccattgctcagacggtggagaaccaatcaccatggctagtaacggtcgctgcaaccaccattgatcggtccttgcctgtggttatcaccttgggaaacggcgaaaagttggtggtatgtttgtattaattagataaataatatatatgtgtccgacgatataatgccagctgtttgcaatttgtttatcgatcatgcattaatttgattatctccatctcatctctgacgacacttcgcaggcgcaatcctttgtcctcctggaaactgcaagtcagttcagtgagatacagaagtacacagacgaggagtaagtgtagtagctaggaaatcaatactaattaccatatgattcaatacatatacatttttttcaattaagataatagaaaaattctggcctttacctagaagtaagctcaagtcaaattgttatttcgtacccctccgttttataatttcatattataagttgtttctaatcaaagttttataagtttataaccaaatttacaaaaattgatatagtaatattttaaatataaaacaaacatattattaaaatatattcaatgttaaatttaatgaaactaatttagagttgtagatgttgctaatttttttataaatttggtcaaacttaaagatgtttgaataagaaaaaaaagttaaacgacttataatacgaaatggaggtagcgagtagcacatatatatgtcataatttggatggcaagatattgctaagagcaaatcctattgcgaaatcttcatccataattgacaaagagctatgtaaccatcatctctatataaagacatgcgtacttcatcttatcgtttgtccttctcaagtagtaaactttagtggaatcagccatatacaaaataatactacctccgttttataaatagatgatgccgttgactttttctcacatgtttgaccattcgtcttatttaaaaaatttacgtaattataatttattttgttatgagttgttttatcactcatagtactttaagtgtgatttatatcttatacatttgcataaaatttttgaataagacgaatggcctaacatgtgagaaaaagttaacggcgttatctatttaaaaaacagagatagtatatcatatataaaaacatcatgtactagctaggtagtgtataaaatgatttgctgctgctgctgctgctgcagatgcaatgccaacaatattatgaacagcacggtgaaggggaaaatagccttctgcttcatgggagagatgttgaataataagcagcagacatcataccctgatgtcaccacggcagtggcagccaaaggaggcagagcagtcatcttgccgctgttctacaccgaaacaattctccaagatgatcccatcatcactgatttggatattccgtttttttatatctttttttttgcaattttatggaacttaaatggtattcatacacacaattatcaaggagttaaggattggtattgtcattttacagttttattttctttaaggtgggaattcctagatttttctaattagtgtataatttctctcttctaccttctagaaataaataaggtggtaacttaattttagaaggatctgcaactagtacaaataaataaagaaaggcaatttcctaatagatggagtactctatttcagatgcattaatttttttcttttgcaagaaaatttaattaacaatttcttcaatcaacaagaatgttttcacctgttttctcatcagacaatgttctgttaacataacacggcattctcccaaatttgcagccggacattgctgcaccaggggtttcgattttagccgctgctcagattccatattacaaaggtgtttcctaccatttcgattctggaacatctatggcttgcccccatgtagctgggatcattgcggtgctcaagtccattcatccaaaatggtcacctgcggctctcaaatccgcaatcatgacaacaggtaattaattatctcttttttttttataacaaaaggctttgtttggaacgtagagatttgcgattatatatatttcgttcaacaatcggctcacttgattgaccttattggatttaaagaactagccaacaacttgtgattctagtttttgtgctaatacttcattcaaatggaccatatcggccataactttctttttgcggggaaggggactttgattaatcaatacaggccagtaaattcagacttaatgtgctctatttcaaatggactttctgttggaattaatgaataggccttagcccactcgaagattaattctttggaaaatcacaaaaagcccacctcatgggatggcatgcatgtggagtttagtaccaccttgcttattctaggagagggggacctccttaaaagggaggatgccctcctagccacttgaagcatgtgtggtggagagaagagggaaaacacacgcgctcgcctcgcctcgcctggcctggcagggcaggtggcgcgcgtgcacgacgtacgcgtcgaatggtccgaaaaattggctcctcacccttgcgcagatgcagcctccttttgcagttttgttttgctgcaaattcggattcgtttttgttttggaaacgttccgaaaaatccggtgcgtgcaaacggcgtggagtccggataagttacgcgcgacttatccggttcggttacgcgcagtagagatcgtgcgggcgccctgatcaagcgacccttctctatataaaccgacccgccgtcttcacgtaggatatgcgaaaatcaatctaaggtttgcctcctactctgtactgcgccgtcgctcgtagactactccatcccgctcgctggcgtgcaccagcgatcgggagagcaggtctccggaacctctgcctttgacgtcctgcaccgggagaaggcggcaataaggtttttgggaagcgcttcgcgcgactgctccttgttcgttcgcgacggctcgccttcctcttcgctcgcgtgtttcgtgccttcgtagacacctgcgaaaagtttcgaccacgcagccggtcttttcgtcacctcggtacgtgttcaatatgttgcgcatatttgatctgttcatgttattctgcgtagtttacatgtgtagatctaatgatgcgttcatgctagttttcatctgtaatgtcatgatttatttatggaataaattaaatcattatatgcccataatctcaacaatccaaaaaccttattataggcactgtgattttactatggctgattttgccgatgcactgaggccggataaattcaccggtgtgcattttaagagatggcagatcagggtcactctgtggctgacagctatgaaatgcttctgggtgagtactggcaaacctgaaggagttcttactgctgaacagcagaagcaattcgaggaagccactactctatttgtgggatgcattcttagcgttcttggcgatcgtctggtcgaggtgtatatgcatatgaccgatgctaaggagttgtgggatgcactgaatactaaattcggtgctactgatgctagcaatgatctgtatatcatggagcagtttcatgactacaagatggctgacaaccgttctgtagtcgaacaggctcatgagatacaaaccatggctaagtaactcgaactccttaagtgtgtcttacccgacaaatttgtggctgggtgcattattgcgaaactacctccatcttggagaagtttcggtactgcactcaaacacaagagacaggaatactccgttgaggggttgatagcgtctcttgatgttgaggagaaagctcgggaaaaagatgccgcgtctaagggcgatggtgggcagtccagcgccaatgttgtgcacaaggcccagaacaagagtaaggggaaatacaaagctcagcagaccaccaacttcaagaagcagaagaagaacaacaacaatcctaatcaggatgagaggacttgctttgtgtgtggccaagttggtcatctggctaggaagtgtccacagcgcaaggggatgaaggcacctgcagggcagacttctaagtctgctaatgtgaccattggcaacactggagatggaagcgggtatggtaatttacctactgttttttcagttaatcaatctactaattggtgggttgatactggggccaatgtacatgtttatgctgacatctcattgttttcttcttatcaggtcgcacggggttccaccgtcctaatggggaatgggtcacatgcttctgttcatggtgttggcacggtagatctgaagtttacttcgggaaagatcgtgcagctgaagaacgtgcagcatgtcccttctatcgacaggaatcttgttagtggctcccgtctgactagagacggatttaagttggtttttgagtctaataaagtagtcgtgtctaaacatggatattttattggtaaaggttatgagtgcggaggcctgttccgcttttccctttctgatttctgcaataagtctgtgaaccatatttgtggcagtgtggatgatgaggctaatgtttggcattcacgtttatgtcatattaattttggcttgatgtctcggctttccagcatgtgtttaattcctaagttttccattgtcaaaggttctaagtgccatagttgtgtgcaatcgaagcaacctcgcaagcctcacaaggctgccgaggagagaaacttggcaccactagaactcctacattcagatctttgtgaaatgaatggggtgttgacgaagggtggaaaacgatatttcatgacattcattgatgatgctactagattttgctatgtgtacttgttgaaaaagaaagacgaggctctagactattttaaaatttataaggcagaagttgaaaatcaacttgacagaaagataaaaaggcttaggtctgatcgtggtggagagtttttctcgaacgagtttgacttattctgtgaggaacatggcatcatacatgagaggacgcctccctattctcccgagtctaatgggattgctgaaaggaagaactgcacactgactgacttggtgaatgccatgttggacaccgcgggactgcctaaggcatggtggggggaggtattgttgacctcaaatcatgtgttaaacagagttcctaacagaaataaggacaaaacaccatatgagatatggattggtagaaaaccatcactttcttatttgcgcacatgggggtgcttggcgaaagtcaatgtaccaataacgaagaagcgcaaacttggacctaagactgtggactgtgtctttctgggatatgctcatcatagcattgcctatagatttttaatagttaaatccgaggtactggacatgcatgttggtataattatggagtctcgtgatgctaccttctttgagagctttttcccaatgaaggatacacatagtggttcgaaccaaccctctgaaataattcccagttcaatcataccaccagaacaaactgaacatacacatgaacttgtctctgaggaggatgtcagtgaagctcctcgaaggagtaagagacaaaggacggctaagtcttttggtgatgattttactgtgtacctcgtggatgacactcctaagtcaatttcagaagcatatgcatctcctgatgcagactactggaaggaggctgtccgtagtgaaatggattccattatcgctaacgggacttgggaggtgacagagcaaccctatgggtgtaaacctgtggggtgcaagtgggtgttcaagaagaagcttaggcctgacggtactattgaaaagtacaaggctcggcttgttgctaagggctatactcagaaagaaggcgaagatttctttgacacttactcacctgttgctagattgaccacaattcgtgtgctactttccctagcagcctcacatggtcttctcgttcatcaaatggacgttaagacagcttttcttaatggagagctggatgaggagatctatatggatcaacctgatgggtttgtagttgaaggtcaagaaggcaaagtgtgcaaattgttgaagtctttgtatggtctgaaacgagctcctaagcaatggcatgagaaatttgctanacattgacctctccaggctttggagtcaattatgcgtatccatgtgtgtattatcgccatggtgggggtcagggagttattttgtgcttgtatgttgacgacatactgatatttgggacaaaccttgaggtgataaatgaggttaaatcattcttgtctcaaaattttgatatgaaagatttgggagtagctgatgttatcttaaacattaagctaattagaggtgagaatgggattacactcttgcagtcccattatgtggaaaagatcttgaatcgctttggctacattgatagtaagccttttccaacaccttatgatcctagcttgttgcttcgcaagaacaagagaattgctaggaatcaactggaatactcccaaatcattggctcgttgatgtacctggctagtgcaactaggcctgatatctcctttgctgtgagcaagttgagccgatttacctctaatccgggagatgatcactggcgtgcgcttgagcgagtaatgcgctatctgaaaggtactgtggaattggggcttcactatactgggtatcctgcggtactggagggttatagtgattctaactggatctctgatgtggatgagatcaaagccactagtggatatgttttcacactgggtggtggtgctgtttcatggaggtcttgcaaacagacaattttgacgaggtcaaccatggaagcagagctaacggcactggatactgctactgttgaggcagaatggctgcgtgatctattaatggatctgcctgttgttgaaaaaccggtgccggctatccttatgaactgtgacaatcaaacggtaattgtcaaagtgaatagttctaaggataatatgaaatcgtctagacatgtgaaaagacgattgaagtctgtcaggaaattaagaaactccggagttataacgttggattacatccaaacagcgagaaacctggcagatcccttcacgaagggactatcacgaaatgtgatagacaatgcatcgaaggagatgggtttgagacccatgtgagttatactatggtggtaacccagtctatgtgatcggagatcccgtgaattagatcctggaaagaacaaaccattaataaactataggagagtaccaatatatataccctctccaagtgaagatgcatatactctcgtgagctgcaaggcaggttggctatgccttaatgagttatgttggctttaattagaaaagatgttatcctgcagagcattcttgaaagaactcacctttgtgagcttgactgttggtcgcagtctatgaagattttgggtgaatcttctaggaagcttactaaagacctaggagtatgacttatacgctccacccgaggggtagtctacagacggtctagtaccagataagactttgagtgaaacttgcttgcacaagacttacaattcaaggcgtagtccattgttcaagttgtgagtaagtgtagcttggagttctaggtggatgttcaaccttaattggtctccatcgaa

SEQ ID NO: 25670 - DNA, 8243 bp, Oryza sativa
cgtttttgttttggaaacgttccgaaaaatccggtgcgtgcaaacggcgtggagtccggataagttacgcgcgacttatccggttcggttacgcgcagtagagatcgtgcgggcgccctgatcaagcgacccttctctatataaaccgacccgccgtcttcacgcaggatatgcgaaaatcaatctagggtttgcctcctactctgtactgcgccgtcgctcgtagactactccatgccgctcgccggcgtgcaccagcgatcgggagagcaggtctccggaacctctgcctttgacgtcctgcaccgggagaaggcggcaataaggtttttgggaagcgcttcgcgcgactgctccctgttcgttcgcgatggctcgcctttctcttcgctcgcgtgtttcgtgccttcgtagacacctgcgaaaagtttcgaccaagcagcaggtcttttcgtcacctcggtacgtgttcaatatgttgcgcatatttgatctgttcatattattctgcgtagtttacatgtgtagatctaatgatgcgttcatgctagttttcatctgtaatatcatgatttatttatagaataaattaaatcattatatgcccataatctcaacactttcatcaccaagccagaaccctgatgcttgccccgaagcaaccagcatgcagatgccaacttaattatggctcactatgttttgttttctctgcacctttttcgttctaacagctagctagctaccctatgtccctatctatcgaatagtagcaccaatttgatcaagtactaagaaaagaaattccacacctgagcaagagataattaagatgttattatgatccaaaatgtgccaatattgttctataatatacttttgttttcggatgtcgacatagggtcatgcacatcatgaccaataattactgaccgatagcagtcggggaagatctacaggcaaattatccgtcaatttaacattctgacataaactagctttctttcatcgacaagcattctatgggcaaaacttaggcagcaatctatctattagcaacacgggatgaagattatgcttgggcgtgggtacgggtggatgtcgggacagctcggctcggtctagctcgttaggataacgagctagctcggcttagctcgttaggaagctagctccactagtacagatccttctatctgtgacgggctctaatatgcttagaaatagcgggccgtcacaaggaagtcatctcaatcgggccgaaaagtgcccgattgagatatagtcgtacagacatgttagatgggtataaaacttaagactgtcacggatgacatctatcagtgacgggccgtagtttaggtccgattgagataacattccatatctcaaataggcctaaagttgcgggtcatctgtgacgggcactaactttaggcccgattgagataacattccacatctcaaacaggcctcaagttgtggcacgtcacagatgaccatcatccgtgacgggccacaactttaggcccgattgagataacattacatatctcaaacgggtctcaagttatggcatgtcacggatgatggagtcacggatgaccattatccgtgacggaccacaacttgagacccgtttgagataacaactaggcccgtcacagatgactcatcagtgacgggctatatacttaatctttatcgggtattaactaaagcccgtcaccgatgactatttttctatttttcatatgaaatgtttatatttgtaagttgactatagcaaaataattaagtacagtataataattcattttatgagtcaaaataattttatggtagtaaatgatttcaaatggaaaaaatatcaacaacaaagttatataacttatcaagatttataacttttagtttggtcatgtttctatataacatttttttgaacagtttgaatttgaatttgaaaatatgacaacttcaaacaacattttcaaatactaaatgatttcaattgaaaaagtcattaacaacaaagttgaataactcatcaagatctaaaacttttatttttgttatttcttcatccgacgaaatgttagtaatattattaacaaattttacatatatgtgttatagtttataaaaccagataagagatatgtcaattttgtgaacagtgttactatcactttgtcgtatgaagaaatgaccacaataaaagttttagatcatgataagttattcaactttgttgttgatgactttttcagttgatatcatttagtatttgaaaatgttgtttgaagttgtcatattttcaaatttaaattcaaacggttcaaaaaatgttatatagaaaaatgaccaaaataaaagttatagatcttgatgagttatacaactttgttgttgatgactttttcagttgaagtcgttcactgatctaaaattctatttgaacttttcaaaatttgaatttcaaatttcaaattgtttaaatagagtcagatggataaatgaccaaaataaaaattttgcacctcgatgagttatacaactttggttttggtgacttttctatctgaaatcatttaataatcccaatttgacatcctggcctagggcttaataggattaatagaatactcataccaacaagttacaactacttttctggaagccaatctccaaagaactttgatgttatgactgaccgggaagcgtgggtgcacactaaaaaataaaatttatttattaatttcaggatgggtgactgaccggtaagcgtgggtgcacatgagtgagggcagggcattaactatagccatttctggattatccgcgtgggtgcacacgagtgagggcagggctagccaaaaaataaaatttatttatttctggattatacttatctgtgacgggcattaactggctagccaaaaaataaaatttatttatttctggattatactcatctgtgacgggcattaactatagctatttctggattatccgcgtgggtgcacacgagtgagggcagggctagccaaaaaaataaaatttatttatttctggattatactcatctatgacgggtattaactggctggccaaaaaataaaatttatttatttctggattatactcatttgtgacgggcattaattatagccatagttaatgtccgtcacagatgagtcatctgtctgtgacgggctatagttaatgcccgtcacagataagggtcatctatgacgggcgctagttgtggcccgattgagataggtcatccgtgacgggctatagttggactggtcgtctgggtcaaagctatcggtgacgggctttaattagggcccgattgagatagattcatccgtgacagccgtttacccgattgagataactcttcacatctgtgactactagcctgtgacggatgccgtgcccgattgagatggtgttttaccacccgattgagatgatggtatcccttctagtgcttgttatcctagcaagctatcggcacggctcgttgtctagctttaaccggctcgtttggctcgtgagccaatgaagtcatgaatagtactggcaataatctgcaactgattagcatttcaagtatagcagcatcatccaacaaatgaacatataagggatttgagcgacaatttacagacatgcaggatcatctgcatgaatcaatatatcatgcaaaatctcagaacaacaacaacaaccaaaaaagagaagcacacagtatcacaaactcacagtagctgccattctatatttccaatcacgatagagaaagcagtacataatatgctactggatctcattttcctcctccatggcggataaggacacgccggcgagcagcgtggacgtggtgcgcggtgcgccatggccttcggcgacgggatggccaagggcgtggcgctgtggggacgggcgacggcgccgcagcccatgggatggtggtgggctgctggcggcgctagggagattgagattgggcggcggcgtggtgataggaatggttaccatgggttatgggctagatcgcaaatgggcattgttaggcttcctctagactcctctgtgctgttgttatttcttggctcatttagctcgtgagcggctcatgagcccgcttgaccccctgctcagcacgctaacaattttcaacgagctgaatcgagccgaaccgaccatgaatcgagcgagctaatgagccacgagctttctatccacctccatgcgtgggagaatctggagagcaaagcgtagagaaacaaatgccctttcctgaacctgccgacacacgtatggcttcacttcttgctgccccactcaactcctctaccgtctcttcatgtgctatctgcctctaccacctccctcctgcttcggcgaaattttctaccagcaaaggtttgtttaaagatctgtgcactggtaagagtttatctgccgggaagcttaaatttagtggccaattggtctgtcgaaaatgtctttttctgttggcaaagaattttattgacatgttctttcccactcacttgtttcctattgagaaaagcctttactgacaggccgaatgacatcataaacacataacctttgccgacaattgagctgttggtgcatttaggtcatggtgcagtgatgtaatgaagtttccagtctaagtccaccaaacacacaagtatcttggacctccaaatttaactttttcctgttttctcttgttgctaatcccctggtggccactcgccaagaaaatatgttcatttgatgatgtatatattgagctaataacattctgaattctgatattttatatttcaaaactttttgcattacatatgacaacaacgggatgccaatacaagctaatggaagagttcaaaagattgctgatccttttgattatggagcagggtttgttaatccggtcatggcagctgatccaggccttatctacgacatcaccgcatctgattacctcaaattcttcaactgcatgggaggattaggctcaagggacaattgcaccacagcgaaaggatcacttactgacctgaacctcccatccattgccatccctaacctcaggacattccaagctatgacacgcactgtcaccaatgttggccaagttaatgccgtgtatagagcattcttccaagctccagctggtgtcgagatggccgtcgagccaccagtgctggtgttcaacaagaacagaagagtgcagagcttcagggtgaccttcaaggctacacgaaaggtgcagggtgactacaggtttgaaagcttggcgtggcatgatgaagcaagccactgggttcggatccccatcgccgttcgcatcgtgattgaggagatctactccaagatctcctaattaattggatattggatatatatgctagctactaatgatgctagttgatcaatggtcgaatggaataaatgaaggcgaattcatatgctccaatatatagcatgttatatgtgtttctggaatcttgctgcatcttattccaaatccaagtggcgtatatctgttaaaatttatggttgaataatatatctaatcttgtgttagatgtttgtgctgaataggggaattaccatgtgatcaaaggaatcattaaaacttgattattaatatgtacggaaataatccctgcaaaaaaaatatgtatgaaaataaataaaaaagggcatatatgtttcgatacattgtgttttctcattctgaattttagactttgattcgaggattagttttaaggattttcttagccactttcgtgatggctctttttttatgaccattaataagtaaacaatctatgtataaattaaatttattatttattaaaagtcaaactttgagaattcagagttgctttggattataatactccaatactgtgccagggttataatagcccatgtaggtaacccacagtccaaccaatgggacatctcctatttgccatggctcaatttggaggacaccacaatcaattgatcgaagggtccttaatcccttatttgttatgtcatcaagattgacagtctaccctaaagaggcagaaatctgcatgtgaattagtactaccacaggctgggagtactgttatttttgcccattttgttggaagcgaatgtatgtcctacaattacaggcttatcatgtgtgatgcctgccatgtgcaggcttatcatgtgcgatggttgccatgcttggatagattgtacctctctttggcatatatgggtggacctgatttaattatggacgtaactactacacagctagtggtagctgttttgtctaaaccagctaccactccatctataagaggcaccatccacctatacttcaaatacaattttctcttaaactactcatccgatctacgatccgattgcaccgttgtgttcgtaacaattaaatctttagaacaagatctcacatgattatattttgatgaaaaatcataaattacttttatgatatgtctaaattacttttagttttcactaagttacttcttagatatataaaagtaaatttagtaaaacctaaaagtaatttacatatattatagaagtaacttagaacaaaaccaaggtaactttggcatgtcatttgaagtaaatccattgtagagataaaaacatgactctatctataaattaaattaatcagtataaattatggaattaactaaaataataataaaagtaatcaccttagagcattatgaattttcaatgaaaaaaatgcattaattaaagttactttctttttttttgttataagttacttctattttatatgtaaattacttttaggctttactgaatttacttttatatgtctaagaagtaacttagtgaaatctaaaagtaatttagacatatcataaaagtaatctgtgatttttcatcaaaatataatcatgtgagatcttgttgtaaagatttaattattacgaacacaacggtgtaatcggattgtaaatcggatgagtaatttaagagaatttttttttgaagcatagatgatagaatatttcccctacttgctcaatggagtaagtactagcacgtgggtgtctctggttaagactaattggagaggcctctccaattagatttaccgtttaattatgttaccttccaactttactttttttttctctccacgttgttgccttccatcgaaggtccttacctacacaaggagaggtctctgcaagtttggattattaaaatactcatgtgcctccttttcttggagatttaattatggatattttttttaataatggaatttattttggcttttgtttcaaagaagcacataacaagatgagatgactgtaataaccaattattacagagattgcaagtgagatgactgtgaagtacataacaagaaaacttcttaaactaccagcctaaagacattcatccatagttggcaagaatatacataaccgttagtttatctcagcgacttgcaaattttatgtagtaattgtctttctcaaatcaggaaacaaaatcttcgaaataacagccgatcattagttatgctgattaaatttctctcacatcaccgctgatgagaaccccaacaaaagaaatatcagagagtaattagtcattctcccaaatcttgccaccgccataacaattgaaaccgatccagcgggacaacggcaccaagaatgccgcaccaatgggggacctctaatacaatgcctccaaggtcaataacatctaggagtccccatagttattccaaacatcgggaattaggtcttttcttttcccacatagagggtggaggcccatgctgctgccttcttaatttgtccatctgtcgtaaaatataacaactatcaatcaagattcatcccaaaatatatcaccttcttcattaacattctctttcccaaccaatcacaattcttcactattcaatttttccacctacctctacttctaaactaatcacaaccttccccatttaattctacctacttcattattattcatgtccaatcttaaagatgcttatattctaggacggaggtagtacctgatatggagggctagtactaggtagcatatctatgggccaataattaatatcttagtctggaattaggagtatactcctactttgcgatgacatttta

SEQ ID NO: 25671 - DNA, 6593 bp, Oryza sativa
ttctccagtagtgcaagttatagctatttgtattagagtttcgtgagaaacttgtgagaggagtgctattattgtactttgtaaatataaatagaagcaataaagttcaacatactttcaagggtacttcgatttgtgtttagtcaggacgggcggtcataccggcagcaccactatgcttagaccggcgacacaaaaagcggatagaccagcacaagacctacagtcaaactaatctccatcgaattcgagggtaacttttaattccgctaaaaagttttgttttttggtgttccaaccattcacccctctagtcagcttagttcttactgttcgatcctacaattgggagtgctaggactcctctcacctcaggcttgaggtagggtttggcgccagggtgcatgagggctcatagtccttatgcaagggtaaccgaaaaatcagactgtgacaagtcttatgtgttgggtgcggcacatagtgcgggcttcaaatgaatctattcgaacagccgtgctcgtggttaattgagcgcctggacttgtactattattgatttgcctcataagttctaatcttgcttacaataggattgggaggaaatgtgtgaccttgcccaacgtgcgggaaggtcggaatggtgggaaatgcttaaaaccgaatgatagggtaaaccggaccaagcgagacttggggaagatggatgaaacctctttgattaacaacaacttcaacttaacgttgtttttagttaaaactgctaagtcataagttcatgaactgaattatgaaatctagcttttatgcaaataagccgagccatccttgaacccatgtgtgcactaaatgcatcctggagtagtgacttactaagtacggttttttgggggggttaacccccctaccccttgcttacttaactcttttagtagaagatattggagtcgattcgcacgtttgctatgttgatgaggaggtgtcaaagacggttgagtagggacctaggttctccagtcgttgcatgtggaataagatggactgccgttgcttcgcttccgctacttcttttggtatttggtaatgtaattgaccatacttggtctatttgggtcccactcgggcaacccttgtattattgatgtattgtaaaacctttataacgatgtcagctatgtgatatgtaactttgccatgtgcataccatcaaccgatttagggaatggtactgtaaacacacgaggttttcggtgtacaaaactggggccgacacgctgtcgctccagctcatcgacgagacgctgccgctgcccactcctcctcggagccaccaccgacatccctcctcgtcgccgagacaccgctcccgcccctgttccttggagtcgctgctcctctgcttggagccgccaacgcgtgagagagagagagaggaggagggggagggggagggaaatgggtggaggaggagaggataaggatcggaggataaggatgggacttagatgtttagtttaggctgatccacaggcatgatttcataggcagctttgcaggcggaccacttaaatcctccgcctatgataatttatatattttcgtagacggatgtcttaagcagtccgtctgtgaagatttattttggcagacggatgatcatcccatccctcacttaggacaatggatgctgtcatttgggggtaaaatttcggtcttcctgtaaaatgacatgggtctcgtcaacgaaaatcatttttctagtagtggtgattggtcacttgcatgagttcctggtttgcatggtcgaaaacttttatcttatgctattgtagcctaccaccagttaccatataaatttctgcattcagttctgcggggtgccaaccctagtaatctatatctagtccattattgctttgcttcttccttttttatcttgatttggtggtccagaaatctggattatgtagatggagggctgctataattcttgcaacccgtgacaaatcattcaacaggtatgtgcgcgtcaacgttcacagcattaacaaagtagcgatttactgagatgtctaaactagaaacaaacctatgacaattcaacacgatgtagctaatctttccccagaaagctagtaaaagcattgtttttcatagcctggagaacattgaaattgatcgaccttgtgctgtgacgacgtcaatttgaaagattatacgacgacgtcaaatctccgaccgaaaacaggaggagaggggtaaatggatgatcgacctgcccgtcaaaaagttaatagttttctgggtcctgtcatatatattgctgaatgacacacacacatataaacaaaacctacatcagcaattgaggttgaggtagattcattaattaattactactactactacctaatacttaaaaaattcacttgcctttgatcacgttgctgtattataatcaggtagattcaacggagagtgacaggatttcttcaagttttgcgaagacaaccaaaaagttcaattgaacactgtacgacagatgtgatacatatgatcgatcgacgaatgaggcgatacgatggaagaaaattgtagtattcaattaaactctgtcgacgattgacaagttgagctgttagtagctagtaaataacccgcggcagataacaccgaaaacgtgcatggtttttcctggatctcttctatcgatggatgtataaatagctcctaccttggcaagctctaactatcatatcgcagttcatttcacaaacggtatatgaaaccatagttcatttcaatccttccatatggctcaagctggtgtacatagaggaggctgttgccgactcctctttcttcttgttactgctcttttgttgcgaagatcctgtgttgttggacagcaaagccaatccaagaaagtatactggttttattataagtgaaatgtacttttctgtaattttgaccccatatatattttttaaaaaatgccgtaacatcttgaaaaaaaggtaatttcattgaatcaatgttttccactggagttttctttattgcccattaagaagttatcggaggcactattagaactaggatggtaaaaatgtcaatttcatattataagtcgttttggatttcttatgtcaaattttttgaccaaatatagtaacatttatagcattaaattagtttttattaaatctaacattggatggtttttttttgttttatgttgaaaatattgttatacttttttgtttataaatttggtcaaaactaaataagtttgacttcaaaaaagttaataatatgaaatggaggtagtagtctatgtgcctctcggtatctaactataaaaatgctcccatatataccattgagtcaatatatagctaagacgtgtgctggtggtaactactactctctccatttttaatgtatgacgatgctaatttgttgagatatgtttgatcattcgtcgtatttaaaaaatatttaattattatttattttattgtgatttggtttataaatgttctttaagcatgatttaaatatttttatatttgcacaaaaaatttgaataggacaaatgatcaaacgttgataaaaaataaacatcgttatacattaataaaatggagttagtatatgtgtatggagaggtgtatgcatggctgattgacaaactatacaatatttgaagatttacattgtctaccttggggagagacgacacgatgatgctgatgtcgtcactggttcccaccatgacatgctcgcctctgttttgggaaggtaagaatgcacatcgttactctgtccatttacaaatattagtcgtactacctaacaacacatcgagagttggatcactatctgctcactgaaagtgtgatggatctaagtacaaattttatgtattgcaaaatgtgatatggaatgatattttttaaaaaaatatatatagtagtcaaaagtgacaatgtttgtttacgattaaaaatggagaaccttatatgcaaccgagcaaacgaacgttatgaaagatacaaatatgtccgtatattattaagaaaatacaaaatcaaaatgatgcccttgataatataaaaccttaaaatgaaagggtacacaaatacaacaactggtaggcaaagaaaggaaaacaacgttgctttaatggaaacatgcatggactctgaagtagcgggaataaaattagattgaaaagggcaaatgagtgcataattagtaaatttgtgtatatgcgtgtgcgttttcctgtgaggaagaaaaatagccacacaaatctttttagcaagtaatatgtgcagaagaactgcatgctaatgcgtctatatgttgattgacaaacaaactgtagagtaagatttgagatatcgtcactaacaatattactacgtgcatatctacggtgaactaaaaattatttcgagtattattaaaataaaatatggttgcatctttgaagcaaggaggtggctcttgagtccatcgtgtacagctacagacatagtttttctggctttgctgcaaggctcacagaagcacaagcgagcacgatacgaggtaattaattaatcattttctttaccgataaaaaattaagaggacacatatatattctaaaattaattggggcaccatgaatcatactccctccgtcccctaatataagggattttgacattttgcttgcactgtttgaccatttatcttattcaaaaaattttgaaattattatttattttatttgagatttactttattatccaaagtactttaagtatatatttttgttttttatatttaaataatttttttaataagacgagtgattaggggacggaggtagtgtgtgtatgtatgtatgtgtatattctgacaattttaattatatttaatattctagggttgccagatgtgatcagcgtgagagagaaccaaatccaccggttgcatacgagtcgaagctgggatttccttggaatggactacagacagccaaatggcctgctagccaaagctaaatatggggaagatattattattggggttatcgacacaggtaagtaaaacactagctacatgcatatataacctgttcaaatattgtaccacgtgcaacgtaccagatctatactacgtacctgcaaccagatattccctatgataaagctactcataatataggacaatatatattttggtcaaatttttataactttaatgattaataattctcaagtgtttagtttaaaagtaagaaagatattatgcatagatttgcattgaatagaactggggcggaacttcaaaatttacaataataacagactaattttaaaagcagccctacactaattaatactttaagtttcttattccagctctgtcattcattatatagtagtactactacattaacatcgtaaattatgataagtttagttatgggtgaatagctaatttagtccattaagttttaccaaaggctcaatttggtctttcacgttttattttgtccacatagctcctccaaatatttgttttggcttaaaatcatccttggacccacttaatatgccatatggctatttctagtcagtatttctattaaaaagtcctttttgcccttaatttgtatacaactatatactagacaagagtaagtcaacatgaataaacaacgttacagatgtacttcctattatttcaagatgtgcacatggaacttaagcaattgctatcgtatacacttgctagtatataattattttcattttacataatatactatgtattatctataaaaaattgaagcatgcaatttttctcttatatatgcgaatgatgaggggtataagtgtcatttatgaagagagttgttggttcaaggataagtttgaactaaaatgaaaacttaaaggactaatatggatagattaaaacattaaggactaaactgagccttagatgaaacttgaaggaccactttggctattcacccttagaatacattgatgataatgtttgagcatattttagattagggacaattgtttatttgaccccgttttgaatcctaactactaatttgaccctactttttagagtttgcttatttgaccgtccttttcaaaaagaagcttccgtataaccctgatctgttaagggcatttaacgttgttaactgaagcacaaaatatctcttctgttcttactcatttgaccctattacatatgggacccacccgtcagttctctcttcttctctcctctcttttcttctcctctcctctctttcacggatcagcggcgaaccggcaccgatggggcggcggcttgccgcggcggcggcgctctgagggggcggagggagggagcggcggcggcggcggctgacggagggggcgagttgcggcggcggcgcactgagggggcgagcagccgcgccgactcgtggagggagggaggtgcggccgcggcgcaggcgagtggaaggagggaggaggcggcggtgccggcgccggcgcaagcgcgcggaaggagggaggagg

SEQ ID NO: 25672 - DNA, 13055 bp, Oryza sativa
tttttttggttttttttaagatgtacatatgcaaagtttatattcgtatgtataccaaattttgtattcgtacgcatacaaagtttgtattcgtgtttttttctctcagtttttaatatatacatatacaaagtttatatacacgtatgtgaagtttgtatactcgtatgcgaagtttgtatacatgtatatattttatacgttattttttttgtacacataaaaattatatatatacatatatactttggatacaatacaaagtttatacatgtgtatataaagtatatacatacgtatatatacatgtagtagtattgttgtagtagtagtactccttccatcccattttaaatacaatcataagtctccgtgcccaattttgatcttccgtcttatatgaatattttttatgattattatttttttattagatgataaaacatgaataatactttatgtgtgacttctatttttaaatttttttaaaaaaaattaaataagacagacgatcaaagttgggtatgaaaaatcatggctgcacttaggccccctttgattcaaaaggaaattcataggaattttaaaggatttcattcctatagaaatttttcctacatagccatttgaatcaaaggaataaatcctgtgcaattcctatggaatgcctaatgccatacaagttttggaagaaatctagcataaggttgtaccgtatgaaaactttcctatgagtctccacctctcctctaattcctgtgttttttctgtggtccaatcaaacggttattcttgtgtttttcttatgttttgcaattctctgttttacccttgcattcatattaaaatcctgcgtttttcctatttctacatttttttaatcatgtgattcaaaaggtgcccttgaattggaacagaggaagtactactgtagtggtagtagcagcagcagcgcgccagtagtagtaccaggagcagaggagcgggaggagcagtagcagtaggagcagagctgtaggagcagttccacgttaaaattagaagtttgaagaaattcgaatgatgtgacaaaaaaaagttggaagtttatgtatgtagaaaagtttgatgtgaaaaagttgaaaattttttaaaaaaagttggaatgtaaatagggcctaggagtaggagagtagtagtaggaggtgcttagatcaggggtgtaaaatttggcatgtcacatcgtacatatggacatatatttaaagtattaaatgtagtctaataataaaacaaattacataatccgtctgtaaactgcgagacgaatttattaagcctaattaatccgtcattagcaaatatttactgtagcaccacattgtcaaatcatggagcaattaggtttaaaagattcgtcttgtaaattagtcgcgatctatgcaattagttgtttttttagcctatatttaatacttcatacaggttgaggtgagatctaaacagggccatagtactactactagaagagcagtagcagcagcagtagtaggagcgcgtgaccagtccactcatcaggggcactcctagcggtctcccagtattccgagcgccaaacatgcgtcagcccagtcccaccctaccctactttctatcatcccactcttacggttatcggagtaaatgatctactctgatcgcgtatctctaccacccaccctttcgagtaaatgtttttctctaatgtaatccaacctcacccttgcgcatactatcatgtctattcatgtctatgtgagattcttaactatacccaccatccccttgtattcctctccaccacccggatttttcggatctgaccaccaccgtatggagaggggctgtttccggcgatggcatcgagggaggccggcgagggcgcagagcctaattttacgaatcttgcctaccaaaaaccaggagcagaaagcgagcggcaatggtgcagttctggcgatggcaaaggtgacgagttaggcaggactcccatctccacgatggagggtggagatccggcattgctgtgaccgaatccggtgatcccgcagccggatgtggccatgtggcacgggacgacgcatgcaggcgcgccacggcggcttgtggcgcgggagacgacacggcgggcggcacgagcgttagcagagcggccggcggtggccgggcaacggcacggattagccgagcgatgaccacagagcggggtgggtcatggcgacctaacgacggccagatcctccctctcccggccaaatccggtggtggcttggcagctcttctgccaaggttgagaaggagagcggacggcagcacgtacgtacgacgaagcggagcggccgttgaaatgacgtggtggcgtgcgcccgtgggacagctgtggaggtgccggcgcgaggtgatgcagtcgtctgactgctggccaactgctctgctctgcttgtttcttttttttttttttgtaaaagttttattcacgtggttggtacatatgattcaatgtcgcatccggagtatacaaaaatattattatctacatattattctgttgtaaaaaatcattttggccctaggaaaccgaagtacagagtaaataccaatccaaaagcaaaacgaagtacatcaatgcatatttcatgtgggaataatttctttaccacatgttaaaaaataagctgaccgaagtataccaatacagattatcatgcgggagtaattcgtttactacctgattaaaattagtttttatctaatcgaagtacactaatacaaagagtaattcctttactacctgatctctttctagagttaatttcttcatgaagtcagcagtctgttagtaaatgatttactcattttttttggctaattgtaaatgatttactggtactggtttcctattagtaacgggaacggtttagagagagatacgggagagggacaacagaaaaattaaaattgccgtgaggataggagagcccaatagaaatacgagggggaagaggaacggaaaaggcggaataggaacggaaaggtggaagcgagataagggaaaaaacagaaaaaccgaaggtatgggatacctgagacgctcgaactattgttccaagcgattttgagttcgcttcaacaaataaattacaatgttctcctagcaagcaaaaagagagatattttttcccaattgattaaccaaggctactaactaaattgaccggttaaaattattctttctcagtctcggactcagtactttcgatctcggtcccgttcttttcactttgatccacccctagatggatggttggacgacagatatgagggagcgcacaagtgctggggagtggggcccgtctggtatttcagtctttttaggtccctagcggatataagccaaacaagaatcggtctttcttaagtacgacaccgcaggttaaaaaccaatgccggacaaacaaaaagaaaatttttgttcggttatttttttgccacccctcgcaagaccctgcaattcactaacctccaatgtctgttttgtgctttgtccgtgaatgttagagctcgtcacttgccaattttcccgtatcattttacttataatcaatcactgtttaatagattgtttttttctgcagctaatcaattacgttataataaacccttttttctttaaaaatactaaataaaccgacttagctatataattttcatgttaccaacattaagaaactacattttccatttgatttttattatttatctcaggattttagctaatagagttatattttttttaatttcatttttcaagtatttatctcgggatttgagctaatcgagttgtttgagttagcatgatgattttgcttcttggcttttgctgatggcgtggcatcaaccacgaaacaattcatgctgaatatcctactttcaattgaagtggttatactaattttctttcctagctttactgatctttcataaaaggtagttcggcattttgatttggattgatttctttttggatgagttgtaactatgaatttttatttttttagaaacatcatttttttttaaaaaaaatgctcatatcacaaaaacaatcatctcataaaatttgattgtttccgtggcaacacatggacactgtgctagtataaatattattactcttcccctcggttccaaaatatagcaagctggggagggagtattgatttttgatcttttgtttatttgtaaaaaatatgaatacttaaaaggatgtcgtatttatcaaagtgttgcatattagccatgaaacttttgttcatagtctaatcatttaagaaaatattttattggtgatttagttattaaagttgaactagataattatttaaaaatggagggagtatttctcggttaatgcaaggaaaaaaaaaccttattagtcccacaatcttccactgtaagtaaaaagagtactgctatatatacgacatacgagttagttgtacaactcatatacaaatagaaacatgcaaccataaataaatcaaggagagattatattcatatgcactatagctgtttgcaaccgttgattaaattcagtagtacatgagtcggatagctagggtcgtatacatagcaatttccaaaaaaaaaaaaagtttcatgacaaactacaacccctgacgaggttgcttatagggtgctcatgaattagtctctgatttggactgatcccatcccacaatctgtatatctgctggttcatgattttttttttcatgaaccagtaaggtaataaagtggcgcttttttaagataaaaaaagaacttccatgacgagtttatcaaatatcaaaattgttaaatttgtagaatcatgtcagaggtttacagatccacaacaaaggacatgcattcagatttatatatgacagacaaaaaaaaagaactggtcttcatctattccattaaaaaatcatctgaatcatgttaaaatgttttttttttcatacataggaatgcgaagccgaagattgcttataaaatttacatcccatctcaaagcatgatctagatagatttaatccattaattccttacaagcatacaatttttgagcaagcagtaattgaaataacagtataaaattataagaggttgcctgcgagaagggttagagcatctccagcaaagcccctaaacatagaccttaaacaactttgaggggttgtgactaaaaaataaagtccaacagggctcctacttaaggccccaaagtagaaaggctctcaaattctctcccacagcccctaggcctaggggctatatccccagcccctatccagttttctttggcgtgaggggatgtttccatgacgtgtgctccttcccacgcgatcgcttgcacgccgccggccgtcttgtgggtgattctgctctaatccggccatctccctgctatagtattggtcacctacatggatgcaagtatgcatagatgtttcagcgtatcgatgagacatcgtttggttcctgttaaatgtcaacagccatctgccgccagtggccaactgagatttgatttggctgatctaggagttactactaccatctccttgcatatatgcctgcagtaccgtgtatgcactggatattgtctgaatcttgtccagcccatcatatatgattatatgcatccatatatatatgtacaggtatatcattggatgttgatcgtaggatggatggatgaactgctactgctaccagccacagcagatgcactgatcgagcattctagcgagtaatcatgcactcacactagtgtatgtatatgcacagatcaaatgtgatatcagaaaaaaaaattcaaaattcaatttgaattgtgttgtttgaaattattaatttaaatatgattaaattctatgcgttggaaatattaatatttacattattgtgatattaaactaaacataaaaaatggattataagatgaaatagaggagaaaaagaaataggggctaagaattagaggttgttgatggagttagaaccatttttagagtcttaaggaaataggggcagcccccatttaacctttagggactttaaaataggagctattgctggagatgctcttacaaagtacaaacaaaaaataagcaatcatacaaatttattccaaaggacatggaaacatttgagaaagaacagcaaaaataaaacaatcaacctcattggtaaagcacaagttttatcccaaagaactttgtctgtgcagtgcaaacatccatgcatatgcaaatgttaattacatgggcagtctactgtagtatctgtatcagtatcactccatttccatatgaaatgtgttttgactgtgtattaggcatatacagatgaaatagggcaggattcaggaggaccaagttttagtggcttcgtctatgagtgtctgatacagctcctcaaccacattgaggaggaaatggtctgcaccatgtcgcgccacgagcgaaactgacacaggaagaccattgcgcatgcccagcggaatactcacctgcagcacataggcagaacacatcaaaaaaacattagtcaccccaaccattgtcaaggtagaattaataagaaaagatagattaacttgctagctagttctacctggcaaaacccggataatccagcgatggagagaagtgaaaatgctcttgctcggaaattttccagaggagcagcttccatgcccaccttgggtggaggcccaggaactgtagggattgcaaggattccatgatcctatgaataaacaagcaagtggctaagagagctggaaactacttatctgataattgacacaaatcaccagaaaattattggctgcagaagaatgcaggaggaaatcattctttcagttaccttcagaagagcagcaagtgcagacttgaattcagcccttatagcttggaaatcctccagggattcattatccccagatgcaatggcctccagtattctctcccgtaatccagggcctaggttaggttttacagtgttgacccactctgcatggtttgctttgaactgagacctgaagtacacatagttttaatggattaatttacagttttatctcccagactccttgtcctacatatgcaactctggctagtgaacgagcacaaatcctatcactagatgctgctgaaaattattggatttttctaccacgattatgaacaagatgattggtgtactaaaagaatatactaaactatttggcatggtgtgcagtagtcagtagctagcactattaactcaaaccttaaagcaatattactagatatcctgaataagctagctgtaggtgaaacctttgaaggcctcgcatgacatgtgaaatgacggatagagctggcacagaagggagttcgctttcagagaagtcagtgatgaactttcctatgcttggaacattatcagagatgaaatctccaaggttcctattgtctaatatctgacctgtgaaaacaaaggaacaaccccatcagacaagatgtatggtagaaagcaagaattctagagctctaagctagaacaacatgagtgcgtagatagtactactcactatcaaatctctttgctaccgaagcattgatgatttgataggtgcggtcgtcgagagagcctaagatctggaaacagtccataggaattgtgacttgagtaggttgcttgacaatgtcatcagggagtggcaacagcactttggttacacgagacaacgtagataaatctctggaaaaccaccctgcacaagcaattgcatgaataaaccagaaactcatcaatcagcaccactcgcagtagtaattaatactgattaacaggtctttgttttcacctgattgtaactgtgctgaagtaatttgaccaacattatgcagtaacattaagggtgtaatttgaacagaaacaatacctatgcagtagtaatcaatactaaaagggaaatggaggagatagtaagtgaataattaccaacagtatcaaacatttgcgccatggggatgacattctctgcagaaaccaacccatgggaagggcggagtccaaagatgccgcagtaggcagcaggcaccctgacgctgccgccggtgtcggtgccgagggagaagtcgacgaggttggcggcgacggcgacagctgaaccactggaggatcctccggggactctcccaggcgcgcaagggttggtcggcgtgccgtagtgcgtgttctccccattgatgctgacaacaacaaaccaatcctagctcataagagttaagacccacaaattttgtgacaaccaaccttttacaaattttgtgacaaaattattggaaatggggaaaacaaatttattttggggggatagttggcttggtaggaaaccattagctgagcaatatcctttcatttataacagtaccttcaccaagcatgttacagttgccaaagtgacaaaagaggggtgaaattggatttaagtttaggagaattcttcttctttttttttagaaacaaagttcaggagaattgttatgggtgacaacttgctttagcatggagataaactttcaacagaaagttcagtcgattgtactgaataatctgaaagataaattaatctggaagctgaccaaagatgggtgctttactgtcaaatccttctacagggcattaaaaatgcaagacttagcttatccttccaagaagatttggaaattaaaagtgcctctaaaaatcaaagtttgttctttctgtggcttgtgtttaagaaggagtattctgaaaaagagcatgggggtcgcagtgggtacctgtagcccatctcgtccatgatggtggtgccgaggctggtggcgccggcggcgagcgcggcgaggacgacgggggaggtgccggcggcgggcgcgtgggtcctcgcccagtccgggttgccgaacccggtgacgcggccggcgatgtcgaagctgcgaattaaccaaacaagacagtgagtattcgtcgttcatttgggggagaaaggaagaagaagaaggcagcgagcgagcgagcaatccgtacatgtccttgatggcgaaggtgaggccgtggagagggagttgctgcgatggcggcggcggcagcacgaacctctccatgaaggcgccgtagtctcctcgtcctccacccgccatcgccatgtcgagctcgagctctctctgtctctctctgccgcgtcacctcggctaatctaatcgtcttgttagcatcgaagctgggctgggctgggctgggctggacgatggccatcgcggtggggccagtgatgaggaaagtgaggggctgatcagattgacgctatttttaattatatcacttttttgggtaaagttataaaaaaatatttacgtttagtttgttgtcaaatttggtagatatataagaaatcctgtcaaaatttggtaagacaggccctaaattctattttggctacaacctaactttcatctctcgttataaaatcagatacctccaattctcgactattaaaaccgggtaaattttgtctccattagactgtttggatgacgattttatcacatgtgatgcttacgtggtacgttagatgggtcttcatcttttgtgtggagtgtgtggcgcttgcatagtattacatccagcaaaaaaataaaaacaaaaaaatttaaaataagtgaaccatgtgtaattctatcggagaaaacaatagagttaatgagacccgcatgtcattctctctcctcctcatcgcttctctccctccctcccctcttctttctcgtcgtgtcattctcctcagagagcatgaacacaacggcagtatcatgtccggtgattgcctacggtagggaccatgttgtcgacaccatcatgatggtcttgattagggtggtggtgtcctttacaggtaatgcggaaccttctcataggtgagtttgtggcaccgaaccgcacctcactagaagcatgaaataggtctacccctatagggctccaagtcatcagcccgcgaccaagacatgaccctcgaaccccactccatccacatcacaaaggacccttgttagctgtgagtactccgagagctatccgttgggcatcaccctttcttcgcagcattaatactggagtcaatcgaggcactggagaggcggactgaggtggtggaggagttgaccaaggtgttgaggaggagggcatgctcatggaggacgacgataccgaccgaccgcctggtgccacgtggtagcactgctagaccgggtcgtcatcatctctctattccaccaatctgcgcatgccatacgcagccgaccaagccgaaagctcctagggatgtgaggcatcgcaaagagcgctagggtcgacatggctcacacagatctagacgccgatgcttggggaccctatcccctactcagtttagatcgttattggcatcgtgtcaccgtcccattgaattattttattatttattttttcttgaatgtaataccatgaaagcaccacatatgacatatacatcatgttttgcctttttcttttcttttcatggatatgtttgttgccagataacacaatctttctttacggccacatgcatgtttgtgtgggcttagactctggcgtattattttgattgttttttacgcaaacatattattctgattcaagccaaagctcttatgtttattaacttttctgtagatgaattgaaatgaactgaaagaaagtttcaaaatataaaaaatgacacagcatcatgtggcccaactcgaatgttaaataattattattctctccatttttttttagaaaaaacggtgttgttggtaaaacgtagagcaccatccattttcacactttgacaacctttttaataaaaaaaaactataaatacttacttcatccgtttcacaatgtaagtcattctagtatttcccacattcatattgatatgaatgaatctagacatatatctatctagatttattgaatgtgtaaaatgctagaatgacttatactgtgaaacagagggagtacttagagagattgtattatcaacgtatgttacatattagccataagtatctatgaaacttccgttcatagtctaaacatattaaagttaaagttgaaacaacaataatcagcgctaatagctacttgaaaatatagagaatatttaacattttcactgttaatggcacaagacgagaaaaggcttgatagtcccagaagccacacaatctccgcgattccaaaaaaaatccatgacgaggtttatcactattgttaaatttaaaaaatcttgctcggaacaacaatcaagaataggtttgtagaattgtaggtttacacatccattctttaatttggtgacagcacagaaaatgcattccgatcaatataacagaaaaagagcaaaatcacatcttaaaatgttttttcatgcgcaggaacatgcatcagagacatcttatttcaacgaaggagctagattttatgagtattcattaattcctttacagttttgggcatgcaatagttgaaagaatccacacaattatagaggtcatcgacacgacattaccgtgcatagagattagcatggagttcccagcatataacgaggaaccaagaacgtagaaacatttgacaaatactatcaaagagaaaacgatcgatctcactggaaaaacatacaaaagctttaatccaaataacattgtctaaaacttaacgtgcaagtgtgtcacatcatcatccactagcaattattatctaaaatattttaaattatatgactcactagcaactattatgtggagtattttaatctccacatcattttcacattatttaaacatatacatttatctgatgtataacatacattcatccacgtatttcgcagcaaagtgcgaggtatcagctagttcatgtatatatgcatatgcaagtttacattgggtggattgtatcaccccatttccattattccatatatgcaatataatacgtgtttagactttgtattagtaggtatatacagatgaaatcgggctggaggattcaggaggcccaagctttagcggcttcgtctatgagcgtctggtacagctcctcagccacattgaggaggaaatggtctgcgccatgtcgtgccaccagcgaaactgacacaggaagaccattgcgcttgcccagtggaatactcacctgcagcacatacgcacaacacatcaagaacactactcacattttctaaaattaaaaacataaaaacactactcaaaggtggaactaatcagaaattgatagatcaagtacctggcaaaacccggatactacagcgatgtcgagaagggaaaatgctcttgcttggtaattatccagaggagcagcctgcgcctgaatgcccaccattggtggagggccaggaaccgtaggaatcgcaaggattccatgatcctatgaacaaacagggtaaagggataagaactgatctaggaacacctaatctgatactccctccattctaaattgatctacataaagttttttttgaggttattcctaaatgatctacatatttgtgttcattcattaagtctattcattatttgtgcattggagtaaatggacattgatgcatgcatccatgcatacaagtatttataacccacgttgtcggtgatatgggaccgggagtatcatgaccagaggcttgaggcagacacaatcgcccacgtggcctggcaccttcggggacgtcgggcccgagggtgaggtgtccgccctcctcctgatttcccccgaggggggggggtcgggttgcgcttgcccggccccgagggccgaggcaccccgaccccttaaggaagtctgcgccacatatatgggataagtgagcacagctgtgctcacctaacagcatttattgcagtctggtcaagcgtgtc

SEQ ID NO: 25673 - DNA, 17168 bp, Oryza sativa
  unsure (1)..(17168): unsure at all n locations
caaaaacacagagtagggtattacgcttcgcagcggcccgancctgtatacatcgccgtgtctcgtgtgtcttgcgggcgggtgatttttccacatacagagagagagagagcttgggattgcaccctaagcccttggtcgaaccggcaaaggggggcttacgcagtctcccggtgaggggccacgagctccgtcatctggcgcgccaggtagggggctcagtgtgtgttttctgagctctcagactcttccgtgtgcgccaagtttttcttgttcagcctaatggccgagcaaggaaaagcgcacgacctctctccgagtgtgagcggcgacgacggggagccgaatccacgccgtcgagctcgtactcccccacttcctccgcgccaaagccctaagcagggggaggcgcttgagagggtcgacaaatccgtggcatcaccagtcgcaggtgatgcaggagaacggcgagatggggagcgtcgcctcctcgtctacggcgacggcagcacgcctcagggtgcgcttcaggctgctggcgcgctcctacgacacccgcctgtcgtccatgacccggagtctccagcccaacgatggctggaagacgtggccaacttggtcatgacggcacagcagcgcctgggtgctggtggacggtccgccaccaccaagacctccggcgccgctaccaccggctccgtgtcgtcaaggcggagggcgcggcgagcgtcggctgctgcgcgccattcggccgccactccctcgtcgacacctccaactcgggaggatcagcatgagagccggatgcccgcatcgacatcgagcgccggcgtaataaccggcgtactccccgcgcaacggagggcgcctcttcgtccagagtgtcacctcgacatggacgtgaggatcagccctccgtgcccccggccggtggtgttgcctgtagagcctttgtggcgagtctcgggaatgtccgttggcccccaaggttccggcccaccatcaccgagaagtacgatgggagcgtcaaccccaccgagtttctccaggtctatacgaccgggatcgaggccgctgggggtgacgacagggtcatggcgaacttctttcccatggccctaaaaggacaggcgcggggttggctaatgaacctgccacccgcgttggtccactcctgggaagatttgtgccaacagttcaccatgaacttccaaggcacatatccgcgcccaggcgaagaagcggacttgcatgcagtacagcgaggcgatgatgagtcgcttcgctcgtacattcagcggttttgccaagtccgcaatactataccatgcatccctgcacacgcggtgatctacgcgttcagggggggcgtgcggcacaaccgcatgctcgaaaagatcgcttccaaagagccccagactaccgcggagctttttcagctcgcggaccgagtggctcgtaaggaggaagcgtggacatggaactcctccggttccggagtggcagcttcggccgcccccggatccgccgctcagacagggcggcgtgacaggaggaggaagaagaggtcggaccgttccggcgacgagggtcatgtcctcgccgtcgagggcgctccgcgggccactcgaaaggggaggcctgcgagcgacaaaaagaaagaggctggtactcccagcagggagcgccccgccggcaggtggtgctccgtccacaacacctccctccacgatctcgcggactgtcgtgcagtcaaaaacctggctgagcgaacgaggaagtgggaggaggacaggaggcaggaacgccgtgagggcaagtccccggcggttccttccggcaaacggcgaagtgaggccaagcagaaggcccccgctgttgacatcgatgatggtgatgatgacctaggtttccaagaacctggggccaccattgccaccgtcgatggaggagcgtgtgctcacgtctctcgccggagcttcaaggctatgaagcgagagcttctggccatggcccctactcatgaggcgatgcgtcgggcgcggtggtcggaggttgctctcactttcgaccagaccgaccacccaccgtgcattgcccggggagggcaggttgcgatggtggtttcccccaccatctgcaacgtgaagttgggacgtgtcctcatagatggaggagcggccctcaacatcctttcccccgcggcttttgatgccatcaaggccccggggatggtgctccgaccgtccagccgattatcggtgtgacgccggggcacacgtggccattaggtcacatcgacctaccggtcaccttcggtggacccgccaacttccgcacggagcgggtgagcttcgatgtggcggacctcagtctgccctacaacgcggtcctaggtatgcccgcgttggtgaagttcatggcggcggtccactacgcctacctccagatgaagatgccgggccccggtggccccatctctgtccatggcgatcttaaagtcgcgctcgcttgcatggagcagcgcgcggaccacctcgctgctgcgaccaagcccgagggtggtgacgagaggcttggcacctccgcccccaccgccccgaggcagcggattgccacatgcgacgaggtcccggtcaaggaggttgccttgggcgacggcccatccaagaccacacggatcggtggtcttctggatggcaaataggaagacgcgctcgtctccttcctgcgggcaaacgctgatgtcttcgcatggagaccggcggatatgcccggggtccccagggaggtgattgagcaccgtctcgccgtacgaccggatgcaaggccgatccggcagaaagtgcggcggcaggccccggaacgtcaagccttcatccgcgaggaggtggctagacttttggaggccgggttcatccgtgaggtcatccatccggagtggctggcgaacccggtggtcgttcccaaggcgaacggcaagcttcggatgtgcatcgactacaccgaccttaacaaggcatgtcctaaggacccttaccccctgcctcgcatagatcagattgtcgactccactgcggggtgcgaccttttgtgttttctagatgcatactctggttatcatcagattcgcatggctagggaggatgaggagaaaactgcgttcattacccctgtaggaacctattgttatacatcaatgcccttcgggttaaagaatgcaggtcctacttttcaacgaactactcgaatttctttgggtagccaaataggacgtaatgttgaggcttatgttgatgacttggtagtaaaaacgcgcaaccaagaaactttactttcagatctagcggaaacttttgagaacctccgctccgcccgcataaagctgaaccccgataagtgtgtgtttggtgtacctgcgggcaagcttctcgggttcttggtctctgcccgaggcattgaggccaaccccgagaagattcgagctatcgagcggatgcgcccccccagcaaacttagggatgtgcaatgcgtcaccggttgcatggccgccctaagtcgtttcatatcaaggctgggagagaaggcgctacccttgtttaagctcctcaagcgctcggggccgttcacttggacggaggaagctgaacatgcccttactcagctaaaggcatatctcagctctcccccggttctagtcgccccggagccaaatgagcccctgctactttacttagcggcgaccccccaagtagttagtgcagcgttggttgtggagcgcgatgaagacaatcctcattccgcgcacccccaccctgtgccgacttggcccgggagcaagcagggaggagaggcccccgagtcaaacggtggcctaaggcccctgacgaccggagacggccctctgcccgcttgtcagacggtgctgagtgcccccgaccctcaggaaggccccgaggccactgcgggaaggccgcacctatcgccctttggccccgaggctaaccctgtgctgactcgacctgggagagagcagggagaagaggcccccgagccgaacggaggcctgacgcccctgacgaccggagttggcccgttgcccgcttgtccgacgacgccaggagtccccgaccctcaggacggccctgaggccactgtgggaaggccactcctgtcatcctccgaccccgaggtcatcggtacagaagacaagtgccccccaagaggccacttggacgaagaacgccccggggatacggcccctagcgaaggggatcggccccgccgaaaggtgcagcggcctgtctattttgttagtgaggccctccgggacgctaagacccgataccctcaggcccagaagatgctttacgctattctgatggcctcaaggaagctgcgccattatttccaggcgcatcgggtcactgtggttacgtcttaccccctcggccaaatcttgcgtaatcgagagggtacaggacgggtggtaaaatgggcaatcgagctttctgagttcgatctgcactttgaaccacgccacgctatcaagagccaggccctcgccgattttgtggcagagtggaccccggctccagagaccgtctcaattcccgaggccagcacggacccctcacagctgcctcaaaccgcccactgggtgatgcagttcgacggttctctgtctctccagggcgccggtgcaggggtcacgttgacctctccgaacggagacgtcctcagatacttggtccgtctcgattttcgagcgactaacaatatggcagagtacgagggactccttgccggactcagagtggcagctggactggggatccgccgcctcttggtattaggcgactcccagctagtcgttaaccaggtctgtaaggagtaccggtgctctgacccacagatggacgcctacgtacgccaagtgcggcgtatggagcgccatttcgatgggatagaacttcggcatgtacccagaagggataacatagttgccgatgaactctcaaggctcgcgtcctcgcgagcccagaccccaccgggcgcctttgaagaaaggcttacccagccgtcggcgcgacccgatcccataggggagacggatgcgcctgaccggcccccgaggcccgtcggagtccaggcctcgggacccgaagggagcgctccaagctcccttagattgattgcttggatctctgagatccaaacatacctcacagatatgactctacctgaggaccgcgaagggagtgaacgcgtacaacgcatttccaaacgctacgtgttggtagaagggaccctctatcggcgcgcggctaacggaatcctcctgaaatgcattcctcaggaacaaggcgttgagcttcttgctgacatccatgagggcgagtgcggagcccattccgcctcgcgtaccctggttggcaaggcctttcgtcaaggattttattggccgacagctctcaatgatgcagtcgatctggtccggcgatgcagagtgtgtcagttccacgccaagcaaatccatcagccggcccaggccctgcagatcataccactgtcatggccatttgctgtctgggggcttgatatcctgggaccgttcaaacgggccctgggcgggtttgagtatctgtatgttgcgatcgacaagttcactaagtggcccgaggcttatccggttgtcaagattgataagcactctgctcttaaattcattaagggcatcacggcccgttttggagtgcctaaccgtattattacggataatggcacccaattcactagtgaactcttcggcaactactgcgaagacatgggcatcaagctctgcttcgcctcacctgctcaccccagaagcaatggcccaggtgagcgcgccaatgcagaaatcctcaaaggccttaaaaccaagaccttaaatattctcaagaagcacggcgattcatggatcgaggagttaccagcggtgctctgggcaaaccgaaccacaccaagccgagcgaccggggaaacgcctttcttcctcgtttacggcgcagaagcggttctcccatccgagctcaccctgaggtctcctcgggccaccatgtactgcgaggctgatcaagatcagcttcgtagagatgacctcgactacttggaagagcgaaggcggcgcgcggccctccgagccgcgcgctaccagcagagcctgcggcgctaccatcagcgccacgtccgggcccgatcactctgcgtcgacgaccttgtcctacgccgcgtccaaacgcgtgctggattgagcaagctctcaccaatgtgggagggtccgtatcgagtgatcggtgtcccccggccgggctcggtacggctggccacgggcgacggcacggagctgccaaacccgtggaacatcgaacaccttcgtcgcttctacccctgaaggggggggtcgggtgtcaggttttggctcgggccaaccccgcacccccctcgggtgtgcaggattggccgggggctaccacacatgcacatatattcatttttcctttatttcagcatttcaatagaagcagtttcaattttctaaaggttgtgtctgtgccgttttttccttttgaagaatcttgacttgaaataaggtcactcatgcttgaccttgccctcgggggttcggttcggtcagctaaaatcgccaaacggggcccagaaccgagccgtgccccggggcgtggtgaactccgggggggaatcggcaaaaacctacaatcgggtcacccatacccctcggtcaccacgttcccggcctggccagtctcgacatgtggatctccccaggcactagccccgacccgagccatccaagggcacgaacccttatttcaagctaagacgcaaaaggaccacggcacagatcatcctcatctcgtatgtatagcaaaataaaactaacacaaaaattttttcatcatttctgattgcagattaagttaatttgtacaaaaaagaggcatgaaggccttagaagaaagaaaaagaaaaaagttaagattggcgggggcctgggggctcattctgacgcgcccaggtcgccggcctcgttgccaccgtcgcttgcactgctggcgttcccctcctcgtcggagtcgggggcgaacgcgagccgaggggccgagccctcgaagccgttgacgatgtggtcggcagcatccccgacccgcgcgcgcgcgtcgtcctcggtcccgggagggaactcctccagcgccatccatggagagaagttggggtcccgggcctggtaactcgccagcacgagttcgaccgctccccgcgcgaggtccctcgaggatgacttgatggtcttctcaagctcctcggggagttgttcgagaacccaggccatcctgttgaggtgcggagcgaggccttccagattggtggggggcaccgtcgtctggcctttccagaggcccgcttgccgaccggcgcgcttcaggcgggagaccgcatcccaaagcatgccgggcccaatctcgcccgccaagcgaagggcctcggcctccccggtggaggagtccagcgctcgctgcatatcggcgacggtgtgttcggcagctacgaggcgggcggctaagtcgctttcgcccgcggccgccccaccgatatgcgccctcgcgtccagctccttttcccgtgcctcgaggtcagcagcccgctgctccagtgcggctctctcggcgcggacgcattcaagattgcggcgcgcctgctcctcctgcgccgcctcgcggagggacaggctgtccgccagccgtttggtcgtggcctcagcctcctcgagagctcgctcccgctcagcgagtgtgtcctcgcggaggcggagcgcgcactcctcctcggcgcaggcggcctcgtgcgccgccagcgtcgcctcccggagagcagcggcggcctcgcggtccgtcaagcctttctccacggcgccggcgtgttcttccagcgccatagcacgggcctcaagggactcctcgcgccgccgggacgccgcctcagtctctgttacccgccgctctcgggcagcggcggagtcaaggactccctgggcggcgtcgagcttttctttcagctccgcctcccggctggcgttttgaaggcggagggcgtcttgcgcctcaatcatcgtggtggtagcgatgagggcggccgctcgctcctcctccacctcacgagcgatctccgtcagcgccgccttccgggcttcaagctccgagacgtgacggcggtgagctttacggcccacctccaccatggcgtccaccgagcgccgcccctcctcaacgcgtgcccatgcggcctcgagctccgctcgttccgcgcgcagggcctccacttgggcgctgaacccatctagcaccgcggtgtttgcggcggccaaggcctgcagaatgggctcggcgctcagcggggcgacggaagatgaggagaagagccgccttggagagaaggcgatgcggctcggccccccggaggacgtgctgggctcggggatgtcccccggacccgtttgatcctgggcgtcgcccggagaggtgggcccaggcgatgtgcccgcggcctcgtcgcgagcctccctggaggctgtcgcctgagggttgcccgagggagtgggcccagttgacgcgccagcagcagctgttgcctcagcctggcgagcccgggcggcctcctccttagcggcttcctcagcccgggcggcctcctcccgagcagcttcctccgcttggcgaatccgggcggcctcccgggcggcctcttcagcttcccgaaggcggtctgcggcttcacgccggtcagattctcgcctccgctcctctgcggccgctggatcttcggcctcggactggccggacttggggtggcgggaggaatgcgacgggacatcgctgaagcagaagaaaaaaccagaagacgaacaaaatgagagtgagacgaacctgcgagggggtcggttgaatgaccaccttggaggggaaatcaggtttccccggcatggttccgtctcccccgtcttgcggagccgtttcttcttgcgctccccctcgggctgcgacgtcggcgcggccccctccgggcgccgactgctggcacgcgccgccccgccccctcggggaggagatgggggaggtgttcctcccagcttcctcttcccctgggcgtcggcagggcggctgctccccgagcctccgacgcggggcccagaagcacgaccccctcctggggcagattgttccccccggcggcgctcgcccgcgccgtcgtggcccttaggggctctctcctctgaggccccgacccccatcataatggttagaatggaggcgcggtcgggatcgctgcagagggggaggatctcctgaggaatgcgagacgcctccacggagctaagattcagcaccctttggaccacgatcttgaagtcctcgggagcccaatcccatctggctccctggtgggtccgcatgtagtcttcaggcccagtgtactcccaggcgctccgggcgcgccgttggagcggcgcaatccggcgacggaggtaatcgccgtacaccatggccccggtgagcccctgggatcgcaggcccgccaggcggtcgaggacggcgtcgtagtcctcccccagatctaccggcgcccgccagctggagacctgcgccgggggctggcttggaagtcggaggcgcgcttcgttggcgaggggggtgtagaaccagtcgctcttccagtcgtcccacttcttgcggaggacgcaggggatgtagcggttcaacaccggcccccgcggctggaagtagcagccgccaaccaccgacggcggtgacaccgactgcacggtgaagaaccaccggaacagctgaagagaggggcgcaccccaatgaacatctcgcacaggtgcgcgaagatggccaatgtcatcaccgcattgggggtgaggtgcgccatctggagatcgtagaactccaggacatccatgaagaaagaagaaaatggcgggaccagcccagccattgcgaaggggaggaagaagatggaccgccccgggtagtctggtgccgggcgcccctcgcccagcatcactatctcccgaccggtggcggactccggcatgaagcggcgcggcagtccggcgtgcctctcgctcacgatgcgggaaggcggtagtacactgccgtcgagcagagcagagccccgtgccatggcggtggaggaagagatgattgagaacgagcgcgtgtggcgaaagtagggcgtagcaaagaaagagttagagctcaggcggcgaaggcaagaggaacaatggcgaaaggaaggaagcaaatccttttctcgatgcttttatacccttgccatcgctggccctggctcctcgtttctcgcgcccactacctcgctccctcgtatctcgctatctcgctccctcgtttcccgtgcccacgcttccactaatcccattcgcccgcttacggcgcaggaagtggatatgcggttgtggtaatcgaaatggattgtatcgtgcgcgcgttaattacgctcgccgactgaagcggcgttaccgtatctccgggcgagacaaatctgctcacccagattcgcgcgctgctcaagtggtgtggcagtcttgaatagaccgcccattatggacaaccaaagttaccaataccaatgtgcatggattgagaccgttgggtattttgcccaactacggagaccggtcccacctgtcaccaggctttaggggtggcgtcacacctgaccgcttcccttgggaagggaaattgctctggcataacgccgggggctactgtcggtgatatgggaccgggagtatcatgaccagaggcttgaggcagacacaatcgcccatgtggcctggcaccttcggggacgtcgggcccgagggtgaggtgtccgccctcctcctgatttcccccgaggggggggggtcgggttgcgcttgcccggccccgagggccgaggcaccccgaccccttaaggaagtctgcgccacatatatgggataagtgagcacagctgtgctcacctaacagcatttattgcagtctggtcaagcgtgtcacgctgcatgcaacgcagtacagcgcgttcctttatccggtctgtgaccagtcacagaccggtcagatcacgggttaggtggcgactggcggtctgacgcacgccttgccccatcccgtcaagacgaaagcctctaggcactcgtctcaagccggagctagcgtgttatctcttagagatggcacgttagccctggtcagatttataccaggcttcatcctaaccattacaggcaaggtgttacacgaagaagggcaaacatgcacgttgttaagctgacgcgtggtggacaagaatgaccggtctggcactggtcgcgtcatcgacagacagccacggtcccgcgtcatctctgtcttcgggggaggtgggggtaggtgtgggctgtcccatcagaagggctcccggatggaaaccgtaccgatctccgcccattaaagagaaaaagaacagtccagtttaaaaagagaaaggtgcatgtggtatccccttgagatataaaaggaggaccttgcccatttagaggggggtttttttccttttttggaaggctgaggggaaaggaagttaatcctttgtaacttgtccatacacaaatccacaaaaacacaggagtagggtattacgcttcgcagcggcccgaacctgtatacatcgccgtgtctcgtgtgtcttgcgggcgggtgatttttccacatacagagagagagagagagcttgggattgcaccctaagccccttttcgaaccggcaaaggggggcttacgcagtctcccggtgaggggccacgagctccgtcacacgtgcaatatcctgatttgctattggctaggaaatagtggggatggtgcatgcatagagtttgttgctagagtaaatatagtatgagagagttattagctttttttggtcttagtgtacctatgaaatatgtatatcaatttggaatggatggagtactaacaaacacacaaaaaattaaaaataaataaatattgcctgcagaagaatgcaggaggaagtcattctttcagttcagttaccttgagaagagcagcaagtgcagacttgaattcggcccttacggctagaaattcctccaggggttcatcatcccctgatgcaacggccccatgtatgttctctcgtaatccagggcctaggttaggttttacagagttaacccactctgcatggtttgctttgaactgagacctgaaatgcacacagttttagtgttttatttgatctccctgactccccgtcctatattgcaactctggctagtgaactagtacaaatcttatcactagacaacggatatgccgctaacaattatcagatttatctgcctgaattatgaacaagatggttggtgcaccagagtaacagtagaattccaattaaaactgtttggcatggtataaccttaaataaatacagagtattaccagcagcattactggttaccttagagaaatgttactacactagcaaaatgctcatgctttgccattggtaaaatgtccatactttgcgttgcttatgcttatttgaatataagttactcactttattcaaacaaacattagactattacataaaaatatcaggagcttatttgtaaaacattttgtcttttatagtagtatagataaagatatcttgattgaataagttgtaagtgagacctcagaaggctgaacatgacatgtgaaatgacagagagagctggcacggaaggtagttcgctttcagagaagtcagcaatgaacttccctatgcttggaacattgtcagagacgaagtctccaaggttggcattgtctattgcgtgacctgtgaaaaaaaatccccatcagacaagatgtatggtagaaagcaagaattttataattgtaagctacaacatgagtcaatagacgatttggtattactcactaccaaatttcttggctactgaagcattgacgatttgatatgtatggtcatcaggagaccctaagatttggaaacagtccatgggaattgtgacatgagttgggtgcttgacagtgtcatcaggaagtggcaacaacactttggttacacgagacaacgtagatagatctctggcaaaccaacctgcataaacaatagagtttttcagataatggaaatgattcacatctccagtctctaccaacaggctcaaaaccacttagtctaaaaacgataaataaaaatactcgaggttattttccctcgtaatgatatccaatttgaaaaaaaaagaagaaaacacatagattcaatctataacgatgatatataggaactaggccaattgcataagcaacaattgcatgaagaaatcagaaaaactcatcaatcagcaccactctgaatagttgtcattaataacagttgcttgtttgctcctccctgtgattgtgctataatttgaccagcataattatgcagtaaaatcaagtgtgtaaatttgaccaacaaattatacaagtatatagatgcagtagaagacattaatcaattaatggtaagagggaaatggaagtgaatagtaataataattaccaacagtatcaaacatttgtgccatggggatgacgttttgagcggaaacgaggccatgggaggtgcggaggccgaagatgccgcagtaggcagcgggcaccctgacgctgccgccggtgtcggtgccgagggagaagtcgacgaggttgggccccccgggngggnnccngnaacgggcganncggncggagccactggaggatccgccggggactctgccgggggcgcacgggttggccggcgtgccgtagtgcgcgttctcgccatagatgctgcgttgttgcggccaagaaattcaatcggattaattcttggatttcttatatatacacccctgacctacctgtatgccatctcgtccatgatggtggtgccgaggctggtggcgccggcggcgagcgcggcgaggacgacgggggaggtggcgccggcgggcgcgtgggtcctcgcccagtccgggttgccgaacccggtgacgcggccggcgatgtcgaagctgcgaattaaccaaaccaaatcaaacagtgagtcgtcgtcgtcgccgccgttcttcatttgagcgagcatgagtagtacagtacatgtccttgatggcgaaggtgagcccgtgcagggggagttgctgctacgacggcggcggcggcggcggcagcacgaacctctccatgaaggcgccgaagtcttctgccatggcgtcgcgacgcgtcactctcactcggcggctaccgcttcgatcacttggtcctccactcctcctctgcttaatttattaaggcggcagagcggctgggcctgggctgcacggcggcggcaaatggaggcccaattagcaaaacagcagaatataggtactgtatgactgaattatattccttaacattaaaatatatatttacgatcggaacaagtttttttttttttgagtaacaaatctggttaaagataggaagtgcaatgcttggaatcaaatgtactctaaaaatgtacacggccgctacaggtggcgtgtcagtattgttgtcacgccaagcaggctgacagttcagattttagaaataatttttgaaaatattattttttaaaatcaaaaaggttcaaaaaataaaaaagcctagtttcgacaagatcagcacgatggcacaacactgaggcaatataacgagttggtttggtttgtggcctaaataggtcattgccaaattttagtaatttttggcatgactaattttggtaatgcaaagttatgtttggattaaagccaaaatagcctaagttcactattgaaatggcctatttttttaggcatgccaaaatttggcttcaaagcaaatagatactaaacactattaaaattgctaaatattggtaagtctaatttaggcctcgaaccaaaccagcccaacataacagcagaaactatttagaaaacttcgcgtgcatacgaaagtcctcattggggatagagggaacagaattttcaccgaaataaaaattccttcagaaatgaagcggattttttcttttggcggtccaagggagtcataatcccttgtcacggtaattccctcatcacatattactagtagcagctctctatgtttaaataaacatgaattgtgtcgtttgggtgaagcaaaatcatgctgctcccctacaccgccggttcaagtaaacattatcaggcagcatggagctccaaggctgggcacaagctttgaagagagatgaatggtgttagccgttttcagctcgatcataagcattggatttgtgcttgggtgtaaacgtaaacccttctggaactttgccaagcaacatctctgagatcctgatctgtacgtacattagacaagatatatattatcagcttgtgatagctagtaaaagatagaaaccatccaacactcagaacgaggacagcttacccagtcagctgctgaatcagagatcattagggtttcaagatcatcacggccacagtagcttgggggcctccagttcaaacgttgcgggatcacatccaacaggccaaccggtatgtagcggcaggtgtagcttagccattctagtaaaaaatagcgtgttgtttcaacacctgaaaatacacatgataatttgatgatcaagacaaccctttcaaaatcaatttgatttcatgccgagcatttcagtgcagcaagaaaaaaaaaactgtaactcgatgatgagcagatattatcgcattccaggcctcacaaaactcataatctgagccaatatctggcaatagagagaacctacctttggaatcggaaccccagtgttccagaccaaaactcacaaaatctttaagaatattgaatctctcgccagatgtaatatcccagtgcctttgttctttaacctcagtaaatatccaaggctgtcaggtgaaaaaaaaaaccatgcattagcacaaaattagcagacatgaacttgagggaacaaaagcctgacattacagctagcaattatagcatttttctcatgatagatgttaaagtacatatactgcagcaccaaactaacctttatgagtgcacctcgagcaatcatgcttgtcgatattttagagcagcctgaaacatgtttgttccagtcagtaaaagagaatacatcaccatttccaacgacatgcaactggtcaggggctttctggcacactggtaaatataatcccaatcagcaagtttgctgtagcgctgttgccgggatcgaccatgtactgttatggctgacgcaccccagtcatagatgtcggaaactatagaatcagcacggttccttccctcaaagaaagcagttcttacctggaatcaagcaacagagatcaatatgagcaaagcagtgtttatttccattttaatatgtcatacatgtcttagcagccccctccccatgtaccttatctctaattaaactttgcattgattaccgatcatgagacataaaatgttcaagcaggctaagtccacccatagatagttttccttccaaaaagtacgctaaacatgtaaaatatttggtttttcaaagctctgattctagttcaaccctgttgaccataaatgtgacaatgcattggcagatcgacatctggatgaaatcaccaaagccagaacttttgtcctcaagtgctaattagctcctaacagagtataactgagctactgcaccattaccttaacagttaaaggtttttcagtaacagtggatgctgcttgtacaatacttttgatcctcataggttttgttagcaatgatgatccagcacctttgttgacaacaatatcaattgggcaccccatatttatgtctatgaaatcaactgaacattcgttatccacaagttcaacggttcgtgctactgtatctggataggctccacaaatttgcaccccaaacaaatcctctgatgaatgccgtcgcagcaaagcccactctg

SEQ ID NO: 25674 - DNA, 27636 bp, Oryza sativa
  unsure (1)..(27636): unsure at all n locations
tgattagcagcaaattcaagtcattcattatccatcatcacatcggtttcagagagaagtgtacaacaagattattttctgtgaagaaaatagttaccattcgtggaagcctagaaggcaatgttcataataggattataccagaaggctaaaaaggaatattaagtgagaacttgttgactcatatttgacagactaaaaagaaaatgcatactttcagagcagacacctatgcaggaccaactattttatatataaaaaagaacatgccaatagaaggtctaaaaaaaaccactgcattggctcctcgaaaaacactaaagtaactatgtctgcataattatcgggagtgaatctgacaatgtgtgtatcaggatctatcaagcatctctaatagcaatatgattttcatgtgcactgttcatagtgtaattgaggggccattttgcaattaacaactacaattaacagcagtgggcttaaaaggaatcttaagtgaaaacttgtcgactcatttgacagattgaataagcacacttctacattcaaagcaggcacctatgcaggaccaactattatagaaggtgtaaaaagactacccctgcattggctccctcgaaaaacactgaagtaactatgcctgcaaacctattgggagtgaatgtgacaatgtgcgtatcaggatctatcaagcatctctaatagcaatatgcttttctaagtggaaattgcactgttcatagtgttattgaggggcaagttttgcacctaataactacagttaacaacagagcacaggcattcatagttcaaaacgggggaaagaaaataaaaggactctgatctactctactatgcagtgatccttacggttttggaggaggagcagaggaaagactcttaagaacagaagatggaatagtaaattatatgatatgtcatagagcctaagagagagatcggcaacaatttggtgccacaagcttagttaaggcaatggaacagtgtaagactgatggcagccatagaggtcaggatatagcaataaagacatcagaaactcatattctgacatcacagttcataaccaagaaaaacacggactcttccagtgcactgaaggaaacatgacgaacaggtacccagtacagacgaaggcagcaaacgtgacacaactgataacgccatagggagatcttggctagacgatgccatttgcctattgtcatcgagagcttggcatttccatggaacttacgcaggtgcacgggcagcagactggctgtggagctcgcacgggcgcctaagcatggtaagatcattgcgatcctggatgtcaggccagcactaacaagccccaagcacacgatagagttgaccgtcgtcgcgcacgattcaggagagaaggacggcgaactgagtacagagctgaaaccgagatgagcagggctgccggttcagatgccgcaggcggctccggcatgataataagctttggcacgcggcggtccaccctggatgccgctccccgcacttgccgtcacgagcacggcgcctcgtcggagccgcgcgacacgacgaaagcatgcatgctacggcaagatcccatgcctcggcggcgatggaagcgggacgaggcggcgcggcaaccgccagtgctgccagctcgccgaacgagaacaactcacagggaccgaccgaccgcgccggcacatgagccgacacgaaaccacgaaagatcccaccgctcgtacgcagcagcaggagcgctcacgccgacgcgtacgaacaaagcagccgccggctgggccaggcaccttcccacgacgtccgctcgctacgccaggcaccttccgacggcgggccccctccgccaccccgccaaaccagtggtaccacgcagggagggaggcggcgcgatgacgacgccaaatcgtgacggaggccagaggaagcccaggcccagaaaaatggaaaagggtggggggaaaggggtcaaagagagcagangggaagttccacggcttacttactcgtccatgtcgccgtcgctctccgaagacgggctgtcgcggtcttcgtcggcccctccaccaccaccgccgccgccggcctcctcctcctcttcctccgcatcagaatctgccaagcccaccaaacacagaacccactcagcgacacccgaaccgaaacagagaacgcgatgcgcgcgcatcgcggagtcgtcggcgccccgctcccgccgcaaccgggggcccgcccgggacgacgtcgtcgttgggaactcaccagcgtcccgccgctccttctccttctccggcccgccaccgttcatcaccttcggggagcgctccccgccgcggtgggcgtcctcgtccgcgccaccaccaccaccagcacctcctccttccacgtgcccgtctccccccgctggagccgacgccgcctccggtgccggccgcttctgcgcgggcattccggcctcctccccgcctccccgctcgccgcgcgcgcgcccccttctccgcgacgtcgtggagcaagcacgaggagggggaagggaggtgaggtgggtggaagcgactcgactcgcagtcgggggcaataagaggaggaggaggcggagagcgagaggaaaagaaaagcaaaggcaacgcaaacgcaatgccgcgatggtggtgctggtggtggggcgccctccctgccctttgcctgcctgcctctgtgtcgtgcaattctcgggacggcttgcggcgcggcctatgtacgcgcgtgcctgcgtgcgtgcgtgcatccgtccgtccaccgccgccgccgcggtctcctcacgcggatgtgcggccccgatttcatcccggcgccgccgctcgtaaccgcgggggtgtgtttggtttggtttggttcacactccccacgagattttcaacccagatctaatccaacgtggagctggggatccacatcgagatgggctcgaaattgcgttcaacggatgaatgtttgaatcctccgagcgaattttgcagggtttccttgtaatttgaaagttgaaactcttcacatgaggcaggagcggttggttgtgtgatgtccactatccagcttggcaaaagtagagaagcatttatgggatgtatttacatttggctgggctgtacctggccgagtaagataattggactttcaggcctaatggttaaacgggctaggcccaatagtttttttccagctccaaactttattttataccaagaaaaacaggagtatcattgcttctctgaatattgtcgattcagctgttttccataaggaaagttgagatgataaagattattcaaattttcttctgccttattcaaattttgttagtagttgacaatggtggcagcagaaacttcgattggcagagctcaggcttcagagtctgaagagtgaagatcagcaaaaggaccacaagaaaatgaattccgccgaatagtgaaacagcgattctgctacttgcatagatcaaacaggaaacatcattgttgtaaattgcaagggcgtaaccaacatcttcataatgacggccaaatgtagatgtgcttatgaaaactgaggctcgtagctctcgcttcagaaatatgcagatccatggtgaaagatggaagagtcagacagtcagttgatactcatcaagttagcgagatctttagggctttgcttggaatgaaggaaaatcaagtgctccctccgtttcacaatataagtcattctaccatttctatattcatattgatgttaatgaatctagacatatatatctatctagattcattaacttcaatatgaatgtagaaaatgctagacatatacatcgtgaaacggagaaagtaggaattgtgaaaaacacatcaatgtcacatgaatatgtatggaagactcgagaatgtaacaaacccgtaaaagataattggatcgaaggcatatgaatgcatgtcttaaatgctatatacgcgtcaaagagagatgggtttgtattggagctttcagagtaagagcaagtttaataggacagctaactactagaggcttcaccatttggcttttttcttattagggaataaaaatgattttggagttaaaacttttatatatgtgttcttggtgatttaaaagccaatgctaaaaaagaaaccacgttgaaaatatctcaaattaagtttgaaaatttaaaatttggctttttctttggggcttattaggccatccgatgggagcctaggttcaaatcacctatagtcaacttaatagccaattcataacaattaactataaacatatacttacatgatctcacctatcatacacacattgtatcttggagtctgtgctacagctggctacaaatctgtagcctgctgctcttctctcgcctcttttatcttctcgatacgtgtttatagctggcttatagtctgctattgtacctgctataacagacccatcgtttcatttattcacggaataagccaaacggcatatttacaaacggaaagtaatttgtgaataaaacttttatatacgtattcttagcgatctaaaagcaaatgttgaaaaataaacttcgatgaaaaaacctcaaaatcaactccaaatttaaggttgaaaattcaaaatttggctgataagcatgagcataagcaaaaatatgaggccctaaaattttgtcgaactattgtctcgtttctctctctctcccgaaaccataagaggatgatttagatttacaatggacagccaatgaaccaattctccgttccaaaaaccctaatggcaatttcttagacttccgttggaatgtaggattttcaccggaaactcaactccctttttttttttgtttcctttgattcagataggatctatagtgaattttaggggctttatggctgagattcgacatagaaagtcggagttgcttttcttgtgccgaacttatgacaacacgcatcaggtactaggtaccagtcttttagttcacacggtgatatgtcgtctataattattttctttttgttctccacattggttttcacttgtgtttcttgagttaaccgagttataaagtttccgggttcggttttccttataatttttgacaatcctcttcttcaacacaagagcggtttggcctaaaaaataatttggcgtatgaaataaaagagctcttactcttttttcatttgagtcctgtaccaccgtctatcctacattagcttgattattggcttggatttgtctattacttgcaaaattaataatcgataacttctcacgttacttagtatttttgtgcttttaaatatagctcattatccaccattatggttaaaagtccatcgcgctagtcctatagttaaaaaagccctaactatcttgcaacagaacaatgctctatggttgagcctagttgaaagctattatatgttcccctagagttagctagtgttgatgtcgaaaaggaaacaccaaaagaatctatgctttcaatccaataatgcaactaatgtgaagagttaacaataaacataaaaatcacagaacaatatataaagttaccttcacattaaatgatcaccaagtcattaataaggtacgagtaattgtatatagtactgtagttacattatttaatattaaaaccagtagtgtcgtttcaactcccagtaagtttggtacataggaacttccttcttagtcgctagctacacaagtaacatcatagcacaagttttatcattcttaacgggtcaatcaatagctacccttttactagcggttctactttgcgctagtgagtaaccgtttattcaacccttgcccacaatctccacaggcaataatatcgtatgctacatagactattttatgcttacaccctccccttcagtagcaccggatatcttaaaacatgtatatatatactattttccccatatattcatatttgattgtaacatgcttatatctcaatattcgtctttaacttgtatttggaaatattttatttcgaaacatgttgcataacgaaaaattattcaaaagttatggagatggtacttgtcgagagtactccacaattcactcctatgtatttttactacaacattgttacattggcaataaatgggcccctctatataacagccgatggatccgagtgggagaggcgacatcatcgccgccgtggcaaaaaaagcccaaggaagcagcgaaagtaacgtgtggaaaggggagcgtctccgagagcgagagcgagaagagcgagggagagaactgaagcggacggcgaggtttttgctcccaatcccctcctccccaaacacctcgccgccgccgcatcgggtcgccgcccctccatccacccgagccctttctcgccgccgcggcgtcgtcggccgcggccgcggctgggaagcatccggatggcgggcggcgggcggggcgccgggctgccggcggcgggcgaggccgcgaaggccgggcgggtgggcgtggggacgacgaagagggccagggacccgtcgcccaactccaaggatcccaacggtataccgccgtgatcgccctccgcacgcacgcttcaatcggttcatctgctgttgatttttttggttggattgctgtgtgattatccagaatgctagatttgtgcatgcatggtgcggggtaggagatgcggattggggatgcgcgctcttcgcttagtatctcgtccggatgatgtgttctgctaatgcttgttttgtttttgtggaaggggatgaaggggagatgatggtaatgcttgttttgttttgtggaagggggtgaaggggagttgatgctaatgcttgttttgtttttgtggaagggggtgaaggggagatgatgctaatgcttgttttgtttttgtggaaggggtgaaggggagatgatttggggacatgttggttgatagctgtgggttataagaggagggagggggggggggctagtacttcggcgtcctgttatttaggacaataaaattgagccttttggtgtgtatccatgcttctgggtttgctatgctgctctagatagatggatgaagtcctgctgctgagtacaattagcttggcttgttacagatgctttgcatatgatatcctcggtactatttacggatattcgcaaatagcgattagatggtagctgggtgtaatagtagcccggaagcatgcattgtgcaatgaagcagaatggcatgatctttgaggcatttagttgcagttgtaattatgctcaagatcatggttgttaaggtgttgttgctaacttgctatggcgtcgctatagtggtaaggtggtagcagaggtcaaggcatccattctgccttatgttgcctccaccttagaggcgaagcaagtggagaaagggaaagaagaaggccttacaggcaaaactagtagagaaagggaaagaagaaaagggggtaaggtcatcctagaaggctagaaccctagttggcttgcagtcaccttcttcctcgctgcagctggcttgctgttgcaaattccatgccactgccttcagattttgttgcagcttgctgcagcctttgaatctctggcgacaccatcagcggtggacaacgaggcgagcaaaggcatcaagctctaatggcggtggtagcaggcagagatgttgaggtcatgtggaggtggccagcggctagtgcctcatctgctcatcatggcggctggtgcctggtggagtacgatgcctttagggcatagaacacgtgggtatgaagacctatgatgggctttatttggctggctgcctggcttagtgggccttttaccaatttccccttttctcttccaaatttctctaccatattctccactaatcaggcggtcacgcctcaaccatctcatatggtgtcccaacgccttacgcctcagcactatagtgctaaggcagtggtgggtcgccttaaacggccatgccaccttaacaacactgctcaagattacaccagtttatttcaccatgtcgcaagctgcagtcaatccaggagacagtgcacagatttctttgtatgtctctcttccaaaagtgtcctgacataagcatcctcaatctgtgtttgtttggaggaactttatcaaagatgcatctgttttctttgtagccaaatattccaacatcccaaggtaacaactccttgctagcttagtgaagaatccaacattgtttgtttattgaaggtgcataataatttattatggttgatttagagttgactaacactgcaaatagaacaaatgtgtaccctcatgcctcatcgctgcaatacattcccttatgttaatcaagtaattactgttcaagtggtgtaatggaatggttaactgttgtgcaaccttgtgctcaacagaaaacttggaagttcccctagactagtgtactgaggtttagtagaattgcatggcaagtttctgtataatagtttcatcacaagaagtttgctggtttatgtttgaatagcttgtggttcacaaaagatgatgtggacaaatctaataacttgacctatattacagtctctttgggattatgggagttgtagatgtatagtcccacttgaatagtgctattgtgctataccaaatttaacccatattccaattatttatattttatagttcatcggatttcttccttcatgcgatcttcctccatcttcaattatatccatctttgtttttttttaatctgttgccattatagcgatgctcctctgcattgaaccccaaccccccccctcatatgtccattattatttgtgtatcgtccactccatttttatttgtgtaacacccactccatttttatttgtgtaacacacacacgtccatttttttatttgtgtaacacacacacacacacacacgtccatttatttatttgtgtaacacacacacatccattttttttatttgtgtaacacacacgcgcgcacgcacacacatgtccatttttatttgtgtaacacacatgcacacacatctcatacttaccactcatcatctaggttttgttggagtgattgctgctgagaagaaaccagcactgcagcttcatggcgatgaaaaatatcagaagaaagctgggaatgatcctgtacctcctaccattgatgatacatccaaaactggaggtcttcatttgcatggtggtcatgtatcacaaagcccacctgattctaatgctttgaggtatgtgctactgcactaggaattttgaaatttagaagaaaatttcttattttctgtgatgtttgactaaaacatacttctttctgtatcacatcttaaaaataatatattttgtcactagttcgcaacgatttgggagttcatctcctggtggagatatgaagaacaaaaccagaaagcgtacctgtaccttttatgctcaagggcgatgcaagaatgggaagagttgcacttttcttcatgaaggggaggtatctggttctgataaccaggtttatggaaatcatggaggtatgaactttttcattagaataagctgaagaatatcatgtagctgtgaacttatgatcactctgtcaatctaaacacttttggttgctccttatctgctgtgttcaggcactggagaaggatctgaaatacaacatccatccagctcaaaagagcaccagttcaaaaattcagcggggtcatcccaacatgagatatataggacccttgttcatgcatatggtgaagataatagggggttgacacatcccgttgttaaacatagttgtcacatgctaaaggcttcgcatggtttcaaaattggtggttcattgactgcaaatcctactaatgaggtggttcagcttccagtagttcaagagaagaatcatgaaccttatttcatgggacatcaaattagtttgggcactaacaactgtttgaatgacatgggtgcctattctagattgcgcctagatggaggaaagctgcagtttgaagtggccaagggtgacagtccaagggattcacatctatcaagatcttaccttgaaaagaaccccttaaagcctgattatcggtatcaaccgtttgactcaactatttcattagatcctcaccaatatagcaagaagttgtcagcttatggtggagcaacagagaatcttcctcacaaacatcaggaagaaaaaagttcaagccatgtctcatacagtttgaatagttatacaggattcagaaagcaaggtcatgacagctctgattttttcttggttaatcagtctctccgagcaacttctcaccatggaaccctgcctcttcatcaattaacacctgataaggatgccagtcaccataaaggtgctgattttgacaagggtggtacctctaggtctacattacatgtgagcagttcatctcaacctgtggtagcatcggctgggaaactttccccaatcaaggatgaggtttggataacttcagtgccttttgtaccttcttttaattttcctgattttcctggcagtacatcaccttcaaaaagtcagtatgacccacttgtcgacagtatcgaccctcccaaagttgaaagtttaaataatctgaagacctcaaacatatcctgcagcatttcaagccaacatgtagatacgaatgttataagagggggaagtcttgaaaaaccattgacttttgctgacaagttggcaaggaatgtatctgctaaaggatcaaatgattttggtttgatttcatatgataggggacacagctctagcctggatggtgataatagggtgaaaacctgtgaaaggaaaaatgatgcatcacttaacaatgagaaatcagactttcgttttcatttggtggagcatgtaaaggagctggtgaaaccaatctggaaggaaggcaatttgagtaaagaggctcataaactgattgtgaaaaaatctgttgataagatttttgcttcacttgagccaaatcagatgccagagactgagaaggcgataactacttatataacagcctctgcaccaaagatagaaaaacttgtgaaggtaaaatatcttgaatttgttggtgaatggcacatcttctgattattgattatatgtttgacttctgtatgatttttgccacaggcatatgttgatcgttatcgcacatcatgagatccaggcttctaattatgagctacaacattgaagagatggggtttgagcctgctggcctaccaatgcgttttgttgctgtgctagatgttttgagtaaggtactctgttacatgaacctgtttggttttgtagacttcagtctgggctccctagcagcatcttaacatggtggatgtttaatttaatatgtttttgcatgtgagctgagaggagatctaatgcaaccaagacagaatctttattgcatgtgtggttaatctatgggttaaggaatgatgcttctaatgctgtttgttctgtttggtgaaaaaaatgtcttgcttaaaatgtaataccctgtttaaatgtaatgtccacataatttgtgttagtaaagtggacaagagggtgtggaaagagaagtgtagaaattggccatatgatgccctagcctcattttatagggtgagcatatagtatatatacaaatttaaccccatggtgcaagggattgaaagttaattggcgagattcttatcatgtgtccaatacattccacgtgttgtgactcagtacaccacttccaagttccaattttcaattggtatttggtgccaaagtacagcatgggagaatatcttctatttccttttgtgcttagagcccttgttcatccgatggcgattacttggttggtccattgaaatcaagaatcttgctcccttatgtctttcttctctaaaatacttgtgtagacccttaacaagagccctcttacatgtagacgttagtgtggttggtagggtattgtgagatatgtgaagcatgatgtggaactcttagtcaataataagcatagttattaggaccggaccggaccggcggttggaccgaaaaaaccggaccggttgggccgcctggttttttcgaaaaccgcttaaaagccggtcagaaaactggcactagagcgctcaaccgtgagatgctactctgaagaccacgtgcacgcatggatgaggagaaaatataggaaaaatgggtgtatggtgggattcgaacctaggatgggttgaatggagtcatggcgcaccaaccaccaagccatgttgttgtttgtgtctagagtgaatcagttatatatttaccttactgaaccgctttgaacatacggttcaaccaatcaaaccagtgaaccatcgaaccgagggcctggccggtttgatggtcggtctggtctcaataactatgataataatatcctcaaggatgattgcctaaaaaataggtaaagaattctattgagctaacttatttgaaaaaaaagggtttgggggcatttaatgctttttaattcgggtaaaggtaaacaccgatatggccatatgggtgttgtaaggaaggtagagatttccctaaggggaaaggtatatatgtcttcgtcactcgtggatattttgcatggtacgacgctgtgatgaatccgagcaaacaccaagatggtttaaccttcttgcgtaaaattaatgtgtgaagtatgaatagacccttttatggtatgaactgaaagtaatagtccttgaatgtaggattttgcttcgtttgtgcttttctttgtgtagtatgtgtagatgaatccatatcaaggaaatgttaagttgtgtaccttaatggctaacgtggtaatttaatggacttcacatgaaaagattgcctcaagaatatgaatatatctattgattgtatatgtgtggatttaggttggggcactttgtaatttccacttgggcattcatatgatcattacctcaagtagtagggatctcctaaagttttatgcgatactttgttagagtgggtacaatagcagactataagtcagctataaacatattttaaggagagaaaagaggagaggagagaaaagaggagagagaagagcaacagactacaaatttgtagccagctgcagcactgactccaagacgaaatgtgtgtatgacaggtgggatcatatattaatagtgtagtaggtaactattgtatgaattggctattaaattgactatagatgatttggagctagtagttggctatactattaaacttgctcttaagtacaactcaaacaagataggtggttgatggaccatagcgacccttgtcatgaccaaggggttgatagaccaagtgataggcgatttgctcctagatgaaatgatgtgaaagaaagatggggtcagccctgtacaaacttgtgttcgtataaaattatggtgcaacagtttgagttgagttggattactgtatttgtggtataaatgtacctaaaacaagttgaacccaagcatcgaataaatcgaagggatgaagtcgcctatctcagctcttggggggtgtacccatcttgttgaaccttgtcaacaaaggtacgcgcttccgaattgtttgcttcaagtgttgctagatcaattgtacaaatctaggcggtctagatgtcattgggtgataccaccaagattgtataacatagttgactctagttaaacaacttattggtaaggtcaaaatggaatccaaatgttattagtgactattgcatctacacacaagtgtacaatgagcaactccatgcctaccacattccacaaagaaagaggttggctcatgttatgtgtgatgccattcattgcaacgtggacaagggtggaattgacgacgctcacactacctgatcttctattgaagggataattctcactttgatcaaatatgatgttgatgacgacaatgatggaaatacctaaccctaatgtaactaaacttggacatgatgagcgggctaaactcaaccaacgcaaaactgtatgaaaattatgaggttcggaactagggtttggcgatgagaaaaagcgatacaactatatatggtagacgatggtagatgaaatatacataactaaaactttcatcatgcaacaaagtctttgatccaactaatgatgccttttgttgtggcctggttgttgacgtaaaatttcgtcactcacacgaaggcccgagagatttgcttgactccagtgcaggtcctagatttagatgaggtgcgggcgtgccagtcagtttgatcctgcaactgacaagatggataaattgatgatcaaagagccgatcggccaataagttgatgtagcgatactaaccgacgttgatagggttttgaacaatcggctatatattcaatgtagattctgacacttagataatgacaatggaagaactttaacaaacaatccaatcaaccgattataatatgatgaagtagatgtctaatgagccaatcgaccaatattgatacagaatattaaatgtaggctcgatggttaaaacatacatcggatggaagtccaatgcaaaaataacttatcggatagcactccgataaaaacgtagcacaaatatatgaatttagcaagacttagattatcagcagtcatatagaagatcggacccaaccgagacagttctagattagtctgatcaaataagctagataagtcaatttgatctatgctaacatgatggttataacaaatctatttaaaacaatattgtggttgtagagatatatcgaataagacagaaaatcggacctaacggagaccatcccaactataccgatgcatctcaaaacacagtgcaattaaaaacagaattgaaatatagggtagacaaatataccaactgaaccagagcaattgaagagatcgaagcatagccttgaacaatgccaatatagccgatacaattgccagggccagcggaacttaagggcttaccccttcgccggagatcgaagcgatgtagccccgcgtttggtgccatgttccgccggtgataatacctcggaaaagagggtggcaatgcgctgaaagttggatcgagagataatttacattgtccttgggtgtacatatttatacccatcggtagatacttgtccttattggatacaactcagacttttttaaagataaagtaaaagatacaagtcctgatcgaacactaaacacttttctaagcataaaaaggaaaattactaaaccctacctaattattagataaatcaagttgccatgtcatggtcttcacgatttcttcttaaactcggtctcttctggataaactttgcatcggctgattgtattctttccctgaccgaatccactaaagaatcttaccaaattttggtgttaacaccgttcttttggtgaggggataactctagcttggattgatgaatgcatagttgatgaagtggctgtaacatccttcccaaaaaaagactttagttctagacaagtcaatagccagaaatctaagtctttttgggatgtagggagtatatataatggaaaaaagagacctaaacttccaagccactacaaccacttctgggccacttcagccaatacaactactttgttacaattatcccccttaagggctaaggcctcataagcgcactgcatgtagcccggaaacccttctgatgcagactgtagcccaatgaacatgaaacatataacgaaggtttatactctgatgtcatctatgacacctagcctccaaaatccgcattagtccgctctcacatagagcgagcccatgttcacatagtacctcacttctacttttgtcatcgattcgtgtaaaaggattaacctaggtttaccatagttagagcaccaaggcttataaactgaccggcacccacctaaacatccaaggtggtactaaaccaccacttctaggccacaccactcctataggcttcaaacaagacaagctggggtgttacagatgtgttctaggtcatggaggtgtggcattgcatgcataaggtgggtagtctattacaaggcataagccctaagtttgacttgttccatcaacaatattgtttttttaatgaccttgaagtgctaaaaatgaattttgagatcagaccggttgtgtaggaaagatgatgagataagatttacatgaagtcaaagatcatccaatttggagttttcatgaagttgtgcccattagaaattagtatcatcttaggagaccaagatgacgtgttgaacttgaaaaatagttgaaggtattgacaagatcctctattgcctttatagattatccaagcatttgtcgcatccttgatcatgagagcctctcttattatttaaagatgacacaatcatagctcaatatcatttgctcaaacagatagaatataaatctaacataaaccgggtctagctatggcaaagttttgtacttctcatgcttattatgtgcaaatacttgatgaccataccaggaattatgttttaacctttctgtggggtagggcagcttaaggccctaggagagtgtggcatcccttgcaacttttattgtgcatagaggacatgaaggcaacaatttgggactaaagagatatggatggaaccaatggagcttagcaggtaagctcttcatttgatgattgggctagcatctcaatctaaactaacatggcaaaccagccttatatttgacgtcatggcatcaattggcaataagagtgaactggaatcaagttggtgaaatgtatgatgtctagttataaggtctaggaatttaagtagacttgttcctaaatgtaaacactttgcactcaaaattcttaacatggccttgcatggtgatgataccatgccaagggtaatatcctttttttccaaaatgaacatacctttaaacatgcatatattgcaaaatggtgggagtatttgtgatgaccatattaagtaccttactttgagccaaagagtataatttatagagcaacaacgagacttaacttttttgggaagaggatgaaattatgttccctcctttcatttgactaaagctaatatataccatcatttttagttagagaataatatgtggagccttagttacacttaaaaattgacttaacaatttccatctagcttcgaaagatttgattgacttgatgttcaagtggtgaaatatcttttttttaaaaaaaaagagagtaaatttcacctaatcacaggtattatggtctgagttgcacaaaccacatggattttgacacgtggcacataaccctagatattttggccataaagttttacaaaactacactattggtcattttgaccttaatgcaccacactttttagttctacaagtataccgcaatgtccctatagacaaggggacaagtgattcatcacttttgggcataggcctttgtcaatggaaatacaatggtaagaaaaaaaatagatagaaaaactcaaaataaaaaaaatgcatatgttggattggcacgacataaatccagtcaaaaataggattaagttacatctcaaatttatgagttctatatccatcatatgaatgttacatccatgtaagtatgatatttttaaattttaacgtgggagtatgtcaaattagttaacaacgtgcttctgtaaaactttaggaccataaacctgggttatgtgctacgtatcaaaatccttgtggttttgtgcaacttagatcataactagttgatactctgcgctttgctgcgggatatgtggatgaatgcatgttatataatatagaaatgatagatgttatgtttaaatgatgtggagataatgatttgtcattgcttacatattgagttctaaaaatacaataaaattgtaaatgatatgtcatgtttgcatgatatttaaaatactctagataataattgctagtgagtgatgatgtggcacacttgcatgtgatttagaatactttagataataattgctaatgggtgatgatgtggcacggttgcatactgggttttagaagttagtaagataggtaggtgaagttttatgaaatttactgttgcaaaagcaaatagtaccaataaatttagtgaaccacttcattgtcttccattacccattctcatttcacctaagaacttcccttcaattgtattgattgaaatgacacttggaccttcatattgcatttcacttaatatatttcttagcattctgctcaaaaaatatatttcttggcataatttgaagttgatgtgaggatgatatcatatctaaagcgctatcagaaagttatagaaataacttccattagctcagaaggtttaagcaaataatgccaagattggtgaatagccctttgatcctctgtattccacatttaagtacgagtgctagatactatcagtagtaataggaagttctgagctaatggcattccaatgcgcacactactcattcaattcgctgatttgattccattcctctctcataatatcttgaatgtttgtgcagaaaccatgtctcatgtaagacctagtttccttctcttcattaaatctcttgccacatcacaaatcctacgtggcttctcatttaatactgtggaaaccatcctaggtggagtattgggactgccctaataataacttccctatattagctcccatcaatttgaatagccgttggccttccatattatttctatcacttaatatgtttcctattataattgcaaagaatttgatgtgaggatgagatcatatctaaagcattatggataagttttagacaatttccatttagccttggaagatttgagcaatccttgttcttgaggcaatttatgacccctccttttttgggcaaagaccaaataataccatttaacaactttctatcttacaacatgttaaactttaccaaattttggtaggggtatttggagcttgtttgatttgctgatgagacaattctgtaatgtacgacaatgacaagtatatcttttgtcccttcttcgaagaggatattccctgatatataacagtttggtttagattcaaacggtcgtaccttgcagtcttgcagctaactgaatagatactcaaatacagttgagttttgcttttaagtatcatgtggtgctattgttcttcttagtggattgagtgttattccctgcacatttttttttcttttgtgctgcacctgacatgttccactttcttgctttcagtacacaacatagtctacatggagctcatcggcactaacaagctgtcatcaatgataatattgttttcttgatctccctaaaaggtaatttctcatatggcaaactagattgtttatgaatttctgtagccctatgcatccaagtagcattttttatgtactttctatggtggtaagtgatgctatacagtgaaattcacaagatattttattgtcccttttgaggtataataatggttagattcgttattccaaaagaggttgtttaacctgcttaacctaggattcaaacctaggtcacacgctttgggaggtaggacaaatttctttgctgcggccgatgattacatgatgggggctagtagtatgatgtggtactagggaaggccagggcccttggtacgacgggagtaagttcaatatggtatgaggggaacttatttgctgttggcttactagttaattagcttggaattactgaaatcatgtagaagtttatgtacttgaagttcaggttcctctataagtctatatacaagtcaagcagacatatcaaagaaaacatcatcacccgtgtaagatgaatacttagtgctgaaattatatactaatgagaaataattttgtgagattttgtttagattaatatggatggaaatattttaattaaatgtctttcaagctcaattcaatccaaactacaaatgcacgcaacattagcttatattccagcactgctttctggatatagagtgaggttctagagttgtgccctgaaggtgtttgtacttgacatatcatgtatataatatattccctccattttcaaatgcatgtcattgctgctttcaaaatttgttgccaaatacatgtctctatgattttgaatctgattaagatattcaatgttgttattatggtttactttttacccatgacaagctgaaatcacatggtgctaattaagatattcagtgtaggcactatggcttttgcagtcagtcgatgtttgtgcaagatcctaaaaagcatgtttttgggtaactaataatatagataaaatactaattatgcttagcaaaacttccaatgagatcctgagactacatatttcatccttcatagttactgtcccagagcttcaaattatatccctctaaaagaacatcaaattattaacaaatagttatgatatttcccttcttcagtttgtaaaatgtttttttccaatgcttgtagcctatcagcaattacaactcgcacaagtccaattatcatgaggtagttattaggccaacaactacacttgttatgttgatttgtaactgtaatgtgatttgtttcaggcaccatggattatatgtttgatctggttatgctatgagtggaacatttgccctaatgagcactgctgaattgctcgataattactagagtaagatggcatcttgctgactgcatctgcttccaataattcttaatgaaggcacgaaacatggtacttgtttgcaccaagatgattatcaagtgttcagtaaatcagttccctttggctactaattctgtgctctgagagatgttgctctcgagattccagtggagttgatgctgatccccagtctttatttagtaaattgaagaccgcgatggtccacctgaatatattacttctcaaagatagcagtactgatacaaagcccaagcacaggcgtgaaaaataagtgacgaggaagggaaaagagtacgatgaggttatgtttcatgattttcatcttgttgatgacagggcagaatgggggtcagtttgtgtaggttcttgggtaggttcttgggtgcgcattgaagccataacttgatgatccgttgtttattattccttcatgatattagcttggttggttagaggggttggagagatatcttggagatctttcagttctttggatcttaccttcacttagaggagatgtgattcgagttgttcaaacagggctgcatgatgtgtttctagttcacgtgtatattcatgggctagtaatatatccagaaacatgctgcaaatattgatgggcaagtaacacattcagaaaaatactgcaacgagggtgttggtgattcactaacttcacttaatgatggaagtgaccagggttttttcctcttgtgattcagaataacataactacagttctagcttacaaagtgtttgacgtgaaccataaacatggccgtttgagccatgctgattaatcataaaccctctttctgaaggatgtagaccatgcagtgtttgcagtcttctgctgttgggtcggtgcatcgcaaatagaccttggcagaatgcaaaccctacctgccctctgcatgctcactcatattggaccatacatgatacatgtatgttggttgagtaatttcaatccactgtcacgtggtgatttggtcctggatcagtgtgcttggatgacaaaaactatatccttgcttttattgtatttgttgtgcatcagagaaagggaagtgaacagaagcacaaactctactattgcttttattgtatatccattgagcatcagagaaggggaagtgaacaaaaccgcaaatgaattggtttgttggcgaatgctaccagaagtcgagcagatagtatgttaaagcgttcagggtggagaattagaaagttaacgagatggggacaagatggcagttgccgggtcagggtattctcacaataaatcttgatggcgtgtcttcctttcagcatcttgagtttgttttatgatccgtgatcacgtttgagttgtaatctggttgatatcctgtatcaagggttcggaaacagcgacgaatctgggcgttagaatattgttagttgaacccaattctgtgatcctgaagaatgcgactgaaggggattcttttgatatctcagcttaacgacgccctgttcgtattcaaaaggtgctgaatatgttcttcagtttacagtagttctcgtgttttctattgtcggtgcaagtgtgtaactgtaaccaagtggttcatgccattgccatgtccatgttgggttctaaccctagctcatgaggaatctccaggttgctttaatggagccccctgatgttgtcctggacctgctggccagcgatttcattgtaatcacaaaaatgaaaaaaaaagagaactttttctttggtccaaagcacggtgtttccagacataagtatagatggaattattcatagcagctcacaagggaccatttgtgaagagagaaggcaccacgaccagcctactgttgcatcacgctcgtaccatcatgaggggaggacgtgccctgcacagatctcacacgcacgctgatggagcaaccgccaacgaggcaacgacggacgaggcctcccctcagaacaggaaagaaccacatggctccttgtgagccatgtaacgcactggtccgcagatccatcaaatcgtcctatcacgccgaaccagaaaacgtgaagcaattcgattgcccgtatcacaccctgacgcgtcgacgaaagcaccggtccgctcgcctcctcctgtggatcctgtgtccctacagcccaacagcccctgacccagcaatcgtcaacctccaatcggcaattaccgcagtgtgctgctaccacctcagctcgttcatccacacgactccacctactactacgcggagtcgtcgtcatgatccccacacactgtcactgaaagccacgaaaagatactagaagtctagaggagactaagagcaagagcaaagagcaagataataatagtagagctcactatctagtagactactactccctctatcttataatataagggattttaagtttttcttacaatgtttgaccactcgttttatttaaaattttttgaaattattaattattttatttgtgacttactttattatctacactactttaagcacaacttttcgtttttatatttgcaaaaaaaaatttgaataagacgagtggtcaaacgttgcaagcaaaataactaaaatcccttatattgtgggacggagggagtattagcccattttaaagcaacatataatagattagctataaggttggctataatttttcttttcctatctctatctctcacttatacatttattatttttgtcttggagtttgtgttaagctagctcttgcatgagagccaacacctttgatttttttttgttacctctctcctccacataagtttatagtaagcttatagctcactattatacttgctctaatcccctcccccgcctgctaaacgagagttgtaaacgcatggattaacttagggtgtgtttagttggggaaaaggaaatttttgggtgtcatatcgaacgtttgaccggatgtcggaaggggttttcagacacgaatgaaaaaactaatttcagaactcgcctggaaaccgcgagacgaatctttttagactaattaagccgtcattagcacatgtgggttactgtagcacttatagctaatcatggactaattaggcttaaatgattcgtctcgcgatttcctccataactatacaattagttttactttttatctatatttaatatttcatgcatgtgtctaaagatttaatatgatttttttggaaaaatttttagggaactaaacgggccctaacaaaaaatagggaccaaatccagcagcacgtcacggctgctaaaagcgacacacggcgacgccccctccaaaagaccaaaaacccaagcaggactgggaacaatacggtttcgagctgaaaaagaagagaaatcgggtggatctggccagtacaccgaaccgcgtaccgcgtagtacagaggagagagagagagctcacagttgttagcgacccggagagcggagacttgctggcggcagacgcaacggcgaccgattcgcccgagcggcacaacccactacgtgtacgaccaccaaaccaatccccatcacccccatcacccggctccgttctttaataaagaagcattccttctgtgccaaaatataaacatttttagtatagtgttaagttaaactttttaactttaactattaaaaatttttaaaaaataataatgtaaaattgatgtcaatagatttatcgttaaaaaaaatatcataatacgcaactctttttatttaaaatatcttatttttatagatattattagttaaagtagcaccttaaaaaccgtgtcagtctaaaaatacttactatattttaggacggacgaagtagattttaactcggttttttttaaaaccgttaaatagtgtatttcgtgtaaaaattttatataaaagctatttaaaatataaaataaatttattttagaatttataataatttataattgattttctggtttttacgtgtcatcttcatccgttgcaaacaaggcctacgtcgtctcgcgcgctcccgggccgccaaaacccgcacgaaacgatcgaacgagagacgccgccgccgccgcgatgcgcatgttccacgcgcccagagattcgcggcaaccaagacgtgacccgagcgacaaggaccccgaaaccggcggcacgtacgctcgcagccacccgtcaccctcctcgctgtccccgtctccgcgccgcggtcccgcggattattccgcgatggatcggatcccatccaagacgccacggcgtttttagcgtagcgtaacccgccagcccggtggaggggcccatcccccacgccacgagaccgcgcgatccggcggcgtcggtacgagtagtactagtcctccactagtacaaggagtaatactctagcggtagccgtccgtgctttttttaaagcggataatgtgtcggccgaggtggattagcggctaaaatgccgatactaatcgagatcgggcggcgtgcgggctgctttgtttcgcgtggcgcgtcgttgatgagcggccggcagctgccagccccacccagcgtatcagccggggggaaaaattcaatcgtgcctcgctagcagccggtgatggcgcatggaagctcagagaggcacgttcgtgcgcagttcaacatgagaaattatcacgaagatcgctgtccggaatagttgatgacagtagtcgttccagacttccagtaatttcctacagcccacgcggagcatacggcggctgcctgtcaccgtcgtggcagattgatcgtgcagcacggcagcagaccttggtccgctgtcatcgtcggaaataaatagtgatttcttcttaaccaattgctctttcaagtttggggtattggctgtgtttagatccaaagtttggattcaaacttcagttatttttcatcacatcaacatcttatacacacacaacttttcagtcacatcatctttaattttaaccaaaatttaaactttacgctgaactaaacacacagctgtcgtcgtacgaataacttctgtcattcaaactcatatagtagtaggagtattttagaaccttgaagctttggtggctacagtatagtccttttcttgtactactaaagatatagaaaaactatcctttattactttctaaccatataaaaagaagaaaaatgaaaaaactatcactgcgtgcaaaaccatcattgtgcagtccaaactccaaacgattgctgcctgggtccaattacttctattgtcatcaagtgatgtgtagttcttttttcaacacaagatcaatatccaattacctatacctatgtttttcttttttagccaaacgatactctgttcaaacatttcctatgacctatataaacataaaatatatctggatttattgaattaaaaagataaagcaaaatagaagttaaagttcatctttgtttggattcgaaccattttctgcgttaccaaaacgttggcaactttaatcatatgaaataaatagcactgacatttgtccacggtagttcaaattctatattatcaaatttggctgtgctaatacttattaagcttctgttagtaccaaaatctagctccaaactaaacaaactcaaaagttgctctttctataatatgtgtatgtaatacatattttgatatgggaacacgcatatcttgcacacgctttgcacattagctactccctctatcccataatataagtgattttgatattttgcttgcattgtttgactattcgtcttattaaaaaaattagaattatcatttattttatttgtgacttactccctccgtcccaaaaaaaaaggcaaatcctgggtttccgtgccaacgtttgactgtccgtcttatatgaaatttttttataattagtattttcatcgttgttagatgataaaacttgattaatactttatgcgtgacttgtctttttaattttttcataatatttttaaataagacggacgatcaaacgttgcacacggataccagagtttgtcttttttttgagacagagggagtactttattattcacagtactttaaacacaactttttattttttatatttgtaaaaaaaataagacgagtggtcaaacgcaaaaggttaaaatcccttatattaagggatggaggtagtaattagtatgatagaatttttttaaaaaaaatataaatgtatttctaagagtataacaaatatatctaaagtctcaacatcaaatcattattttaggtaaaaaggaaaaatatgacagatttaagagtgtaaatatgttgtcttttttaggaaatatgttttgtctttttctctctttatatatgttgaatttgaagataagaatttccacacaagtaaattacatgcacataattttctataattttatgtgacacttattagttaaatatgttacacttagtgcacccgaagattgtgcacacatgatcctttcctagtttactacatcggtaagtgtaggagactaacaattacgaagaaaaatcaagtgattggcatggatatcaaagctaaaaaaaaaactttcagtatagtatacaaatgttgccaaattgctcaattcaatttatgtacacaatttatccataagagtttttattttgtcaaccacagctacgtaatgctcctacgtatatttgcatactccctttataaaaaaattaacctaggaggagatatgaccccataaatctggactacctttggccaggttcggtggtataggaagggttatatctcttttagttttgagtttttttatacggatggagtagatatttag

SEQ ID NO: 25675 - DNA, 8612 bp, Oryza sativa
cccacgctacagcctcgaacgtcgtcgcccgcccgccccgttccctcgcgcgcctgccgcctaacgtgccgtcgtcacccgtccctctcggcgttttttttttctctctctctctctcaagtctgtgtgcagtgatttaatccgtcgcggcggccactttacgtggtgggtacgggccaagcggcggccggctttatcggcttgcgcggctgtgcgtgtccactggacgtcacgcatcgcatcccgctcacgccgcgccgacgaggcggttggagagatattgtatgatctctctctcctgacgacgtgaggtggtgtggtgtgggtggacgagacgacgggcgacgcgggcaggtccgcgtcgcgtgccgtgcagcgccgagtagagactggagagaggaaggggcggcgggggccacgtgcctgtgcgcgcacgcgggcggcgactttggttgcccccacggatgcgaatgccgcccagaccgcggctcgggacgcacggatcgtgatgcgtcgcccctgtccttgcgcgggtcccacgacgcccgtgacgtgctcccacaacgtgccgttgtacgcacccgcggcgggccccgcgagcggcggctttgatgcattttgtttatgggatgggaacgaggagacttcgcagtccagtacctaaaccatagcaatatcacgcgacgatccaataacgtttacacaaaattaacgtgtttttgggaaaaaaaaggcagaaaattaaatctgcatcattaacaccatttaaaataaattgagacattactttttttcccatgagaaaaagaggcttaactaatacagtattccacctctaatgacttatcatcattttcgtcaaatgcaacacaacacaatcatcctattgtcttctcaatctcaaataaactactggcggttatcatttgccatcacctaaccacttaccattgtgttcatttggtttcattagttcaaacattaaagatgtttttttcaccgatatatgtctgtatctaattcatcattcccctaatttcattcccattgcactatcttcggcctcttcgttgccaatgatgcacaagctattaaagagcacggtgttgttaggcaaaacacaaaccttggcatttgttgttgccattcgccaccacatatcacttgtcttaccactaacaacctatgttgttctcttcgagccccaccatgatactctatactaatagtaaaaagtagtctgaatcgttaatttcatttgatgaaatggtttaggtctatttatactaacaccttagttagcagtagtagaaacatgtagagatactgttgttcaaaagaatagatgcggatagatataatcatcatttaacaatgactaaaccttttttcttcttttttggattttttccatggaatattagcgatgccaacgtaatggatgatgatagatagttttagatgggaaaaaacataaataatagttactcataatcatgttattgtaaattactaatttacctataattagttggactctagctctagcctttatctaaaagttgggttacctgtgaacttagagtgatcctatcccagttctttaatgaatatttttagctatcgcttatattagccgctacccttgtttctcaatgaatatttattcgattacatagaaaatacaaacacacatacattcctaagcatttaacgacaatccaaaaccacaaaaacattacctaatgcattttaaaagaggcatgaacctataacaacttcttgactgtactaaattccgattcggaatttcactaacatgtacgcacctaatggtataactatgcacacacaattttaccacagtatagtcttgcatatttcaccgttttgttgtcgtcaattttaaaatacctgaggatataattttggtacaatccatccgtaagaaacaagactacaattcatgaaaaataataataaatgtatatttcctttaagtaaaaacctctccggactaatacaaacacatttctcctggtttcccgtttgccggggctgaaatgcaactgcactctacaggttcactcacgcgcaattagctggttttgatgggtcaggaggaaaaaggcgcctgccgaattgtaatgccgccacgctaaagacgaggggcggcggcgcggacagtcaaaccgctccctgactgcgccgagttttattccctgccgctccaccacccgcccgctcgcccatttcctctccctttttaaccccccacctcctccctcctataagtccctcctccccaccaccccctcatccgcaacaccgcagctgcacccgcatccgcaccgcaccatcagcgcgcaccaagaaagaaacacggagaaaagaaagatcgccatggcgccgagaacgtcggacaagactatgtcaccggcggccgcggccaccggactcgcgcttggcgtgggcggtgtcgccggagccgccgccgtgggcaccggccagcacttccgtggcgtgaggaagcggccgtggggccgttacgcggcggagatccgcgacccggccaagaagagccgcgtgtggctcggcacgttcgacacggccgaggaggccgcgcgcgcctacgacgccgcggcgcgcgagtaccgcggtgccaaggccaagaccaacttcccctaccctaacggcgcgcccgccgccggtgtgaacagcggcagcagcaacagcagcaccgtcgagtcgttcggcagcgacgtgcaggcgcccatgaaggccatgccgatcccgccgtcgctcgagctcgacctgttccaccgcgccgcagcggccgcggccgccggcgcaggcggcatgcgtttccctttcgagggctaccccgtatcgcacccttactacttctttggacaagcggccgccgccgccgccgcctctggttgccgcatgctcaagattgcgccggcgccggtcaccgtggccgccttggcacagagcgactccgactcctcgtcgatcgtggatctggcaccatcaccgcccgccgcgttggcgaagaaagccatcgcttttgatcttgatctgaactgtccgccgccgatggaggtctagcagccggagtttttacatgatgaccgctagttcatttatttctttttaatttttagtagtagaaaaattccgtgtacctcttatgcctagaccctcttgcttaactgagggaagacatttttgtaaatagtttttttcgccggcgatgtagtttaagagaagatcacaccatgtgtgtcacctaagacatatcctgccggcgttgttatggagcgggattatatatgtattattattattttgatagtcatgagaaactatgtagaaacccttctaagaaatcatcttttcactctgttttgcttataagctctagctcgtgataaatcaggagcgttaccggcaaggcggttcatttattggtggcatgtcgtctgagcgtttgcacttcgaacccgtctcttctggtctcttgcttgcgatccatgcaacaatcgccgttatctttgtcgattaatgaacactcagtcgtctcgtcgtgcatgggcatcccacccatacagtctacaccactcacgtgtcgactttagcaggcaccggatcgatcacccgtatcagcggcgatgtcattttaaccccgggtagttggcagcacgagtgaggtggaatcattgtcaattcttacgcgtgtagagggatgaggcctaccgacgctacagtcgccgttgccgacgcaaagattttttttttacccgttcaacgcgggcactcgccttgcccgcgcgcggtcgttttctgaccaatggtgtcagggaaaccggagggaggaaaaaggagagaaaaaactattgccgctatagtacgtgttgctgtcaaggctggggcagcggcacaaggaggcgacgacgcatgtggataacgaacgcgtaaatcgaatcgagccgaatagaaaaaaacaccggcgcgggggcgggcggccgccctgagcggcgtgcggtggggcgggtggatctttcggctccgcgtcggtgtgcgcccgcagctgtcgtacggcgtgtggatggctaccggcaacgcgcccgcgtgctgccgggttggttcggttggttggtgggttggttgcgccccgcccccgcctgtgcctgcctttcctttccgctcgtgacctcgggagtaacgtgagcgtgtgggcgacgacgcccacgcccacgggccacgtgtgcgccgctgccggccactcgcagcagcagccgggccccccgggatcgtcgctgcggccgcgcgggcggtgtggcccgatctgcgggcggccggcgcgtaggtggaggcgagtttccgttggctggattccgtggtgcgtgtttggcccccgcgcgcgaggacctggcgtggtcgcggcagacagggggcgtgggaccacccgtcgcccgcgcgggggcgtcggggcggggcgcagtgattcgcgcggcggccgtttcgccatcgcgcgcgcggggggcgtgggccccacgcccgcatcgggaggtcgccgctttcgtcgcggcgcccccaccgtttgctcggctgtttctttacggcttctctccctttcttgttttttttttctcttttttcttctggagcggctggaattgcggggcggccggctgctgggtgtgcgtcgtgctggacgactgtccagaattcggcgtatggccttttctgcgaagccggtctgtcgttgccgtcggggagacgattttcgggcgatccggtcgatgtgaggtcagaagtgacgagcggtgattcgtcgaaattaattatacttggaaattcagggctcttcattggtgaatccaactgtacttccgtgtgatttgtcctatcctatactggtggacaaaggtggcgaagctatgacctgtgaaggcgaattcttatcttatgcgccagtactattgctgcggcgtgccggcgtggtgctcgtcgtcggtgcggcgctgcagcacgtgaagccgcgcatcattcgcaccgcaaaaggtgcagcgccctactcctacatgtcactggtcacgtagcgtgtactagtccatgtagcccaaaatactttgagctgggccgccaatcccaaggaagaccgagaaaagcgaagcagccggtcaaaaggtatttgcggctgcggcatgcgattcacttttatgcttttcgtctactctatcgatcggtccagcctctgcttgatgccctctttgcgatagctccagtgaaaatgtagagtgtaataccctctccatctacttttgatagtcatatttcatcttggcacacagatcaaagataaataattctacttatcattcatttaaaatacgctactagttattcctcgtaaacaagcaatttattgatatttacgtttctcgatgtatatgtaaccaatcttatgtggaagaatggagagtcatgcattaaatccgagaaaattattaagatgatagattgttgaagttaaatatgtctatcaaaaataaaattttcagatttggaaatattactatcagaagtagatgaaggggaacatgagaaaatacatttgaaaatacatttggtcgctaatgaagtgttaattctgagagtatcaatgataaaggacacagttgtctcattttcttcgctacacgtaactgctttcagtcaacatctgctgaatagcgagtttataaatggtactttatctccgtactaaaataaaattatttttatatgcttctttaatgatcgtgtataactaaacagaaagagactattggctaaaacagtttctgcagcaataatcaactgctacaaaatgatatttctaaaataatccataagttcccaatgtgttaggaattaaaaatgtattgtaacacagataggtaccaacaatatgacctaaatacaactatacggaaaaaaagccttgcaacaaaggatagaattccggacagataacactaatatagaacaccaaatatgtgacatcttgtatgtgttgctccaattaaaactggcgcatgtaagacatttgccaattcggaatcggtactactctaactctatatattgtgacgttaatatggatgctatatcaatgccggtcattttgtaaatcagcataaagaagaaacgagctaaccgaaccgaaccacccgatagcacggggatctagatcgattgatatgtcctctccctcaccttcactcttgttgtcaatccctttgtccctgcactatccgtctctccagagtccacccccctcactttgctcagcacggcaacggcttctcctctgcataagattgggatgagggaactacacgagatggaaagctgataggaaagtcgttgttgcagagactaaaaacttcgaaacataatcaggcttgtggtagtggaaaaaggaatcgaattgctagcaatatggaagttgtgtgatgatggcattcaatccgtcacgatgtgggacgacataacaaggtaggggtgggtagaataagactaaaccaaaaagtccaaaatttattcggctaattccgtctgtggtcttggttaaccatagtgaccgatataaccataatgtcatttgtgatgtattgtatgtcgtatgaagttgacgactaaatgcatgatgcttgtgagttgatttattcttactacttgatcctatcatgtaatgtattgtttggtgtctgatgttgccttgtatatatgtgatatataattatcaaaagttgtcttaaaagaggtaaagttctgccaaaatttatcttctaaaattagcacagttcagtcaaaactgagactgaattaaccgatcctgacaattttgcattgttattcggttttcactttacaatgatcgaactgactaaatgactgaagaccgaatatcgagaccgggatttggtctgaccgaatacccacccctacaccacagtctaagtagaagtactataaattttcataacagtagagaaaaaatgttatgttcccacacgatacttttttttattattttgttgtagggagaagccgagtactagtgttttattctccacttagtacccgaaacatgtaaataacattatatgtaacattttgatctaactaattaaacatactattacctcggccccagaacataagaagttttattgttggacacagtttgtcggtgacatgggaccgggagtatcatgactagaggcttgaggcagacacaatcgcccacgtggcctgtcaccctcggggggcgtcgggcccgagggtgatgtgttcgccctcctctttgtctccccgaggggtcggaccgctcccgcctcggccccgagggccgaggtgccccgaccccttgtgggttttgcgccgcgtatatgaggtaggtgagcatagcggggctcacctaaccacatttattgcggtttggacgagcgcgtcacgccgcatgtaacgcagtgcagcgcgctcgtttatccggtcagtgaccagtcacagaccgatcagatcgtgggttaggtggcgacaggcggtctgacgcacgcctcgccccatcccgtcaggatgagagcctccaagcactcgtccctagccggagccggcgtgttagctcctggagatggcacattggtcccggtcagatatataccaggcttcatcctaaccattacaagcaagacattgtatgaagaggggcgaacatgcagattgataaactgacgcgtggtggacaagaatgaccgatttgtgactggtctgacactggtcatgtcgtcagcagacagccatgttcccacgtcgcgcctgcttccggcggaagtggaggtaggtatgggccgtcccatcagaaggtcattcggacggcaatcatacaaatctccgtccatttatgaaaagataggataagtccccacaaaaaagagagagatggtgcatgtggtatccccttgaggtataaaaggaggaccttgcccacttagaagggggatggggatttttcggatggagaaggatcagagagggagagagtaagagctctctggttctccagctctttgtagcttcttcatacatagatccaccaaaacacaggagtagggtattacgcttctcagcggcccgaacctgtatacatcgcccgtgtcttgtgtgtttccattctcgcgaaccttccacatacagagagcttagaatctcaccctgagtccccggccgaaccggcaaaggggggcctgcgcggtctcccggtgaggagccccacgctccatcatctggcgcgccaggtagggggctctgcgagtgatcttctgagctctcgcactcttgcgtgtgcgccaagcttttcctgttcagcccaatggccgaacaagcaaaggcgcacaacctctctccgagcgttagcggtgacgatgggaagtcaaacccacgccgtcgagctcgtactccatcgccccctccacgccaaagtcctaggagggaggaggtgctcgagagggtcgaaggatccgcgacttcgacatccacgggtgatggagaaggac

SEQ ID NO: 25676 - DNA, 2673 bp, Oryza sativa
tccggttccggtgtggcagcatcggccgcccccggatccgctgctcagacagggcggcgtgacaggaggaggaagaagaggtcagcccataccgacgacgagggtcatctcctcgccgtcgagggcgcttcgcgggccacccgaaaggggaggcctgcgagcgacaaaaagaaggaagccgacgctccctgacctcggctacttggaagagcgaaggtggcgcgcggcccttcgagccgcgcgcaaccagcagagcctgcggcgctaccatcagcgccacgtccgggcccgatcactctgcgtcgacgacctcgtcctacgccgtgtccaaacgcgtgctggactgagcaaactctcaccaatgtgggagggtccgtatcgagtgatcggcgtcccccggccgggctccgttcggctggccacgggcgatggcacagagctgcctaacccatggaacatcgaacaccttcgtcgcttctacccctagtgggggtcgggtgtcaggtcttgggctcgggccaaccccgcacccccccgggtgtgcagggttggccgggggcttatcttttttctcttccgtatttcaataaaagcattttcgatttcctaaaggctgtatctgtgctgttgtttccttttgaaggatcttgacttgaaataggtcactcgtgttcaatcctgccctcgggggctcgggtcggctaaaatcgccaaacggggcccagaaccgagccgtgccccgggacgtggtgaactccgggggggaatcggcaaaaacccacaatcgggtcacccataaccctcggtcaccacgctcccggcctggccagtctcgacatgtggatctccccaggcactagccttgacccgcgccgtttgaggctgggacctgggcacgagcccttgttcaagccaagacacagaaggaccgtggcacagaccatcctcgtctcatacacagaacaaatgaaattgacacaaaaatttcctctttatttgattgcagattaaatcagcctataacaagaaggaggcccgaaggcctcggaagaagaaggaaaagaagaaactatttaaagattggcgggggcctgggggctcactccgatgcacccgggtcgccagcctcgtcgccactgtcggttttcccttgctgatgcgcgcgatttgcgaccgccgggattctgcccgaagagagagagagcagggaggagaggcccccgagccgaacggcggcccaaggcccccgacggccggagctggctctccgcctgcttgtccgacggtgccaggcgcccccgacccccaggatggccccgaggccactgcgggaaggccgcgcctgtcgccctctgaccccgaggtcgtcggcacagaagccgagtgcgctccgcgtggcctctcggatggagagcgccgtggagatgtggcccctgacgaagaagatcggccccgccgaaaggtgcagcggcccgtctacttcgttagcgaggccctccgggacgccaagacccgataccctcaggcccagaagatgctttatgctatcctgatggcttcgaggaagttgcgccattatttccaggcgcatcgggtcacggtggttacgtcttatcccctcggccgaatcttgtataaccgagagggtactggacgggtggtgaaatgggcaatcgaactctctgaattcgatttgcgctttgaaccaagccacgcgatcaagagccaggccctcgccgactttgtggtggagtggaccccaactcccgagctcgtctccgtccccgaggccagctcgagcccatcgcagctgcctcacaccgccctctgggtgatctagttcgacggcacctgtaggaaccggccccacctatcaccaggccttagaagtggcgtcacgcccgaccgcttccctcggggagggcgatcgccctggcataacgccgggggctactgtcggtgacatgggaccgggagtatcatgactagaggcttgaggcagacacaatcgcccacgtggcctggcaccctcggggggcgtcaggcccgagggtgatgtgttcgccctcctctttgtctccccgagggggtcggaccgctcccgcctcggccccgagggccgaggcgccccgaccccttgtgggttttgcgccgcgtatatgaggtaggtgagcatagcggggctcacctaaccacatttattgcggtttggacgagcgcgtcacgccgcatgtaacgcagtgcagcgcgctcgtttatccggtcagtgaccagtcacagaccgatcagatcgtgggttaggtggcgacaggcggtctgacgcacgcctcgccccatcccgtcaggatgagagcctccaagcactcgtccctagccggagccggcgtgttagctcctggagatggcacattggtcccggtcagatatataccaggcttcatcctaaccattacaagcaagacattgtatgaagaggggcgaacatgcagattgataaactgacgcgtggtggacaagaatgaccgatttgtgactggtctgacactggtcatgtcgtcagcagacagccatgttcccacgtcgcgcctgcttccggcggaagtggaggtaggtatgggccgtcccatcagaaggtcattcggacggcaatcatacaaatctccgtccatttat

SEQ ID NO: 25677 - DNA, 25875 bp, Oryza sativa
agggccctggtcacttcgcgggctcgacatcagccacctttcgccgtggcactatgtctacttcccggcgagggtgcaggcgatggcgccggcggcggctggccatgtcgcggcgcacgtcgccgcgtcgctgccgtcgacgacgctggagctccggacggggccgagcgccggcgagctcccgttcgacctcaacgagccgccgccggcgctgctgttcggctcgtgatctcgacacgtacgtgagtagagcatcactgggtagtactaggaccaaggatcaagcttagagatcactagtagataggggtaaccgattaatgtgggagtggagagcactggtccggctgtgtacatacgtactactatttaaggaaagtttagcgttctcacattgcccctgttcttgtttccattttaagaactttttagcgtacagcttttcatctcttctgtagtataagacggttttctcactcgaggttagtactattactgacctgagaacttgcatggtgatggtggttgtggggcgagtgagcggttggttcggaacatttggttggtcaaaagctagtactacaaaattttaattcatgtaaaatactagtactggtattataagaaagatttcagttatacatattgatcagtaaatcaaatatacttaacgctctaaactactagtgctatcaatgcaagccccgttagtgaaaattaacagtatcaatggggtttcaaaaaattaacagtatcaattgatatcaatgcagccttaatttacttaactgtttaaactctaaactagggtttgtaaaaagacattcaactcgagatgaatggcacacccggcgtcccgagctcccggcctcactgacttgaccatctgcttaaaagtcccatcacaaaatggctcgcgagtccaccctgtctcgattgtcgtttcctgtagtattactagtacacacgttcgattatgcttctgtagttatgcgcacagcttattaactactccatgtgtccttagattttaaattagatattgtaaaataacttatgataaaaaatctataaaatcaactctaaaataaagttttaaattttataattttatttataaacaaaaacataaaacaaacaatgcgtccgctacagactgtgcccaacatttgatccatttagataactatggttttaatcacctatcaacagacgtggctaatgtctccttgccaggaaaccaaagtcgaatcttaccgataataaagtgacaagttgcccgtccaacttgcttacaggggaaaattcataggccttttcatctatatgaaaaacataagaaattcaatggatctcaatactatgaaaattatatttgttttattttttccgttttctcaaatcctgcattttatataaacctgcgatgcagatatcataatcagccaattccaagggtaatctgtaaaaatatccagttcacgtgcttttctacatccaccctttggaacatctcgtattatgctttactcggagtattatgctttattcccttcattccaaattgatctacatatagttttttttgaggttattactaaatgatctacatatttatgttcatttattaagtatattcgttatttgtgtattggagtaaatagacattagcccacatataatatcttgatttgctgttggctaggaaatattagagatggtgtatgcattaaatctatggctagagtagatatagtataagagagttattagctttttttttttgtcttggtgtacctataaaatatgtagatcaatttggaataaagggagtagttctcaacctgtttgtctacacaatctttcttatcatttggtccacgtgaacgcggggtaccagatttgtaacgcaggagtacgtagtattacaaataaacgacaggccttactgaattaggttgtgttcagctggggcatgtgatcacataccttacgttaacaaatgtcctttggtctcgttcatcactatacacgcacaattctaaatcaatttgttctacaaaagcttgataccgaaggaacctcggttccatgctggcaccacgcagacaacagattacatctaactcaaacttccgtagcacaaacactaaactaccttcatgctctccgcaaagcttccgggattgatggttatactcttggtgcaattatccgtcttgtagatgccaaccagcctatcagctagttcaaacatgttgtttctgagactgcagacagggcgacaaacgtgagattggggaaatttcaccctgcctcttagcacgtataaatatttcggttttaactttagtagcattacttttgtagatgaacaactaagtctcttgtatggatgaatgtttggcaaacatatatcttcgacagatctttgctcagtatttctcataaaattattttcagctggagtataagtggggcgtggcacatgcgggtagaaaaattaggaaaactaagctgccataagcatacctgataataatgaactgagcatctttggtccggtctttcacgtaatgtccaacgatggagacattcttaaagtctgcgagcagcaatgtcattaatgtattgaagtgttaatatatgttaaacgccaagaggacggccactaaacttacccaacgcagcatctatctcatccataacatataaaggagttggtttataatggtgaagagcaaacaccagagctagtgagctaagcgtctgcaagataaaaagcttagttcagtaacaatctactaaaaaagtgatattagatgagataacacatgcacagaacataatgccaacaagaaatgtaaaactcatattactgttgaataaggaaacaaggtatggagtagaaaacaagttctcgtaacgatattgaaaaccatctttgtcagtaaaataaggccatattaactaacatccttgcacaaaaaaaataataataattgcaaaaataccttttcgccaccagataaattggcaatgtttttccagcttttcttgggaggtctaacactgaaaacaacaccttctgaaaacgggtccaaggaatcaacaagttccagctcagcatcacctccaagcgtaatcatctaaaaacaaaaaggaattgctgttgaaatcatgttgtttagtaatagaggttgagtggtaaaagtatttcagattttcagttaattgggtaagcctgctcttatctcaactaactctttaactttttttggcttcctagacttcatttcttacaaagtgtggtcagacttcaaattgtaaaacaatggaagcaccatattacatgctttgatatatgtattcattatttcaaagtacctggtacatctccttcagtttcaaagatattatgttgaatcctgccatgaactcatctaacctgaaataatgcatatttgcatgtgaggcaaatagagcaacatggatagaaattcaaagaaaggaataccttctcttcctcaatgcatcgtattgctttttaagatcatcacgctcctgagtggtggcatttagctcatcaacgcgttcaccatatacacgagcctttgtgcggtacctgatccagccaatgtaagccagtaaggaaattggtggtgccaaaatgctactgacatgtatagatcattaattcatactctgctattgaatccaggttaggactcaagtctttaagcagggcttccaacagtgccaccatctcaactgcttttctcatgtcacacgcctcattgaattgctcgtcactcaatgtttctttcagtttctcatgatcaatagcatccttttgaattctgaaaataacaagatgcacattagtctgagaaacaatacagaaaacacgtagcagtattgaaaatagcatttacacatactgatccatgtgtttaacaagatttgtctgaatgtcatcaagctttttcctgaatgccttcaccttcatttcccactccttggcaagcttttttgtatcttgcagtttgtattccacatcgacctgtacatacatacaaaatgtaaatattgtcaaaaggaacaatatcatagtgacttaacataataactaaatataaatataatatacctcactggatctcagttcatccattgctttctttaatttgttgtattctacctttgttttgtcaagctcatctttatggttgtccatcatctgcaaaaaaacagattaacattttccattgaacaaatgaaaaaacaatccaatcactttacagcttgtaaggcaatacaactaaactacctcttgtgttttcttataatcttcttgaacagtaaaagctgccttctcaatctctttgaaaatagacatcatcttctccttttcagcaagaagcttttccttttctttcctagactcctcgatgcccttggttaattttttcaccaacttctcacatgtagtaattctaactttgtggcggttgatatctgagcttgttttgtcaagttgctggcggttgacgcacaaaatcttagacatcagataaccaaaacgaagaacagaatcacacaagcattgaagcttatactcacagattggatgtttgcaacttttagcttctgatccttgagcacttgtccccctgcgttttcaattttctgctgtagttctgatgcctagtatagaaagcaaacttaagtcaaagctatgtaacaaataatttcagttaacaactcaaagcatagaaaaatcaatatacgcaggcacagattcaaacaggagactgggagagtgagttctgaatgatggagcatttgaagtaatttgtgagttgaagcagacgctcactaaggcagattagcttatgaattggcatgcgatcaaaaagcctgtatagccacatacctgatctttgagcttgctggaacatttagcaagtctatttagttcagcttgctcagcagatatgatatcatccagctcttccattctgcgaacctcgtccgctttgggatgtgatgcagctttcagagagtcaagtcgcttttcattgtaactaaattgtgcattcatactctcaacctatttcaagagatgaatggaagctgacctcaaggagaaaatagaatctcacagcagaaaaagtagtttacatacctcctttttagcttttgccagttccatctcaaaacgggatttggcatcttccagggcccggtaaccttttttagcatcattaattttttcacgtaacctgttgagttgatcgactagcttattaagatcattttcagcatttgcaacagcctcttctgaaatactttcccggatggatgtgcccatcttgccacctcttggtttgctaccaccaccactcatggtaccagacttctcaaaaagtgcaccatcaagggtaactactcgacggaattcactggctgcactatatgcaattcgagtagcctgacaaaaacgattattgatgtcactgttataaaaaataaaaatataagcagcactgcaacggtttttgtatgaaaatagaacgatatgtcctcaattaagtaattctagccttcttagaagttttccataaaaaatgctagtggggcagtagagtactttgagaaacaaatatacaaggcacatgatagaacaagcagcaaaagaagcaaataatagaacgaaaacaaacaatacaattcaggtatatacctgatcaagatcacttgcaacaatagtgttccccaaggtggcaaagaaagctaacttgagcttctcatctttaacctttactagatcaaagaggcgtggaaccccttcaggtgtttttactttctcctgtagcttacgaagatgatgtgtttgtttttcctgtaatggtaagagtaccaaatcatgccaaaagcaatgaaagcaacgaaaagatagcttctatacaaataaacatgaaaacgctatgaaaaggatccagaattttaccagtatcataaaagttgcaatgccaagatttcttctgcgtaataactcaacacaagcttgagctgaattggttgtttcaacaacaatataatcaagcccagggcatgctgtagatatggcaacatcatactttgctgcagagcacaacagctaacacaattaagtgatatgcagcacaatccagacctagagtacataaataaaacaattatgaacttctcctagttctctagtatatttactcggagaatcagtaaaatacaataatatttgcaaagcaagtttaacctccagttctttccaaagtctaacaatatcacacactgactaatgactagtatctgttaatacgatgaatttggaagtatatattcatgacataataaaaacgggcaaatgtacagaagctggaaaagtcttcaggtccaaaggaaaaaagaaggcatggttgtttaactgcacacattctagcacaaattgagactacaacaattacatcttaccatcgattgcgccaagatcacctagcctgccataaatgccttctatttcctttgattccttagcttgcaaaattgctttcaagacagtgccttgattcttttcagaatcccttgtggttttaatctcagcaactttctgcctagctgcttgttcaagaggaataagtgactcttcctgttttaggcattcctgttatgcataccgagatattggaaactcaggatcatccacagcaaatgggaatacagtgatactgctcgagggaaagaaatggcccagagaagtctgcaaatgctttacctgttcaactttacgagcctcatttgcttcactatggtgtttctctattttttcttgaagctccataatatatgtatccttcgctttgatttgctctttaatgctttccatctggttttgagcagcagttaattctgctcgggctccatcatgctgaaaacagttaataacattcaagtgagagtccacaaaaaaagttggataccaaaagaggggctttcgtatcaatggaattgagaggaaatggacacgcgcgtcgactccaaggagagtcaaacgtgggtgggcgcgcatgcatgaacgcactctagccatctgtgctaatgcacagttcctagtgagaattcacacaacttgaaatttatagatacaattagttgttttcaaaaagaggaagaaagatgagcactcttgttttcgactatactccagcaatcaagaaatatcatgccatactcaattctccatatggcagatccaggttggcgatggcaaaactgtagcgtactaggaatagaagttttctagtgagtagtgacctcatgggcagtcaagtggttcgtgtagctgaatagtactggagaaaattgacaatggcctaccacaactttttaattagaaaagaaatacaaagcaggacaaaccttctctttcattaattttttctcagcagatgcaacatctaagcttcctttatgctcaattatttgattttcccatggttcaagttcagaccttacttgagtaagtttagaacgaagtctctctgtctcttctgtaattaccaaaaaagagagaagagagagaggtttggtcataaaaaggaacagactgcactagaagaaatttataggcacatgtcttgctctaaaaatcacctcgagagttttctttaatttgctccagcaccttctcttcttcattaaatttttcttgcaatttgggtatctcttcctctagttgtggaattaaactggatgattcttcaacctcttttgttgattcatcaattttcgatgtatcctgcataaaaatgaaggtggactttgttgctttgcttgaactacatatgggatcattttaaatataccttttcagttttgtcctccagcttcttaatcttctgtttaagatgcttcaaatcctccctatattttacatcttttctctcaaactctttaaattgatccttgcaagacttcatattattttcaaggtcctaaacacatccagagaataaatatacaaacgagcattataatctggcaatgttagaaagggagtagaaaatctgtcgctaaccatcttgtggggaaaaaagctctatcctgaacatctaggaataaacagctttcgagtcacaagtaatgttccaacaacacaatacctcttgccttttagcatgtttgttgtaaacagactccatttccttcagagtttgagaactatgctgaattttttccctggattataaccaaattaattagtgataaaactcagtaccaaaatatcatgttcatccacaacaataaatgacctttcagaggcaaggttcttttccaagtctgcaacattctcttgcagctgagcaacgtgtgaggtagcatcatcagaagccaatgtggtcgccttctcttgccatttcaaaagtaagagttccttcagcataaatgtttcagcctcatttttcgcactctacaggaaaatatatcaatcagtagtgtcattcaaccagaagaatcaattcatcaccctcagaccgtcacctctaagttatctctttccttctcagccaacttcagcatctgcacagatgctgtccgtttttcattgagcatttccaatctaatatgtatcagaacatgtcagatttcattacagaatggacagaaagcactcattgtgacaacaggccttaaatcagttaaagaactcactgcttggaagcttcttcaattttctcaacatactgatttgtcccaatgatgtcttccagatattctagaaacccctcatcatgtggaccttgagattttggtttcatcagggagatttgttcaacctcaccctgaaagtgcccaacttggaagttatgcagtgcaaaaccataaaatataacaccatatggatgtctgttatatccctcatagtcatgtaaacatactaaataatatgcaacatatgtccaaaattaaacttacaaaacacgcgcatttttcatgtgtaaatggaaaaagaaacacaaacctgaaggatcaaaaagcgattattatcaaggtcaactcctttgcccttcaacagtttagttacttcagtgaaattgcttccacggtcgtttatgtagtatttagaagtgttgtcacggaaagcaactcttgtgatgataaaatcactgccctcaacagccctgtagttcccatcatcctatgatggacatagagggagggaaataaattatgtggcactagctaagcaatatgaaatgctaaatacttggctcaagaaataccaaatcaatgatttcttgaaaatggacggagaccccagcactgtctagattctggtggttagaagaattgtgtatgagttctgagaccttgttcaggcgcatctacaatgatggaaaactggtcagaaacagtctatgatttgaaacaacctaaataggttgttctgaattaagaaaatatggagtagctaacaaatagcaagatcatctctcaagagcttaagttattcgtgaattttatagcatttaatccaaaacttttaaggaaaaacctttggaggaaatgggcaatagtaaacaggaaatacaagggccccattgtattcaagtattaaatacatttctcttcaataactagtttactatcatgaaagtaccattacactaaattctcaaaaacctttgggcagagactttgaagcttacttttcgccttgcatacaaaatcagtaacacactaacaaacataaagtagcagtttgttgcccagcctttaaaaacattgggaataacttacacttacatgccaactttggcatctagcactcgctgaatggataaaaaaatacaatgactttttgagatagaataaatcaatgattagcttaaatctgccactgagctgaccagaaaaatgttgaacatcaataaacatttacagttaggaagcaatattgcccacctgttttgcacgcttcccaaacacaaacagcatcgcatcaatgacattgcttttcccgctgccatttggcccaacaacagctgagaaactctgaaagcaagaaaaagcggttattcttttatacgatgcatggatcctagcgacagagtggtagacctatgttcataagagcttgaagcatagtgcactcatcgatagtacctataaacagtttataatgatattctgcacagaacacgatggttacacacacaagaattgtgaattctgcacaggtcaccataaaaacacgattataaagttagacggcatttctggaatgtaagatgtgttactactcacaaatcatagtcatttggccacttaaattgatgcacttgaaaatcagtaaaatttaaaattatgataaacgttgctttccttatatcttaggtactacagaacaagtgaaagttaaactgcagaaacgacattctgaggataaaagagttaggtctgaaatttcaacgtatgaaagggcaaattcagatagaagccatagaactgaataaggaacctccatttctgggtagaacaaatgccattaaaccatgtgacttactcttcataataaaatatctccaaacaaaacaaagtgaacccaaaacatactactgatggagtatgaccatgccactctaaagtttcagaacaaatgtaaaaccagtgcacaactcaaaaacctccactctaatctaacattcgtgagaccaaaactagaccaacaaattcagaacctaataaacaaaacgtcacataggttcagaacctagtaacaatgcgcgtatcggtatttcacttcataaactagaggccaggcagaacggccacactgaagataacacgaattcctaaaaatgctataacacggtttttaacttatttaggattctgtaggcactgggaaatggaaaactcaaatgaaagtatacgtggtcacctcctacgctatcacaattgaagttaaattgctatatccaactgccgtgcctagggttcaacgatcgtacaggtcaagtaaaaaaagcaagcccaccacatgacattgcagctggagggtcctgaatagcgccaaaaacaaacgaaaaccggggattggtagtgggggaatacgtcatctatgactatgagcgcgacgaattaagatatactgtagctagcttgcgcgctcgtgtcgtgtgcttgcgagtgagagagagaacgagaccttgtggaaagggccgatgcgctgctcccctgcgtacgacttgaagttgcggaggaccatctcctttatgaacagccgcggcctccccgccctccctggcgagggcgcgggtgacctcggcggggaactctccatgcctgaccgcagcagcaagggaggaccggaccgcgagagccgccgccgccgccgcccgcccgccggaagatcactcgcccagcaagggcggcaccggctgaaggggggcggctcgaggacaaaggcgaccaagcggtgcgcaactcgggacgacggcgaccgcgcgcgcgcaactccgagcgacggcgaccgggcggcgcgggtgctccgggcccgacgaaggccgcggcggtggaggcgcgcagatctcgggccgtcggcggtggaggcggaggcggtggcggtggggggattttggggaaaagtcgaagcggccgagaggggaatgtgggatttgggaattttgggcgaaaatttgggagggaaaactgaaacggcgagaggattttcttcctcccgcttcgagcaaatgtgtcagaccaaaaggaagactctggagttgggctggattacgagcgatgcgctgctttcgtgtgcgaacttatatggggctcatgttgggctgatttctggtcggccttctgcttcggagaaagttcacttcaggttcctcttcttgtcatcgagttttgaaattgtccatgaattggaaaaccagatatagcacatccctaatattataaaactgaggcatattaagtcccaagccagtattgataatgattttagttgatgtggcggctgagtcagcacggaacccacatgccagtggcccaatcttcttctacctctctccgcctcttttcacatctctctcctagcctccatgaggttggtggtgggcgatggccgaacaggagaggtgcggtgagttgacggggctgcaaggagctcagtgcggaggtggcttgatgcgtcggcgagctccctaccactgacaccacaacgccttgtgatttcacgcggctatgatccttgcaccgctgccaccacaattcacctttggagacacatcctttctctactactacggtgggtgtcccctctccctctcgtcgaaatttttcggcccttctccctccatcgtctcccctcaccactgcgcgcgtctcactcaaaccattcgccgtcaaggagtacctcgtcgacacctgcggcctcacccgagcccaggtatgcaagacttcagagaagttatcccacctcactaccagggaagcaccattgtagctggagacagcagccctacctcaaatggctcttccggcttggggtgtgacattgcagcaggaaagtggctcaaggtcgacgtcgcccgagtcatcgtcgtcgcagaactagagcgacatcgagatgagagatagtgggtgcggaggtagagacaagtgctgtggcagtgggcacggaggcggaggctggcccggacgtgggcactgcggtgatggaatcacattaggagcggagggaagagagggacggtgattattttttttatgacatgtgggttcaacactgactcagtcgccacgtcagcaaaccgctctaaatattgtcttgagacaatgagacccattgtaacccggttttaaaatattagggatacattataattggtattccagtttatgggcgattttgaaacctaacggtaagatgagtgaccaagtgaactttttccttctctttttggttgagatgcgcatgggctgttcggcccaggcagacagataatacatagaatggctttaataacgtctttacaagctagtaatacatagaatggtcctacaatatcaaaagtgtaaacaccaacactgtttggaactttggatgatctgaatcatttatctcacaatcacccagccatcaggatggatttgtcatgggggtggaggggcttgaagcccagactactgatgttgggagtatgggagccccctctaattttttttttcactctgtaagaaaacgtgataaagttttgtctaaggtggtgtttgaaactcatgtagatgaagataaagattaagtgtttttatgtaaaacaatgtgttaatagcgtataattaattgagttttaattactacaaacttgaaagataaagtatctatctagaagtaatatttagttttcgcacaaaacgtaacgtttagcagtttaaaaagcgtgccataaatatcaaattttttatccaacttttgttagagaaactaacggggtctaatttgttcaatttcgcctactgcttcttcctaaatccgcccccgcaacctcggaaacatccatgatcttgcaaattttcaaccaaaagaatattaaaaaaagcatgcagtttcttgaacaaacttcagaaaatctttttcgaaaagctacggcactcccaaacagaatattgacacaaggagaccaaaaacaaaacgaggcagcaggtcaatgcatccggcattccagctcgcagcaaggagtagtgtgtaccataatgacacccacttctacttgattaaagccctcatcctatctttaagcctgcgcatgatccacacaaatgcatacttatcctaaactaatcagcttaggaccatgtatatcattttagactgcagcaagaaatagttggcaagacactgtttgaaaaatccggtgtagtgcaaaatttgcgggtttgtcaatgagtttccttcgaataccgtggatagcaatgcactgagaaaatcacatcactttcagaaatctcactgcgttctcttgcgcattgattaaccctacacaaaagatacatgtaacttcgctggattttgaactgggtttagacctatgtgacgtactaacatcggacaaacagaatgtcactcaaatttcaacggaatttgccacagtaatctcaaaattattcttctagatggctcatatatatcaccatagagcttatgtttcgctgggttatgctggccactttctagacgaacattatgtaacgcaaagtaaaataaaccgtggacagtttgccttacaaatagaaagcaaaggcacatagagtcctggtccactataaaaccggtcgctaaaccaagtccacttctgttatcccaagcaaagccctcgcttcgattccttcttctgtcaagctcaccgttcgagcagcttagtaacacccaccatggcttctcccccggaggacgcgccagctattccttcaaatccatcggtgcctcaggaggtaggtaaccagctaccgcggcggtcgccgccgccgccgccgcggcttgagacggcggcggacgagatcggcggtgtcaggtgcggggtgctgtgctttcacctgccgagacgctccaagaagaagaagaagaagaagccgccaccgcccgtcatgcagctcgcgggcggcgcggccggcatcaagagcgtgcagctggagaccacggcgacggacgacgacgacgcgtcgtcggcgtcgccaccaccccagcgcgtcaccttcctggcgtcggcgtcgctctccacgtggtggccggcgtcgcctcccgctgccgccgcggccggcgggaggggggcgtcgtcgtcgtctttctcgcactggcgccggtcgctgtcgtcgtcccggcgccgggtcacgccgcacggcgccgccgcggcggcgccgtccgcgcccacgtcgttctccttcccttcgtcgccggcgtccgcgtcgacctcctgcacgagcacgccgaagctggtccacgggtgtcacgtcgactagctagctattgttcgatatctctacatctcgtgtactgcatgtccatgtatcatgtatacgtagttccagttccaatattgttcttgctttcttaatttctttgtactacgaaaaacagtactgatcattgtcagtgatcaactgatcatagtagttggcatcacatcaggatcgatcgtgtgggttactcttttgctgagatgtggtaaactactaattaaacaattcgtgcactttgcttttttttatatatatatatatatataaagaaaatctgacctggatgcacgtacgaattgaaggtcggatgaatccatcgacgtgatctagcactacggcctgcacggctacacagttacaataatatataggatgaaccagtcaatcgaatgaagagtccagcgtccagcccagctctagtgataaattaggactttcttttctcgacaaggattttctatatctatatgacatgatatccatcatttgcatacgacttaaatagttatagaaaaaaattaaaaaaaatagtaacatcgtttgtgatgatatatacaagtctatacacaaacatgcgggactaaatttgatctacaattggagaaacaaaaatagtaaaatcaaacggtgaatagtacccgtacagataaaatttgttatttttgttttttcatacccagcaatggcgttagtacaggtcgtcgccactgcaagctgcttccccatgcgccagaatgcatgaacgcgtggactatacaagttgacccggtgaaagacgatggcggcgccgacgcagcccttgtcctccggtggcgaaaagagggtcgcggcgaccatgacgatgtccgtgtcgaaggctggtctccccgtgaagtcccagcgggcgatgtcgggtaggtagaaccgctgctcggtgcggaggctgaggagcgcgtggcgcttgatctggccgaatgcgaggaagagccagccgccgccgtacgtgccgaagtagcgcgcggcgcgcgcgtcgtccgggatgccgaagcggtgtccgcggcagccggcaatggggcacgagaaggaaggcccgtctgcgccgcgcgggacgaggatccacgggagcgggcgctccagcgggtgctgctcctccttacggcggctcgaaattagacttgcatatttgtatagtgtcttatattattatggtctatcttattaaattttataaaatttttatataactatttaaattacatgcatacacctaggtgtggcacctaagtgtagaaaatactttcgatcgcgtccctgctcaaatccgacggcagcgaactctggccgaaggccttgccagcaaaagatggatccaggacattcggggcgcgctggggatacaggctatcctggaatatcttcaactttggtcgcgtttgcaatcattccagctcgaggattgcctggatcgttttatttggaagtgggagagctcaggtcactactcctccatttcagcttataatgctctcttctttggtcggatcccctttcagtcgaaacctatctgaaggtctctaccaccccccctcgatgtcgttatttcctctggttggtcgccctgaggcgctgctagacgacagacagactgcacaccaaagatcttccacatccggatctctgtgttctctgcgagcaaagcgaagagagcatcgaccaatcaatttctgggtccgttacgcgcggcagtttttcggacttcaatttaaattcactcatgaccgttgagcttcacctggcgttatcgatcactccttgtctctcggtcctcacaccgagaacgatgacaacctcgacatcagaagtcgcgatcggtttcgcgagttcatttaagcagaagtcgggggctactgtcagggttacgggtaaggtataccctctacccttcgatatacgtcacatatcgatatggtatacttgcgcgtatacggacattttcggcatacgttaaggaaattcattatggagttcacagatggaaggagtcctactcggatataactgggtcgtcattgtatcgtaccgggtccgatgtctccgagtcctacttggagaccagttgacctgcggtataaaagggacccccgggaggacctaaggcatcgaatcttaccgccaacacatccaccacagcctacgaagccggagcctacaggagccaagtcgccgggtgatctaatcgaatcaactcgactacgatctcgtcggtatcgtcgagttccactatttcctttgtaatctgtggtttccatcatataatcccatatcaactggattagggctattacctgtcaaggggcctgaaccagtataatctttgttttctgcctactagatgtcgtattacgtagattctcgtaccggcgtaccccaataccctctatatccgatctacgggtatcccccgtcgacagtggcgtgccaggtagggggacttggtgctcaaggttctactactatgacatccagcttcgtcgacaacaacgtcaacaccaacctcaaccaaggagttcctacttcaacaatgctggtaaggactcaagtcggcgaaatcgtcttcccggtttacaccacggtgccgatctcagctggtccatcaatggccggaaacgagaacgcagtggctacaactcagggcgattccatgttgaaggatcctcccgccgaagcggagatcagaacgtcgacgacatccgagcccgagaaggatcctagtgcggccaagccttgtctttccgacaagaatcacgagccgacgaggatgaattccgaggtgacaaggtcctggtgtcctatccacaaaaccagaaaacacaccttgcaagcatgctgggtttttctcaacgtccacgctaaaattcgtgcctgcaaagagcgtggaattcagcgtacttctccaactcgtgatgtctattgtcctattcacaagacaaagaatcacgacctctcaagctgcaaggtctttctcagcgccatgaagacgccacctcctaaggtccagcagtcacgtgtccccctcagggatgaggacaaggaacaaggagcgacactgatttcagatcgatttgttggggtaatcgacatcgatccccacgaaccatcagtcttgcacctgctcgaagattatggctcatcgtcaacgagtacgccgtgcgaggtattggctatcgacgagactggcacgtcagcgcacgctaatgcggaagcggagaatcaagtgactacaccggcccagcacccctacgatcccgttctgaacgacgatctcgcacgatggacagaacggttacgggaatcagtgaccaacctcagcaacgcgttcgaagaggccgctgctgcagtgcacccggaacagccaccaactggcgatgctaatggtgagaaccctgaacagtgggaatcgcctcatcgagccacccctccacctcgcggcaccagcgatctccgcgatcacctgaatggccgccgagaggcgtgacgcacacgagacaacgagaaccgctcccgacatcacgtctcttaacggcgtcacgacaacgaagaacgaggaggctgttcgagcgaagaccgagaccgtgttaaccgccacaaccgccacaatcacgacgattgcgaacggcgggtactgggcgatactggtcaaggacgtcgccataatgacgacgatgatggagatcggcgccgagacaacaacgggagacgacgacaggatcctcgagaacccggccaacgtcctcgtaatcatacgctggaaccaagcgacccatcgtcatcgtcatcctcctcctcatcctcatcatcagatagacatccacgaaggacgtacgattgccgacagcccactgcccctagcgctgggtgtagagctttcggtcgttcacttcgagatgtccgatggcctgaaagattccgaccaggagcaatagagaaatacgatgggagtaccgacccagaagaattccttcaggtttactccacggtactctacgctgccggagcggatgacaacgcgttggcaaattacttgccaaccacattgaaaggctctgcgcgttcatggctgatgcatctcccccctactcgatttcttccaaggaacttacaagcgccacgcgatcgaagacgacctacatgcgttaacgcagaacccggatgaatcctagagggattatgttcggctccttaatgagtgtaggaatacaatccccgagatcaccgacgcttctgtaatccgcgccttcaagtccggtgtcagagatcgctatactacccaggagctggcaacgaggcgcatcacgactactcggagattattcgaaattgtcgatcgatgcgctcacgcggacgacgcactaagacgcaagaacaacaaaccgaagaccggaggggagaagaaaccagtcaaggacgcacctgagtcaagcaagaagaaaaatcgcaagagtgggaaaaggaaagctcaagcggatgttctcgcaacagaatacgcagaccctcccaagtgcccagactcacaaggcagcgacacgaagaaaacatggtgccttatacacaagtcagacaaacactctctagaagattgccttgtcttcaaaaaatcgctcgcaaaacacatgacattggaaaaaggcaagcgagtacgtgtggtcgagaaggacgctgaggcggttactcaggaatcggactcagcatacccagactccgatctccatgtctcgcacatcttcggaggttccacggcatacttctcaaagcgagaatacaagaaggtggaacatgaagtctgttcgacgtagcagggggctgcgcccaagatgaagtggtctgagcagaagatataattctcagaagaggaccaccccaaaactgctgtcatcccagggcgatatccgatcgtggtcgaactcactattcagaatatcaaggtcgcatgagttctgatcaacggcggtagctcaatcaaccttctcttcgccagcaccttggacgcgatggggatcccacgaagcgagttgacacccaccgatcaacccttccatggaatcactcctcagtcatcgtccaaaccattgggcaaaattacattgcctgtgactttcggccaagcaaataacttccgaacagagcagatcacctttgatgtcgctgaattcgatacagcatacaatgccatcattgggagaactgcactcgcgaagttcatggccgcatctcactacgcgtatcaagtgctcaagatgccgggaccgaagggaacaatcagtattcaagggaacgctaagctagcagtgcaatgcgacaagcggagcctcgacatggtcgagcacacgcccagcccacccgacacagctgagccacccaagaaagtgagcagaacaaacaaaacgccgaaaccggacggcgcaatcaagatcgttccactctctagtgccaaccccgacaagaccgtcaagatcggggcatcactaggcgagaaataggaactcgcgctcatcaccttcctccgcgacaatgctgacgtgttcacttggcagccgtccgacatgccgggggtacccagggaggtgattgagcacaaactcatggtgcgacccgatgccaagctagtaaagcaaaaactgcggagatttgcaccagatcgaaaacaagcaatacgagaagaactcgacaagcttctcaaagctggtttcatcggagaggtactccatccagagtggctaaccaacccagtcatggtacggaaggccaacggaaaatggagaatgtgtgtcgatttcaccgacctcaacaaggcgtgtcccaaggatcacttccctcttcctcgaatagaccaactggtggactcaacagccggttgtgagttgttgagctttctcgacgcttactccggctaccaccaaattagcatggcgaaagaggacgaggagaagaaaacattcatcacgccgttcggactaataactgctggaaacactttccagcgcacggtccaaggtgcacttagcgaccaactcgaaaacaatgttgaggcctacgtcgatgacattgttgtcaagaccaagacaagcgactcattgattgacgatctgcgggaaacgtttgacaacctccgacgatatcacctcatgctcaatccagagaagtgcacgttcggagtaccatcgggcaagctgctcggtttcctcgtctctggtagaggaagagaagcaaatcccgagaagatgaaggcaatcgagaacatgaagtcgcctacaagactctaggaagtacagaagttaaccggatgcatggcggcactaagcaggttcgtcactaggataggagagcgaggacaacctttcttcgctctgctaaagaagcaagacaaatttgtatggacacaggaagccaaagaggcattcattgcactcaagcgctacctatcaaatccccctgtacttgttgccccccaacctaatgaagaattatttctctatattgccgccacgccatattccgttagcactatcattgttgtcgagagagagaaggtacaacgaccagtctactatgtcagcgaagctctgcacgacgcaaagacaagatatctacatatccaaaaactgctctacgcggtaatcatgacatcaagaaagctacgccactactttcaagcccacaaggtcatagttgtatcctccttccctctcggtgaagtagtgagaaacaaagacgttgtcgaccgcattgcgaaatgggtagtcgagctaagccagtttgatgtctgctttgtgccacgaacaaccatcaaatcccaggtacttgccgacttcgtagctgattgaactatgcctgataataggtcagacaaccaaatcgacaacgaaacgtggacaatgacgttcaacggtgcactcaacagccaaggagcaggggcaagattcatcttgacatcacctttgggagatcaattcaagcatgcaattcacctcaacttcagggcgactaataacacagccgagtacgaaggactactcaccgggataagagctgcagctgcactcggagtcaggcgactgatcgtgaaaggggattccgaactagtcgcgaaccaggtgcataaagattacaagtgttctagccccgagttatccaagtatctcgcagaagtcaggaagctggaaaaaaggttcgatgggattgaggtccgacatgtatatcgcaaggacaacatcgaaccaaatgatctagcacggcatgcatccagacgagagccactcgaacctggcacctttctggacgtcctgacaaggccatcagtgaaagacgcaggcggcgaagatagcccggtctccctcaacaacagctcgggggctacagaggcagagcgcgccgttgccgatatcgagaccacagacgactggcgcaccccactcatcaaattcataggcagcgaagagttgcccgaggacgacgcagaagccgagaaaatatcccgtaaagcaaaagtctactatatgatcggcaatgatctatacaagaaggcaccaaacggggtactcctaaaatgcgtcttgtccgacgacggcagacatctcctcctcgacatacataaagggatctgtgggtcacatgccgccggtcggacattagtcggaaaagcttttcgataagggttcttctggccaaccgccctcaaagacgcctgcgacatggttcagcggtgtgaagcctgtcaatttcacagtaaacacacaaagctaccagcgcaagcactccagactatccctctcacttggctgttctcgtgctgggggctaaatatactcgggccattcccacgaggacagggcggctacaggttcctattcgtggcgatcgacaaattcactaagtggatcgaagcgacacccacgggggaaatcaaggccgacaacgccatcaaattcatcaaagggatattctgcagattcggattgccccaccgtatcataacggacaatggctcccagttcatcagtgccgatttccatgattactgcattaggttgggagtcaagatttgcttcgcctcggtttctcaccctcagagcaatggacaagtcgagagggcaacggcatagtactacaaggaatcaagactcgcatctacgacatgctcatgtcacatgacaagaagtgggtcgaagaacttccatcagtactatgggccgtgcgtaccacaccaacaacgtccaacaaggagacacccttcttcctcatgtacggctcagaggccatgctcgccaccgagctacaacatcaaagtacacgagtacagaagtattctgatgaggatcaggaggagcaacaaaacgatgatgtgaatctactcgaggaacatcgcgaacgagttgccgttcgagcagctagctaccaacaggcccttcgctgttaccacgagaagcgcatccgagcacgcacgttttcaatcggcgactacgtcctccgacgggttcaaagccaagcagggtgaaacaagctctcacctaaatgggaaggaccgtacacgatcacacaagttctgcggccaggcgcattcaaaattacagacggcgatggtcgcgagttggcaaattcctggaacattgatcaattacgtaaattctatgtataagtcaatagtatccatacttgtaagacatcttacagcttcaataaagcctattttcaggcccagaccacaatcaaagtgttccttcccgatgatcccttacccatatgacacctactgttaaaacctatcctcatgtccctttacgccgtcttgacaaggcctccaaggaacctaacggaacttcggctggggatgcccaaagccgataaggccttgtcggatcctgtagagacgaaagaccatgtaagatctggtcgtgtaagagttctcgccgtgcgtattaaccaagccgtgtaatcggaaataaactttccaacttcacggctgggggctaggatcagtgcttgttcaaccgaggcaggtcaaaagtccaagagccttatcttccgagaagaattctccgatgacaaggctgggggctagggagagtgtataactcaaacgactgatcgaagtcgcgaagtgagaagacactcatacacgctacatccagagtaagaaagcttagttagatatatttcttttctatttcacaagtacttcttacaattccatcaaaatccaaaattatattacacttttttcctaagacatttatcacaggatacggagactaccaggaaggccaacgatagtccatcgactggaagaccttctccgccagcggcgccatcgacttcgccaggccatctatctccgtaggagttctccgagaacgagaaaacccttcgcggaggaactcgaggtgcagctgcggacgatgttctcgtatgcaagccaacacatgccccctggcatatcggcttgatcgacgacactcctacttcaaggcctcgtcgatacgttcaccgatgccttcgagctgggcgtaggccctattcagccacgagatgtattcggccgccgattccttgggatccccacggggtactcggagctctctacagactcttgacatggacgtgcagcaactcttcagatacgagttgaaccacacctcacgacctcagagtgtctctacggcctggtccttcttcacttccagtatagtcctctcaagttccgcgacctcaaacttcatcctccaatactggatgcgatgatcctggtcagtaagcgcactctcgaggtctgctcagcatggaaacgattaagtcaagctgctcttctctcccgagaatacaacaaatcaattcgatccagacggaagagtaaaggaaatgataacaaagacaaccaaccaaagggagtcgttgccatgctcgtttccacaggcgaactttgatctacattgccccccggcacatgtggctcgaacgcaagtgccggaacgatcactggcaactcaggctgtccgcgttgctagacatcctcgacatcaacatctctacaaacgacaacaaattaatcaagatcacaatgctaaagaaagctaaggtgatgaccgcacacacaaacgcagttggaaccaataagagttttacaaagcatgactaaagagtacaagagagctaaaatactactcttcaaaaagtgggaggacggactcccccagattgccgacctccatcacatccttgcgcgcatcgctagccgcccccctgatctaagatcttccgcaggtcgagttcaggatgcgccagcctcacacacgcaaggacatggcatgccctggtatagatcccgttggacgtctcctttccgatcctggccgcgtgcttggaggggatcgcctccatcgccgtcgccagttccgcaatcgaagacgtcagcgagaactcatcgggattcgccgggatggtggccttgacgccgcactccccggtgagctggtgcagaccggtgtaggtgacccgtagtgagccacgaatctccgacaagtgttctcaagctccgacatatgatgctcgagcccttgccgttgtcgctcattgccagccacaagctcccgcatcttctggatgtcctcgcgaacctccgccagatcacgtgtcagccggtcggcgcgctcattcgccgacgacgccgccgccgctgtcggtgacatggggtcgggggtatcgtggctagaggcttgggtagccgcggtcattcaagcgggctgaccccctcgggggggtcgggcccgaggg

SEQ ID NO: 25678 - DNA, 21697 bp, Oryza sativa
  unsure (1)..(21697): unsure at all n locations
ttggctggatgacgtggccaacttggtcatgacggcacggcagcgcctaggtgctggtgggcggtcctccgccaccaagacctctggcgctgctaccaccggctccgtatcgtcaaggcggagggtgcggcgagcggcgctgttgctcgccattcggccgccactccttcgtcagcgcctccgacccaggaagatctgcgtggggggccggatgcccgcatcagtatcgagcgccggcgtaatggccgacgtgctgcccacgcaacggagggcgcttcctcatccggagcgccacatcggtccgggcacggggatcagccccccgtgtccccggttggcggtgccggctgtcgagcctttgtggcgagccttcggaacgcccgttggcccccaaggttccggcccaccatcaccgaaaaatacgacagaagcgtcaaccccgccgagtttctccagatctacacgaccgggatcgaggccgccgggggtgacgacagggtcatggcgaatttctttcccatggccctgaagggtcaggcgcgggttggctaatgaacttgccacccgcgtcggtccactcttgggaggatttgtgccagcagttcaccacgaacttccaaggcacatatccgcgcccaggcgaagaagcggacttgcatgcggtacagcgaagggacgatgagtctcttcgctcgtacattcagcggttctgtcaagtccgcaacaccataccgtgcatccccgcacacgcggtgatctacgcgttcaggggggacgtgcggcacaaccgcatgctcgagaagatcgcctctaaggagccccagaccaccgcgcagctttttgagctcgcggaccgtgtggctcgcaaggaggaggcctggacctggaactcctccggctctggtgtggcagctccggccgcccccgggtccgccgctcggtcagggcggcgagacaggaggaggaagaaggggtcggcccgttccgacgacgagggtcatgtcctcgccgtcgagggcgcttcgtgggccccccgaaaggggaggcctgcgagcgacaaaaagaaggaggccggcactcccagcagggagcgcccgaccggcaagtggtgtaccgtgcacaacacctccctccacgacctcgcggactgccgcgcggtcaaaagtttggctgagcgcacgaggaagtgggaggaggagaagaggcaggagcgccgtgagggcaagtccccggcggctcccgccggcaaccggcgaagtgaggccaagcagaaggccaccgccgagggcatcgacgatggcgacgatgacctggggttccaggagcccgaggccaccgtcgccaccgtcgatgggggagcgtgcgctcacgcttctcgccggagcctcaaggccatgaagcgcgagcttctggccgcggcccctacccatgaggcgacgcggcgggcgcggtggtcggaggttgccctcaccttcgaccagaccgaccacccgccgtgcgttgcccggggaggacagatcgcgatggtggtttcccccaccgtttgcaacgtgaagttggggcgtgtcctcatagacgggggtgcagccctcaacatcctttcccccgctgcctttgacgccatcaaggccccggggatggtgctccggccgtcccagccgatcatcggtgtgacgccggggcacacctagccgctgggtcatatcgacctcccggtcaccttcggtggttccgccaacttccgcacggagcgggtggacttcgatgtggcggacctcagtctgccctacaacgcggtcctggggaggcccgcgttggtgaagttcatggcggcggtccactacgcctatctccagatgaagatgccgggccccggtggccccatcaccgtccatggcgacctcaaagtcgcgcttgcttgcatggagcagcgcgcggaccacctcgccgcggcgtccaagcccgcgggtggcgacgagaggcccagcacctccgtcccggccgccccaaggcggcggatggtcacgtgcgacgaggtcccggtcaaggaggttgccctgggcgacggcccgtccaagaccacacgaatcggtggtcttctggacgacaaataggaagacgcgctcgtctccttcctgcaggcaaacgccgccgtcttcgcctggagaccggcggacatgcccggggtccccagggaggtgattgagcaccgtctcgccgtgcggccgggcgcaaggccggtccggcagaaagtgcggcggcaggccccggaacatcaagccttcatccgcgagggggtggcgcgacttctggaggccggattcatccgtgaggtcatccatccggagtggctggcgaacccaatcgtcgtccccaaggcgaacggcaagtttcggatgtgcatcgactacaccgaccttaacaaggcatgtcctaaggacccttaccccctgccacgcatagatcagattgtcgactccaccgcggggtgcgaccttttgtgttttctagatgcatattctggttatcatcagattcgcatggctagggaggatgaggaaaaaactgcgttcattacccccataggaacttattgctatacgacaatgcctttcgggttaaagaatgcaggttctacttttcaacgtactactcgaatttctttgggtagtcagataggatgcaatgttgaggcctatgttgatgacttggttgtgaagacgcgcaaccaagagaccttactctcggatctagcggaaactttcgaaagtctccgctccgcccgcataaagctgaaccccgataagtgcgtgttcggcgtgcctgcgggcaagcttctcgggttcttggtctctgcccgaggcatcgaggtcaaccccgagaagatacgagctatagagcggatgcgccccccagcaagcttagggatgtgcagtgcgtcaccggcttcatggccgccctaagtcggttcatatcgaggctgggagagaaggcactacccctatttaagctcctcaaacgctccgggccgtttacctggacggaagaggctgagcgggccctcactcagttgaaggcgtacctcagttctcccccagtcctggtcgccccggagccagatgagccgttgctactctacctagcggcaaccccgcaggtggtcagcgcggcgttggtcgtggagcgcgacgaggacaaccctcactccgcgcatccccaccctgtgtcgactcgacccgggagagagcagggaggagaggcccccgagccgaacggcggcccgaggcccccgacggccggagctggccctccgcctgcttgtccgatggtgccaggcgcccccgacccccaggatggccccgaggccactacgggaaggccgcgcctgtcgccctctgaccccaagggcgtcggcacagaagccgagtgcgccccacgtggcctctcggacgaagagcgccctggagttgcggcccctggcgaagaggatcggccccgccgaaaggtgcagcggcccgtctacttcgttagcgaggccctccgggacgccaagacccgataccctcaggcccagaagatgctttacgctattctgatggcttcgaggaagttgcgccattacttccaggcgcatcggatcacggtggttacatcttaccccctcggccaaatcttgcataaccgagagggtactggacgggtggtgagatgggcaatcgaactctctgaattcgatttgcgctttgaaccacgccacgcgatcaagagccaggccctcgccgactttgtggcggagtggaccccagctcccgagcccgtctccgcccccgaggccacctcgggcccctcgcagctgcctcacaccgcctactgggtgatgcagttcgacggctccctgtctctttagggcgccggtgcgggggtcacgttgaccttgccgagcggagacgtcctcagatatctggtccgcctagacttccgggcgaccaacaatatggcggagtacgagggactccttgcgggactcagagtgacagctggactggggatccgccgcctcctggtattaggcgactcccagttggtcgttaaccaggtctgtaaggagtaccggtgctctgacccgcagatggacgcttacgtgcgccaggtgcggcgtatggagcgccatttcgacgggatagagtttcggcacgtatttcgacgggatagagcttcggcacgtgccccgacgaactctcaaggctcgcttcctcgcgagcccagaccccaccgggcgcctttgaagaaaggcttgcccagccgtcggcgcgacccgacccccaaggggagacggacgcgcctgaacggcccccgaggcccgtcggagtccaggcctcgggacccgaggggagcgctcccagctcccctagattgattgcttggatcactgagatccaggcgtacctcgcagataagactctacccgaggaccgcgaagggagtgaacgcgtccggcgcatctccaagcgctacgtgctggtggaagggaccctctatcggcgcgcggctaacggagtcctcctgaagtgcattcctcgggaacaaggcgtcgagcttctcgccgatatccatgaaggcaagtgcggagcccactccgcctcacgcaccttggttggcaaggcctttcgccagggtttctattggccgacggctctcaacgatgcggtcgacctggtccggcggtgcagggcgtgccagttccacgccaggcaaacccatcagccggcccaggccctgcagaccatacctctttcgtggccgtttgctgtctgggggctcgatatcctgggtccgttcaggcgggccccgggcgggttcgagtatctgtatgtcgctgtcgacaagttcactaagtggcccgaggcttatccggtcatcaagatcgataagcactccgcacttaaattcatcaggggcatcactgctcggtttgggttgcctaaccgtatcattacggataacggcacccagttcactagtgagctcttcggtgactactgcgaagacatgggcatcaagctctgcttcgcctcccccgcccaccccagaagcaatggccaagtggagcgcgccaacgcagaaatcctcaagggcctcaaaaccaagaccttcaacatcctcaagaagcacggcacctcgtggatcgaggagctgccgacggtgctctgggcgaaccgaaccacgccaagccgagcaaccggggaaacgcctttcttccttgtctacggcgcggaggcggtcctcccatctgagctcaccctgaggtcccctcgggtcaccatgtattgcgaggctgatcaagatcagcttcgccgagacgacctcgaccatttggaggagcgaaggcggcgcgcggccctccgaaccgcgcgctaccagcagagcctgcggcgctaccatcagcgccacgtccgggcccgatcactctgcgtcgacaacctcgtcctacgccgcgtacaaacgcgtgctggactgagcaagctcgcaccaatgtgggagggtccgtatcgagtgatcggggtcccccggccgggcttggttcggctggccaccggcgacggcatagagctacctaacccgtggaacatcgaacaccttggtcggttctacccctagggggggtcgggtgtcatgtttagggctcgggccaaccccgcacccccccgggcgtacagggttggccgggggctaccacatgcatatacttaccttttttctcttccgtatttcaataaaagcattttcgatttcctgaggactgtgtctgtgccatcgtttccttttgaagaatcttggcttgaattagtacgctcgtgcccgaccctaccctcggtggcccgggccggctaaaatcgccaaacggggcccagaaccgagccgtgccccggggcgtggtgaactccgggggggaatcggcaaaggcccacaatcgggtcatccataaccctcggtcaccgcgctcccggcctggccagtctcgacacgtggatctccccaggcactagctccgacccgcgccgtttgaggctgggacctaggcacgagcccttgttcaagccaagacacagaaggaccgcggcacagaccatcctcgtctcatacacacaacaaacagaactgacgcagaaatttcctctttacttgattacagattaaatcagtctatacaagaagggggcccgaaggcctcggaaaaagaagaaaaagttattaagattggcgggggcctgggggctcactccgacgcgcccgggtcgccgtcctcgtcgtcgttattgtccgcaccgtcgtcaccgccctcctcgtcagagtcgagggcgaacgcgagccgaggggccgtaccctcgaagctgtggacgatgtggtcggcggcatcccggacctgcgtgcgcgcgccgtcctcggttccgggagggaactcttccagcgctgcccacggggagaagtcagggtccctggcctggtagcttgccagtacgagctccaccgccccccgggcgaggtctctcgaggatgacttgatcgtctcctcgagctcctcggggagccgccggagggccccagccatctctgagaggcgctgggcgagacccccctggttggcggcgtacttcgcgcactgcccgccctagaggcccgcctgccgcccggcgcggtctagacgggagacggcgtcccgaagcatgccgggccctacctcgcccgccaagcggagggcctcgacctccccggcggacgagttcagcgcgccctgcagctcggcgatggtgtgttcggcggctgcgaggcgggcggctaggtcgccgtcgcccgcggccgccctgccgctgcgcgctctcgcgtccagctccttcgcccgcgcctcgagctcagcggcccgctgatccagtgcggccctctcggtgcgggcgccttccagattacggcgcgcctgctcctcccgccgctgcgccgcggcctcggcctcctcgagagctcgctcccgctcggtgagtgcgtcctcgcggaggcggagtgcggactcctcttcggcgcaggcggcctcgtgcgccgccaatgttgcctcccgggtggcgacggcggcctcgcggtccgccagctctctctccttcgcgtccagggcgcgggcgcgctcctccagcgccgtggcacgagcctcaagggcctcttcgcgctgccgggatgccgcctcgttctccgccgcccgccgttcccgggcagcggcggcgtcaaggactcctcgggcagcgtcgagcttcttctctagctccgccgcccggctcccgtattgaagatggaggtcgtcccgcgcctcgtcgagcacggcggtggcgatgagggcagtctcccgctcctcctccacctccctggcgatctccgccaggtccctacgacgggcctcgagctctgaggcgtgccggcggtgtgccttacggcccgcctccaccaaggcctccaccgagcgccgcccctcctcgacgcgcgcccacgccgcgtcgagctccgcccactccgcctgcaggacctccatctgggcacttaacccgtccagcaccgtgctgttcgcggcggccaaggcctgcaggaggggctctgcgctcagtggggcagcggaaggcagaggggagagacgcctcggtgtgggtgccgcgcggctcagccaccgatcgacgtgccggactcgggggcgtcccccgaagctggctcgtcccgagcgtcgcccgaggggtcgggcccgagcggcgcgcccgcagcctcgtcgtgggtggcttcggaagtcgtcgtcgcctcgggcggaatcgggtcgggggcttggcaggacgcctggcgtgcgcgcgccgcctctgcatcccggacggactccccggcccggcggagtctggcctcctcccgagcggcctcctcagcctggcgaacccggacggcctcctgggcagcctcctcggcttcctggaggcggtccgcggcttctcgccggtcagcttcccgccaccgggcctgcgcggtcaccgtctcttcggcctcagaccggccggacttggaatggcgggggggggggggggggggcgacgggatctcgctgaggcagaagaaaaaccagaagacaaaaagaaacgggtgagtgaaaactcgccttgggagatgggagaatgaatacggccgcggtgggcgcggagacgaacctgcggggaggtcggttaaatgaccacctcgggggcgagatgaggttcccccggcatggctcggtcccccccatcttgcggagccgtttcttctttcgctcctcctcgggctgcggcgtcggcacggcaccctccgggcgcctgctgctggcacgcaccgccccgccccctcggggaggagatgggggaggggtaccctcctgcttcctcttcccccgggcgtcggcagggcggctgccccccgggcccccgtcgcggggccctgaagcgcgaccccctcccggggtagattgttcccccctgcggctcccgcccgcgccatcgtggcctcggggggcccgctcccccgacgccccgaccgcctgcatgatggtcaggatgttggcgcggtctggatcgcagcagagggggaggaccccttgggggatgagggatgcctctacggagctgagattcagcacccgttggaccaccatcttgaagtcttcagggacccagtcccatttgcacccctggtgggtcctcatgtagtcctcggacccggtgtactcccaggcgccccgggcgcgccgctggagcggcgcgatccggcgacgaaggtagtcgccgaagaccatggcccccgtgagcccctgggatcgcagacccgccaggcggtcaagaacggcgtcgtagccgtctcccagatctaccgccgcccgccagctggaggcctgcgccgggggctggctcggaagtcggaggcgcgcttcgtcggcgaggggggtgtagaaccagtcgctcttccagtcgtcccactttttgcggaggacgcagggaatgtagcggttcagcaccggcccccgcggctggaagtagcaaccaccgactaccgtcggcggcgacaccggctgtacagtgaagaaccaccggaacagccggagagatgggcgcaccccgataaacatctcgcacaggtgcgcgaagatggccaacgtcattatcgcgttgggggtgaggtgcgccatctggagatcataaaactccagaatatccatgaaaaaagtagagaatggcgggaccagccccgccattgcgaaagagaggaagaagacggaccgccctgggtagtgtggcgccgggcgtccttcgcccagcgcgaccacctcccggccggtggcagattccggcatgaatcggcgcggcagcccggcctgcctctcgctcacgatgcgggaaggcggcagcacgctaccgtcgagcggtgcggagccccgtgccatgacgccggcggaggaggagcttgagagcgagcgagtgcggcgagggtagggcacaggagacgaagagttggagcgccccgaccccctgaggttttggcgccacgtgtgtgggttaggtgagcacagcggggctcacctaaccgcatttatagcgggttggacgagcgcgccacgccgcatttaatgcggcgcagcgcatgcttatccggtccgtgaccggtcgcggcgtgtgaccggtcacagaccggtcagatcgcgggattaggtggcaacaggcggcctgtcacacgcctcgccccgtcccgtcggaatgatgagagtttcctggctctcgtccctagtcggagccggcgtgctcactcctgtagttggtatgtcagtcccggtcagattcattccagacttcaacgcaggcatggcaaggaagtcgctggccattaaatgaaggttgaaatgggcgtccaccggaaaagcgggcgagcagggcaggaagcgtgtgctctgcttgtcagaagtcatttccggctgtagactagccctcattgtaaaaagcatgtttcctttcttaggcagctagaggcccatgtggtgacccctgatcagataaaaaggaggcccaggcctaaaagaaagaggagggaaaaaagaggaggaggaaggagtgctagagcctgaacggtctccctcgctctccggctctcggtaattcttacacacacagatccaccagaacacaggagtagggtgttacgcttctcagcggcccgaacctgtctacgtcgcccatgtcttgtgcatttcctctctcgctgaagttcctccagatcgagggcgaagaacctcacttagcgcccccggccgaaccggcaaaggggggcctgcgcggtctcccggtgaggagccccacgctccgtcagccgccctcgcctctgtgatctcgcggctaatgctgcgagcaccagcctcgaggaggcgccccatctcgacctggagctcctcccaggtgaggacggcagccggcggaccacgaccagccacgagatcgctggctaggccgctaggtgtcgcctcgtggctcctgggcacgaccacgacatccgtcgaggccacagcaggagacgcgctggaggtccccctagacccgtcttgcaccgccttcgcccgcgccgccctgcgaaaggctgcaattgagacagactacaagagtttgacgaagtcacgaaacctcaaattcattcacttacttctcgccgagcgtcacaagccgctgccgtcgcggaggcgggggagacgcatccgaggcctggagtataacgtatatgaggtgaggtggaagtttcccgactatgcgatgaaagaccaggagagcttaccgagggggtgggcgtcttccgacgatgtctgatcacagaggagaatttcctcccctttttcggaacattgccatcactcgttgtggcagcagcggcagcagcgtcagacgcctccttggcgactttctccttcagcgacgtcgccacctaatggtccacgagcggcccgatgatatcagttagagggagagcctacacttcatgaagtcatgatgtgatcccgaaagaaaaatgcaaaaggaccgctgagtgcacttacatagttggcagcttcgcgctcggctgcccctttctcgcaaagggggacggggacgttgctcgccgttgttgggccactgatcatcagttggctgacgcggcactccacggttgcgctgtccaagcctgtagatcgagaccagaattcgataagtcgggaagaacacgcacataagggagtcaatttaactaaaaaaaataccccgaggagaaacccgggtcgcgtcctccggcccagaataatcaaaggctgggtgggcccgagcctggagcggctggatccgcctatcaatgaagtcggcagcgacttcataccccgacaatccccgtactcggaggtcatcaatgatatcgatgaaagattggagggatggggtcaaggtggatttggcggtccaagatgaaatcttgtctggttgctcctcaggaacaataaagaccggatccgaatcttctatctgaagatagaaccacctcccccgccatttgctgtgagatgaggggcactagaaggggggtgtatcgcgacttcaggccatcccgaagtcggaaaccgacacatccaaacacctttttaggtttcatccagcgcaactcatagtaaaagcggaagaggtcaagaaacggctctaccccaatgtaggcctcacaaagatgcgaaaagatactcaggaaggcgacggaattgggtttcaaatggagcaaggaaaggccgtagaaattcaagaccaagagaagaaattcagaaggcggaggaagaaaaccacagagaataaagtcctcgatcgcaaccatgcgacccaggacaggctggggttcagtacctcctgcttctctctccatggttccgcgactgggaagggcgccatcctcctgcagcttcttcagcgatgcgctggtagaggtagacttgtcgagatccattgctgccggggatcgccggagaaaggaccgagatgagctagctagggtttttgtgggagcggagaagacgagggacacttggaggctggagagttttttcacaacaggcggacttcaaattggatccccaaaactcccttaaatagacgcacttccgacggtgtgaattctaaggaaaggagagagatggccgccggaaatttctgggtctgttacgcgcggcagtttttcggacttcaatttaattcactcatgaccgttgagcttcacctggcgttgtcgatcactccttgtctctcggtcctcacaccgagaacgatgacaacctcgacatcagaagtcgcgatcggtttcgcgagttcatttaagtagaagtcgggggctactgtcagggttacgggtaaggtataccctctacccttcgatatacgtcacatatcgatatggtatacttacgcgtatatggacgttttcggcatacgttaaggaaattcattatggagtttacagatggaaggagtcctactcggatataaatgggtcgtcattgtatcgtaccgggtccgatgtctccgagttctacttggagaccagttgacatgcggtataaaagggaccccccgggaggacctaaagcatcgaatcttaccgccaacacatccaccacagcctacgaagccggagcctacaggagccaagtcgccgggtgatctagtcgaatcaactcgactacgatctcattggtatcgtcgagttccactatttcctttgtaatatgtggtttccatcatataatcccatatcaactggattagggctattacctatcaaggggcctgaaccagtataatctttgttttctgcctactcgatgtcgtattacgtagatccttgtaccagcgtactccaataccctctatatccggtttacggatatcccccgtcgacaccctccgtcccacattatatgggattaggggttaaaagcgtgtctcataatataagggatcgggtaggcagagtactaatccaaaccgacatataagaattgtttttttaaaaaaatatatttcaacatcgtattgcaataccttcgaaagaattgctcaggatatattgagattgacgaagtcaccatagacatcttgctatcgacgggtgcattgccttatcactaaaaaaaataattagccgtaaattcgagcacccgtgttaaatctagaatttaaacctggagggccagttcgaccacaagaaacctaaagttgagttacgctcacttcgcaatccacagtaatacataccaagcttgctctgtgtaagcacagttttttgaacaccctacacgatggtctttaaaaaaacgctaccttcatcaaaattttgacatcaattaaatgatcatgtattaccaaaattttgacaatgcctaatttttgaccgaattttaagttaacaacatttcgctaaattcacataggaaaaaatacaagttacaaaagtccaaaaggagaccgtggatgacgactacctggcacgacattgggccaccaccgccaaccctcccaaccactgccagatgggacgccaatacacagctcagcacccacccccaaaagtccaaaaaaacccagccaattcgctcatttccattggacgcagccaactccgcgtccgcaaagaaactagtctacgccgccgcctcgccaacctccccacgccggccaccgccgcacgggctccggcgacgaacgagggcgctgctctcgagcgcgatggggggccggaagcgcgcgctgctggtgggcatcaactacccgggcaccaaggcggagctcaaggggtgccacaacgacgtggcccgcatgcgccgcgccctcgtcgaccgcttcggcttcgacgaggccgacatccgcgtcctcgccgacgccgaccggtcggcgccgcagcccacgggggccaacatccgccgggagctcgcgcgcctcgtcggcgacgcccgccccggggacttcctcttcttccactacagcggccacgggacgcggctgccggcggagaccggccaggacgacgacaccggctacgacgagtgcatcgtgccctccgacatgaacctcatcacaggtgattgctccgcgcgctgctgtctacattttttttgtcgtcctgcttcggaattggggatcgaataggcgagatttgagagggacgttgtccgattgttacgtgacatgacttatgttcgaatcgtgctcagtgtgctatatgaaaaaaagttgaatttgatgggttatgaggcgacttaagttttgggatctaatgggccaaccactagtaattttgctactgaaatggacaaaaagctgaattcaacaacaccaaagattccgtatgatagtatttggtttcttttctgaaaatgttgattatgtttcttttaaatgtggaaaatgttaatatttcgagtgcatagaacctccatgctgtctataaaccaaagttagtgtacatcacacatttctgatacaataattatatctatacctgctatcccaactcccaagttggttgtaggtgagtggagggaaaagcctgaagccgaactaacacttgatcagaaggctctgattcagatcaattgaaccaaaatgcccttttagccacaaacaattagccaggccagattagaatttgccacttggtgtcctgcctggtaaatttaggtaacttagaataggatatgctcttcctgtgattccttcttaccgttaagttatgatttgattgttctacctctggtttcaaaattttaggtagcaagaaaaaaattatcaatcttattcactgagatagaatagtggcttacctatcttttttgaacggaagtagcttacctatctgattctgttgtcaagagcatacatcaatctttggtagagtagtagctcatctatctgattatgtagttaagagcattcatcaatcttgttcactgattcactgaagtagattagtagcttacatgtcttattctgttgtcaagagcgtcctgattttcttctgtaccctgcagaccaagatttcacagaactcgttcaaaaggtcccagatgactgcttattcaccatagtatctgactcctgccacagcggtggtctacttgacaagaccaaggagcagattgggcacagcaccaagcagaaccaggcccagcagatcaagcgagaagaacgttctgactctggcaccggcggtttccgatccttcctcaaagaaaccctcaaagaaacagtccgggacgcgttcgagtctcgaggagttcacatccctcaccagagcagccgccgcaacgacgacgaggatgaggagccacacatgggctcatcctcccatggtggcgatcgcatcaagaaccggtcattgcccctctcgacgttgattgagatgctcaaggagaagaccggcaaggacgacattgacgttggctcgatccggatgacgctgttcagcctcttcggtgacgacgcgagccccaagatcaagaagttcatgaaggtcatgctgaccaagctccaggagggccagcacggcggcgtgatgggcttggtgggcgccctggcgcaggagttcatgaaggctaagctggagggcaaccaggaggcggacgccctcgagccggccatgaaacaggaggtgcacagcgtccacgaggcgtacgccggcacgacggcgagnnnnnnnnnnnnnnnnnnnnntagcgggtgccagaccgaccagacatcggcggacgccacgacgcccaagggcgtgtcctacggcgcgctcagcaacgccatccagaccatcctgtcggagaagagcggcagggtgacgaacaaggagctcgtgctgagagcgcgcgagttgttgtccaagcaagggtacacccagcagcctggcctttactgcagtgacaagcacaccagtgtggccttcatatgctgagagcctggaacatcagctgtgctgcgtggattgctacatatgcgagaatcttccctttcccctttgatgttttacattgttatggagtatggagtctatttgttttttaaatgaaagacaacatggagagtggtcgactgttaatatcaagagaagatgttacaaaatgacagtaaaataatcaccaaatcccagccaccgggaaatgcgatttgtttgtcatcacggccaccatttcactgtcagatccccggtggtctccatcagtccaccacaaaaaacatgttgctaaaaaggctgtagaatggcagcctccagccaacctggtcaggcactcaggcacaccagccgatctgccagtgtcgagtggcatcactagccaatacaagaaagcgcgcgccctggcagcgacgatcacctcgcgctaccgcactcatcactcatcagagctccaccaacccaccacaaaactgccactctgccagtgccaacctatcggaacggcagctcgccgccccaccaacccaaaccggtgtcccggcagagtgcacacacctcgccggctcgccggtgctcacagccgcggtggcgattgatcgatcacatcgccggcgacgaacacgacgatggggcggaagagagcggtgctggtgggcatcaactacgccggcacggagggggagctgaagggctgcctcaacgacgtggcccgcatgcggcgctgcctcgtcgaccgcttcggcttcgacgaggccgacatccgcgtcctcgccgacgccgacccgtccacgccgcagcccacgggtgccaacatccggctcgagctcgagcggctcgtcggcgacgcgcggcccggggacaccctcttcttccactacagtggccacggcttgcagctgccgatcgagaccggcggtgacgacgacgacaccggctacgacgagtgcatcgtgccctgcgacatgaacctgatcaaaggtgatatcggagacaaacacctgatctctcgctaacacccagtatatatggctatcactcatttgacacgagagctggatgatgcagaccaagatttcacggagctcgtgcagaaagtcccggatggctgcctgttcaccatggtctccgactcgtgccacagcggcgggctcatcgacaagaccaaggagcagatagggagcagcacgaagcagagcaagatccagcaacgggagagagagttgcgccggcagcaagctccctctcccggcacgtgctcgtgcgcctccctcctgcagatcgcgctgcgccatcttcctcgccgcggtggccaacggatcatcggtagccgcagccgcgatggcgtgggagaggatcaaccaccacgctcgcaggcagagctgctggccgccgacgcgacgcgcgccggcatcaagaaccggtcgctgccgctctcgacgttcgtggagatgctcacggagaggaccgggaaggacgacgtcggcgtgggctcgatccggacgacgctgttccaccacttcggcgacgacgcgagccccaagatcaggcggctcgtgaatgccatgctgggtcgcagacacggcagcgccacggcgagcgaggagcacccggataaagctaagccagagcgcgtcgacggcgagggcgaggcggcggcggcgaagcaaggggcgccggagacgaggccgttgccgcgcaacggcgtgctgatcagcgggtgccaaaccgacgagacctcggcggacgccaccacaccggagggcgtgtcgtacggcgcgctcagcgacgccatccagagcgtcctcgccgaggagcgccgcgggaaggtgaccaacatggagctcgtgcggagagcgcgggagctgctcgccaagcaagggtacactcagcagcctggactttactgccgcgacaagcacgccaacgtggctttcatatgctaaaaacttcatctcgtgtcatctttatgcgataaattttatttccccgtgttatttagtatctcttggtgcctttttttttatcatagcacacgcaaaaaaaaccaaaaaatagcataagaatttttcgctttcgatcagaagcacaggccaccgatttttcttcgccccatagcacttcagtcaggtttgtagttaacagcattacactgaagtatgaaaaaaaattgttggacccatttgcccttcgtcttcctcgccttaatctcccattctgtgtcatctcgttctctttattctttgtcttcaccaaaccctagctctcgctccccatccgattatacaccatgtggaagacagagtgttcaacgggagctctcgggtcggtgcccacaatgacggcgctggcgtcgttgccaaatggcaatgcgtgacgagggtgtcaaggtgggccttgtcgggggcggcgaacactatgaggaagacctccgtgcaggccacgagcacgcgcgccccgtggttgttctcggcgatgtccttggtgaggcgaagcgcgctgcagctggcggagcagccgtgcatgtagaggatggtgcgttggacggtggcacggaggccgaggagtgccgcgagccactcgtcggtcccaagggagtgggcgccggcgttagtggagacaacgaggtgggtgatgtccgcggtggggtggccccacttggtgattaccctcaccgcggtggccatggctagctttggcacgcgttcttggtgaagttgagccgagcgtcgagagatggaacggcgcggtcgaggaactctggatggccggcaatcatctcctccatgtggctcatatgaaccaaggcatgaaggcaatatggtctttctaactcttgactaacaactaaccagttcactggaacgatgaccacgacggaagtgttacggggtgaagaaaaaccggtggcatgtgcttctaatcgaaagcgaaaaattattgtgccattttttgtaccgctttctttcctatgttatggatcgaattttctattttttcccctccagtttaacatatacaacacaaaataatactcttgcttcctgcattctcagctaaaaagaaaggaagaaagttcaattgcacttttcttacacagccttgtaaaaaaaatggcatacaaaattaacagtcatgtgggtgtcaggttgatcaagcagtaaacaataatcatatactccgtagcatgttccacgagatgtgctatggtagtatgctgtgacaaagaatatgccaatgacaaattgataaatccctaccgctgaactggcctcgagaaaaaaaaagtgttttgtctaaaaaaagagaaaaaaattgtgttcaacgaatcacacgaaaatggacaagttttctccaaactccgatcgatcgattcgatcacacggatcacacaaaaaaacaacggcgatcacggaaggcagcaagccccacacgtcgccgtcgcggcgatcaccgccgcctcctcccccacacaaccaccggtatcatcgacccccacctcccatcccaattcccaagttcccaacctctcgccagcgataagcaaatctccccctcccccctctcgtccacaaaaccctctttctttaccaaccccccaacccctcgtccccctcccgcctcccaccttctcgcggttccagcctccgcgcgcgctccctcgtcctcccccaatggcgtccgcggccgcgccgaccacgtcctcgctctccctcgccgccaggcgcgccgcggcggtggggcccgccgccgcgtcgccgctacggcgcggggggctggcggccgggtgccagccggcgcggtcgctggcgttcgcggcggccgcggacccgcggctggcgacccacgtcgcgtcgcggtgccggcaggcggcgtcgtcgtcctcgcgcgggacgcgcgccgtcgccaccatggcgaagaagagcgtcggggacctcaccgccgccgacctcgaggggaagcgcgtgttcgtgcgcgccgacctcaacgtcccgctcgacgacaaccagaacatcaccgacgacacccgtgtccgcgccgccatccccaccatccagtaccttatcaagaacggtgccaaggtcatcctctccagccacctggtaaagcctccgtccctcatctttttcctcaatgtaacgctacttgtcacagatatacaatgcaggatctcagaacctgcgggatgccagtcgctgtgatctcatctgattccatgggatgattgttgtgcatagtgtcttattaggcacgaatttttcttgttgtgctgtttgaaaggctaaaattggttatcaaatgttgttgcaaataatctagcaaagtaatatgtgaccaatctttttactcgttgcatatgaatcaattgtgatcttattcgttttctcctataaatgtgcagggtcgcccaaagggtgttactcccaagtttagcttggctccccttgtaccgcgattgtctgaacttctcggcatacaggtttctgcgttactgttatttctaattgaatctttacgggctaatttgatcacactgattaaaccatatttgtattcgcaaacaggtgactaaggcagaagatgttattggaccagatgttgagaaattggtatctgaattgccaaatggtagtgttttgctccttgaaaatgttagattttacaaggaagaggagaagaatgacccagagtttgccaagaagcttgcctccttagcagatctctatgtcaatgatgcattcggaacagcccacagagcacatgcatcaactgagggagttaccaagtttttaaagccttctgtcgcaggattccttttgcagaaggttactaccgtttcaccttacattttcaagtctgatgcttgaaatttttgaaagctatacctagaccagaaattttagagtaccctttcttttctttcaaaaacaatataaagttctgagcctcaatgtttatcattaatttaaatcacaggagcttgactaccttgttggagctgtttcaagccctaaacgcccatttgctgccatcgtgggtggttcaaaggtgtcatccaagattggggttatcgaatcccttttggagaaatgtgatatccttcttctaggtggtggtatgatcttcacattttacaaggcacaaggactctctgttggttcttccttggttgaggaagacaaacttgagcttgcaacatctctccttgcaaaggcaaaagaaaaggtgtctcccttctgttgccatctgacgttatcattgctgataagtttgctcctgatgctaacagccaggtctgttatgttttattcttttgtaatcactgatgatgattatcatagatattgtctagtcgataacttgatatagagcagctcaaagtttggtgaagtgatatactggacctgaccttgactttgaattgttctacaggttgttccagcatctgctattcctgatggttggatgggtctggatattggtccagattcagtcgcgtcattcagctctaccctggaaacaacacagacagtcatttggaatggacctatgggtgtcttcgaatttgacaagtttgcagtaggaactgaggtgatggcctgtgccaatgctctcattcggtttgattacagatggaattgccaaaacaaacttaacggaattgcgaaaa

SEQ ID NO: 25679 - DNA, 769 bp, Oryza sativa
cagacttcaacgcaggcatggcaaggaagtcactggccattaaatgaaggttgaaatgggcgtccaccggaaaagcgggcgagcggggcaggaggcgtgtgctctgcttgtcagaagtcatttccggctgtagactagccctcattgtaaaaagcatgtttcctttcttaggcagctagaggcccatgtggtgacccctgatcagataaaaaggaggcccaggcctaaaagaaagaggagggaaaaaagaggagaaggaggaaggagtgctagagcctgaacggtctccctcgctctccggctctcggtaattcttacacacacagatccaccagaacacaggagtagggtgttacgcttctcagcggcccgaacctgtctacgtcgcccgtgtcttttgcatttcctctctcgctgaagttcctccagatcgagggcgaagaacctcacttagcgcccccggccgaaccggcaaaggggggcctgcgcggtctcccggtgaggagccccacgctccgtcatctggcgcgccaggtagggggcgcgcgtgtctttctaagccctcgtcctctttcgtgtgcgccaagcttctcccgctcagccctatggccgaacgggcagtggcgcacaccctctctccgagcgctagcggtgacgacggggagcagaacccgcgccgtcgggctcgcaccccaccgtccccctctcgctgaaatcttgggcggggggaggcgctcgagggggtcgaaagatccgcgacttcaccgcc

SEQ ID NO: 25680 - DNA, 1178 bp, Oryza sativa
tggtaagtatcatccgatatctcgtaagtatcacgcgatacatagcagaaatcgtctgatacctgacatgatacctcgcgagtatcacgcgatacgaggtagaaatcgtctgatacctgacaggtatcacatgaaacctcgcgagtatcacacgatacgtggtagaaatcgcatgattcctgataagtatcacatgatactttgcaagtatcacctgaaacgtgtgtagaatcgtctgatacctgataggtatcacacctgatacctactcgggatcatcccgttcgaaaacgggattccgtcgtatccccttttaaaaaagaactaaaataaaaatatttcccctggatccattctcccgtcagttcgtgatgattgtttcgccacactttaccacacagccagttccattgttccaatatagccattcgtctacagcttgcggttaattttgttgcagtgtaggagtctgacaagcaaccaccgcccgggtcggaggacggcgaatcgggaacccgtacatgttacctgaaagggacatcagaattcagtgcccgtgatgggctgctgctgatggacgcggaatgacaagcacgcatgacatcgaggacgaggtggatgccttgccttcccactcccacagtcccactccctcggccctcgctcgcgtcgttgccgcctgcgcgcgccaaccacccaccgccgatccacccgcatgcgtacgtgcaagcccgcgcgtcggggcccctccaactcgcgcgcccgtatcgtccgtgactccggcccccgaaccggccggtcctaaccttcgtacgccgttgccgctttgcccccgtccttctcttttcggcttcatgatttgtaccagtaaccagtgtaccacacacaccgcaagataaatgacacgagacaaaatgcgaggacgcgcgaaagcacagagacgcacgcacggtgtcaccggactaatctccaatttgatatcgagtagcagtacttgtgtattgccccggagtaacccacatcgcgggtgattacacagcgcgcgtgcgagcgttgcacgtacgcgttacgattacacgcgccatgcccgtggtgaagggtggcggtggcgcggaggcgtcctcggcgcgggcgaccttgccgccggagccaccggctcgcggcgtgaggaggggggc

SEQ ID NO: 25681 - DNA, 1689 bp, Oryza sativa
cgtctcgcgccaccgcctgcccaccgcccggccccgcgcgctgccgtccgcccgtccgccgctccctcgtctcgcgccgccgctatccaccgggaggcccccgaggtcgacccggccgcggcgcgcagcctcccggcggctgccgcctcgcctcacctcgccgctgcctccgccgtcgccgtttgaacactgaaggagaagagagaaagagagtgagggatagaagagagagaagagagagaaaaactgacaggtggggcccacctattttttaataaataagttgctgactggactgccacgcgtacgccacgtagaccaaaaccaccacggattgggtcgagggggggtaattcgtcctgtttacatagttgggggtgaagaatgtccggttttgtagttcaggggggtaattcggacgactgcgttagttcgagggggtaattcgtactttttcctataattaaatagaaaggggttgtgattggttgagaagtggaggtaggtaagaaaagtgaatggtaaagggttgtgattggttgtgaaatgaatgttggttgagaggttgttatattttgagacaaatcctaagtgctaaaagttgttatattttgggacggatggagtattaatatatggtcccacctgtcatacacacattacgtcttggagtccgtgctgcagctggctacagatctgtagcctgctgctcttctctctcatcttttatctcattaaattatgtttatagctggctaatagtctgctattgtacctgctctttagacccaagattcagcatcgcaccctctcggtcaccagaatttccaattagctcgtcgatatcttgtcgatgccttctctccttgtagccgccttgtattccagaagtatactgaatccgtccattaggcctgatctagccatccttgttatcatcgacattgctaagagcaagtataatagtaggctataagccagctaaatgctgagttggagaaaagaagagaagagagagaggagaagcgggctgtaaactaacagccggcttggatataagaaccaagaaactctgtgagagagacaagtgggccctgtattaattatgaagagctaactattatatggataggctgagagaaggctataaagaaccttatagccagcaggtcggctgtattattagccttgctataaggaaccactatcttcccttcttagcgtagccaccttttatcaattggagagctttagatctagccatcaggccagattcatataccttggatgccactggcaccgccatcgtcttaggttactgccatcgagccatagttggccactcgggtaccgctgtcacctataactcccgctatcttcattcacgccccatctttcgcctatgccaagatgttcgtcgtgatgtccttagcatgttcaggttgtgcatggcctatcgaatatgtgcctcccctccaactgcctctccatacttctccgcgaggcatcactaccacctatctaagcaccctttctcgcaacctcattagtggcctcttcatgtgtctatttgccggcattagccaactcttctgcattagagaaaccgcacgcacgccaccgcggggtgccttctccatcgccttcaccaaatccggtgcgacgggtgtggggggggggggggggggg

SEQ ID NO: 25682 - DNA, 7315 bp, Oryza sativa
gtgagaattgttttggcttcaaaagttgcgaggaaaaaaagagttacaggacatgacataatccctgcggatttgggttttcccatgcgccgagacaaacaaacaaacgggcgccggtctggtcactggtcaggtggcgcgcgcggtgccgtgggcgaggaggacgctggtgggggagaagacgatgccaccgccgccgccgttgttcgccggggtggcggccgcggaggcttccacaggctttcttgaacggccgcgtccgcggtggacgtgccgctcgcagtacttgtgccccggcaccacgtcgcgcgagcaccgccacttcttgccgtccgtgcgcctgcaccgccctgggtccggctccatgctgctccggtagtcgaagcacaggttccccaaccccatcactgccactcaaatgtcaaaaacggcgtccacattatcgaatgatcggaaagctcgacaccaatcaggccaaacgcaatgagaagaaaaagaaaaatatcttgttggcacgtacgggaagggaagcggtgcgggccgaaggaggaggacgcgacgctcttccagatggggagcacgaggtgcaccggcacgggcgcgcccgcggcgaagtagcggtagatgagcacctggtgctccagctcctgctgctgcatgaacgtcagcgccgtcgccttgtgcgccgccgccgccgacgcttccacgtcacgctcgccgcggctgtcgccgccgagtccaagccccagcccaagacccaccggcggcgggggtgctgccatggtcaccactcctacgaaaacacacacgccagacttatcaacacgacttgcacacaaacacgattacatgttcgctcaaaaaaaaaaaaagaacacgcttacacaaacacataccggcattcgggtcagcgccggagaggcgaggcagcttggacggtggctgcggcgagtcggcttccttctcctcatccattctgacaactcggcttgtaactcctcgctcctcggtttcgaactcaatggaggtaaggtttggggttcttggtgggaagaggaatgaagaaagaagatggggggcagtgagttgtcagaggaagggtgaaggagtgggcatatatttatgcgtgcgacggctccccgtcgtctggtcgcccggtaacttgtgcgcagaggtaataacggaagctgaggggatgtgtgggctgtacattgcttgcggtgggcgcgcgcggaggtgtcgcggcgtcggcccctggcgccgggagatgacacgaatgaaaatactttcgacattttctgggcgttggacggacgggcttgacagcctttttatcgcttctgctcgtttactacttttcgcgttggatggacgcagcaacgtgtttttgtgaaaaacggatgctcggatcacgtgttactatggttgataaaccaacgtgttattactactattgtcgctctctcatcgccaattctataccgggaaaaagtgcaccatgcatttacctatataagttttggtaggccgacctccattgattctaattctgcaatattcccatcttacgaaaagaaaaacagtgtatatagaatgtcgttttgtgctaggttggcaatgggatatgacgagagtgggttggacaagaatggccctgccccaaaggccctaatccttgattccatcttccacaaccaaccgtgctagcttctttaggcagaaacttgatggggcccaaatacctgatcgggccattgcacggtcgttggtgtgcaactgagacacaccaaatggtaagatgcaacggtggaggagatggagatagcagggtgagagctggtgaggtgccacgctagtagaggtggatgtgggcgcatagaagccaatgcatgcgagacacgatggtaaagacgtgaactcgtttatgagcagcaagcggtggaaggtggagcacgaacctcacgcaggacatgatcgcgactcatgacttgtaccgtaggcgacgttgatgccactggagtcacaagcaagaagtcaacggtgggttggtgtaggtagcggggtgacacaaatcgagtggttaaaagaggaattggggggggggggggggttggtggatctggcaacgtaggttgccaaagatggtggacgcttggtggcgtggaggaagcttgacactggagttatagaagaagatatctactcaaccatgcagtccatctagatagtaaagaggaggtggccaaccgtggtgtcgtcaaggctatggtggcgatgacgggcgcatctagatgtctagtgaaagctagaggaattagaacggatagaggggataaggttttggttcatgaatcttggtgagatctcaaccattggaatttgagtgattctttccacaagacgttcatatgacactagacaaccccggtttgtattcgagcctactaaatgggttttcttaagaattatgagttgtttctattggccttatcgttttcgaggcctcatggtaggaatggatccctggccttggttatgcacaatggaacatcccccctcctcgcgcatgtggaacccatggggcaaaatctactccgtcccaagcctcataggggcagagacataccccaatgggatttggccacccttaatatatatgcgtatgcaagtatgcaaggaaaaagaactcgtgatttctaggcctaccaggctagttgatctacaatttgtctagactcatgtcaaaatatgcacatgttaatatatgtatgtgtttggtgggaccgtacgttcctcgtgcactaaaggctagacttccgatctctttttagtttagcttttcctagtatgtttggagtttggatacgcgcgtgtcccctgaaatgtacccttaaatgaatatagcaacccatcttcaatatttttcccaatttagaaataggtgctatttccacagctttcacaagcttgcctcgttttgcttgatgcatttgtttttagatattgaatagttttctttccttgacttgctcacatgactaaagatttgtagtagcgatctcgtccaagcgagcaattagggttcccggtgaccatagcttcttgcaagtaggattgtccaaaaaaggctcgaaggctcccaagcaacacaaagctttgtcggcatcagatttgtgttatagtgatgaagggtgttttggaaaactccttgtaggatcataatcctatattatcatttgaaataaagttttggacaccactgaattctataaaattcctatcaaataccttaatccatacaagttttagaaaaatttaacatgtgatcgaatctcacggagagtttctttgagtatctacctttcctaaaattcttcttttttttatcaaatggtaatttttgtatttttacatgttttacaattctctactttatatttatgttgttgtaaaaaaaagtctactccctccaccccaaaatataacaacttctcccccaaaattctcttttcgaccaatcacaacccttcaccattcaatttttccacctacctccacttctcctccaatcacaacaactccccatttaattctaccaactttcttaataaccgtgtccaactataaaaatgtttatattctggaatgaatggagtaatgtattttatattccatttttgtcaatcctatgtttcaaagaaattttagggcccatttgatttggaggaaaaacataggaattttggatgatttcaatcgtataggaaaaaaaatccattgaatgcatttgaaacaaagaattgaatcctatcttatcatgtgaaattcctatggaatggacaatcctatagagattttggaggaaatttagtaagagctttaacctcttgaaaaattttctgtgaatctatctctcttatccgattcttgtgtttttcctgtgatacaatcaaacggtcaaatcctatgtgtttgcaatcttttgttttgcactttcattcctgtcagaagcctttgttttttctatttctatgttttttcattccgttagtgaaactagtacgtaggctttgtttagttccaaactttttcttcaaactttcaacttttccatcatatcaaaactttcctacacacataaacttccaactttttcatcacattgttccaatttcaacaaaatttccaattttaacgtgaactaaacacacccgtagtactagcatttctttggatggatgtcggatggagtgagaacgttccatggacattgagtgagaaagctcctccttttccgcgcacacgcttcctaaactactaaatggtgtgattttttacaagaattttctataggaaaattgctttaaaaaattatattaatccatttttgcaagttaaaatagttaatacttaattaatcatgcgctaatgacttacctcgttttccttatcttcccaatcttctcgatcttcttctcctcaaactcaccctaagtacggacaaagttatttctctccaaaaacatgaagagaaaactattttacaattgctgtgtgtgagtagtttcaggctttgtttagttcacgttaaaattgaaagtttgattgaaattggaatgatgtgacagaaaaattggaagtttatatgtgtagaaaagttttaatgtgatggaaaagttaaaagtttaaagaaaaagtttgtaactaaaccaggtctgagttaagcccgcttggatctactcgcctgtcacgtgaacattggactcctcctctgacttctgacaacatgtcagccttttgtttcgttccgcgttttctattgcctcggccataccgtgatgaacttcgagagagaacagaagaaacgcacactgacgctaacccgcattacaaatacggactcatttgtaaacaccgatcgttaacagaacagagagaacgaagaagaatgagaaactaccgccacaggcaagtggcaacctgcgcgtgcggcgagccggggaggacgtacggtaaaacccagagaggggctgcaaaggaggctggttacatccggtctccaccaaatttttttcccagcgcaaggccttgcgtgattgcgtgaacgtttttggccacggaagatttcgcggtggggatagctagcgagcgacggaaaagcggaggcgatctgcttcgcttccttcctttttctactaggtcccccctactggcggttgcgcatgcagcttgcagcagcagggttgggctgggctcgccgcgcgctgatctccgatccagagcggggcggggcccgtggatcggcgcgtgctacggatactggagcgagggcatggcgtgccgttgctcccgccgaccgcggccgcgtccaccgtttctgtccgcgtctacgcacgtcagggcgtgattgtgctgctacgcgtacgtattctccgtgctcgcgatcatggtgtcacggacagcgaggctgatcgcggtggggggcgccgtctttggagttgcgttgctgcaggggttaccccacggcccagctgtccaactcgtgtcgctacctgccagagctggcctgcatgccgctaggcgtcgacgtcgtcgcgtgctgttcgggaaggacggggaccgagtcaccgagaacgtggcgtcggaaggtatcctatctccggccggggatagctatgatcatcggagtctgataatctgtccatggcaaatgcttggtgctggagcctggcggcctctcaatctactccaacagcatctactcagaggaccgggaagcagataccctatctcgatagctttgcagcatgcgaaccgttcatacagccacatagaccagtacattaacaatttacagcccggcggctcaatcagtcaagatgtcagtccgcccgaattgtcgtttgccgcgctttgctctgttggccgccggtaggcggtggtagagggagtagagagcgagaagccgagaaccgtcgttccacgagcttcttctgcacaggagcagttggaagatgcgtggccatgcaccgcagtgcccatccgcggcgcggagaggcagccggcagccaaaggcgtagaaggccaacaaggcaacaacccgcccatctactgatctacagcggtctaatttgactgacaaaatcacaaaatatagagtttaaaaaactaaagactgacaaaatacatggactttgttgaaaacactggatcattacaaatgtttacgatccaaaacaaggacttaacagaaaattgataggatagttagggatgtaaatgcattgataacagttcaaaataaagggtctggttgcagaaaataggatcaggcattgataacagtttgaaataaagggtctggttgtagaaaataggatcgctccaatggtaggatagcctaggcatcgggcgccgaaggaggagtggaaaaattggacactgacgcatgcgtgcaaaaccactataaattatttttatcttaaattatttatccaaatcatgatctgattgcaccattacattcgttgcaattaaatctttaaaacaagaccacacatggatatattccaacgaaatttttttagcttattattgaattatttttaaatgttgcataatgttccatcaagtatatcggaattgtttcactaagtagatcgaaaatgtttcagttgtttaaatcagacgttgtttcaccttatataaaaacaatgtttcagcaaatagtgaaagaatgtttcagttcactgcaacatttgatctatacataatggaacattacgagtacactaggtgaaacacttttggtggaaaaaaaatgaaacgaattcccttaatagatggtttccaaaatatgtgggtgatttgttgcaaaagaatgtttcagttcactgtatgtttcagttcactgtaacattaaatctatacatagtgaaacattatgagtacactaggtgaaacatttttagtggaacaaaaaataaaacgaattcccttattagagggtttctaaaatatgtgagtgatttgttgcaaaaaagaatgtttcagttcaactgattgtaaggattctcgcgatggcagcggtctgaaacagggacgtaagtgtaaaatagggctaattagatgggccgcataaaacagagaagtgttgtaggttttatttgggccgtggtgcgctaggcgttctgggctcatccgtattgaatgcttccgcgaattttttttatttataatttttcttattaaaagttttacaaaaacaattttccattttgaaaattgacggaaatagtcgcctacgggctgcagg

SEQ ID NO: 25683 - DNA, 1509 bp, Oryza sativa
ctcatgagaaatggtgagtctctcataagaggtctttagctcctcatacaagacctccaaagaagcatgatccttctttagagccttgaacttgacaatctccttctcactataagcatggagctcctcaaacatactcacaagctcatcataggaaacatcatcacaatcatcatcactctcactatcactaagagatgttaccttagaggaaccctttgccatgagacaaagtggagcgaagagtgatggagcctccttgatggcaacaacggtcatcttcttcttcttggagcttgcatcatcaccaccttcttcctcggacccggatgaggcggagctctcctcatttgagtcccattccccgatgaatgcctcaatcttcttgcattccttcttgagcttcttcatgagcttgtagcctccactcttcttcttggatgacttgtctccatcatcatccttgaaagggcacttggaaacaaagtgtcccttctcaccacactcaaaacacctcaagttggagagagtcttgttgggtcttctatttctactcctatttgagttggagccccttcctctctcctttctccttcccaagagatcattgaaccttctagcaagaagggcaatctcttcctccaagtcctcattgacttcattcaccttgcccttgctcttatcttcaacttcggcttggagagcaatgcacttcttgaaaggtgatcaatcaagtgccacactagctctacaaatggaagcaatgcacttgactcttggctaattaaccctctaacacactagatggatgaacacaaagctcaagtgggtgtgagagaggtgcaaggggtgtatgcaattgaattgggtgtcaagagagaccccttgctgctggagggagagtatttatactcccaccaaccaaaactagccgttgggggcgaaatcccctaactttgtgctctgccggtctaaccgaaggtatgcggtcggtcagaccgtgctactctgcaacggctagaaaactagccgttgtagtgctgtcagagggcccccatcggctgccggttagacgggcgtggagtgggcggtcagaccgaccttggctcggtcagaccgccatcgcctcggtctgaccgaatacggctccgtcggctctgtatcggccaccccgagtagcaccatcccggcctccagggggacggtctgaccacgcatgtccgccagtcagaccggccttattcgccggtcagaccgccgtcttgcggccggtcagaccggccagggcacgccggtcaaaccgccactatgtggccggtctgaccgcccctgatcaggccgaaaccagtgaaatcccaagtgattgtgtgtgtgatgaaaagcgagcacaagtctaaatgcataatgacctaatgtggcaattaaaatcatctctttgctaggtcattacccctcttaatagtacggcaaaactaaaaaataaactagcaaatttgatcgccctatacc

SEQ ID NO: 25684 - DNA, 6092 bp, Oryza sativa
  unsure (1)..(6092): unsure at all n locations
aggcgttgttttcttttcttttctttttttgataatttgtggttgactgagatgtataattttgtgattcattgtacggatctaagatgtataatctgtgatgtatttgatttgtgtgtaatttttttaggatttgtgatgtatttgatttgtatgtataagtaactttaagatttgtgatgtggatttgggatgttactttgattttgtgatgtggatttgggatgctattttgatttggtgatttggggtttgatttagggatatgcatgccactcgatacgagagaaaattagaaagagaaaaaaggaaaaggggaccatttggactgccgctaccctctctgtagttccggtttttattaccaaccgggactaaagatttagtcccagatttctactcccggttagaaactcggaactaaaggggttaccaaccggagtaaaaaaggtttctccaccggtgttggtacgagtaaaatgtgatttttatcactaaaatacctatattacctttactacctcttggttttattataaccataaataatcctagcctatatatactttactcatcccgagaaaacgatcaatctttttatctctccttgatagttgatacccacaccaaacactaaaacttgctatattcggggatgaagggtgcaataaatttcttttttgtgtttttgattgtcacatagtttgcaaaaggcatttcatgttagtaggggtggatttgctgccagcgatccctagtgaccgcccgagctcggcgacagacgcacaatgggatttgtttttttaatgaattgaaaaatattttcacaccaaatgtttgatatactaatattttactaggcttcttttatttttcatgagatggtacacattttttactagacttcttgtcaagctgttaatagtcaaatcggcagcgacggcttttgtatttaggttttcgatttgcctgatgacatcggtttgctattatgttgaatgaagatgatggttgatatttgttcatttgttctgcatatgctggnangtntggtcaaagcgtcgtggatacgttcgtcgctcgcatatattgtaacattttaagatgtggaggctctttattctattttttataacccttttatatcatacctcgcttagtattaggctcgttccaattgcagctgcaaatcaacagccgaacatgcccatttaatataatctaccttgttcaaggaaaaaaaatccctacaactacgataaaaaatcaaacatcataactcaatatcttataatctaaagctgaccagcgaggacaggtaatggacggtagatattccgacttcacaacaattatttaatatcgcaaacaaataaactaaatataaatataaaagttggaaatgaattaaaagaaatatggatgaagaaagtgttttttttaaacaaaacacgttgtttagcaccttgataagcacatccacgatgatctaactttagaacaaaacgtcccactcaaaaatttcaggccaattttgatgtaccagtaggaagactgtagtaggatagatacgaaactgtaggatattcacggactcaccgataaacaggacgacgcaaacgccttagaaaattttcgccccaaatttttgtttacccggtcgtgtctcacgaacagccgcgagcgcgcggggagccacatattgagaaatgagtaaccaaaaaaaaagctagcgagcgagcaagcgaaggagcgggccgagatcgcgagcgcgacgcgcgtgagagggacgggacgggaggcaagtgggcgggggcacagcacagcggtggtcagtggtaagtggtggtctagtctagtggctggctggcgctctgccgcccgcgcagccacaagcccccccagcgcacgccgtccccttccccgttcccaatctctccgcctcccctccccaaccaaaccaaacgcacggccacaccgccgntgcgccaccacccacacactcccacccaccatcacgccacgcctgcagagccagagactttgagccgccgtgccgacgccgacgcttacgccgagcgcccgcacgctccgctcccatggtctccgccaaccagccgccgcccgacgcggccgcggcagcggcgggctcggctggggaggacgccagcaagaaggtgcggaagccgtacaccatcaccaagtcgcgcgagagctggacggagcaggagcacgacaagttccttgaggccctccagctgtaagcaaaatcgcggaattgccgtgcctttttccttaatttcaccccgtcttttgccacccaactcgatgcgtggttttgctcggaattttgcaatcgtgcggtctttgaggtgaagattgaatgtttttctagctcttgtgatgcgttagttaggttccgatgtttttttgctgtcttgtgtattattgatataaaacagtagcaaaatagcttacttaacttgttttacgtaaaaaaaacaaaacttgtttgtttgttcatttgtttttaaatttggtcttggagtagcatatggagagttttttagtcaggggatcttttaaagatttcttgtctgtactgagatgaagccgtgtttcagaatttcataagctgctgttgtgcacaaggacaataatcagtagtactggtacaacctttgggcaaagaggaaatctaaggatccaatttgcagattatatttttttgactaaaatttgcagattatatgaattgaaataatagcacaaatttacaaactgaggtgctttgtgttcatctagtgatgccatttgtccgggtatagcacccccactggatattttaaggcctcaaagcatttgctctcgtaattagccaaaagtcacaaattcacaactcacaaattagtacagcagtatcctgcagttctctgcttcgtagttttggacttttggtgctataatacttgatatttctttgacctggttgagcacacctgaattattggacattttagtaatcataattactatgaaatgcttccaacgtattggtccccctatttgcatatgattgccaataatgtgttttggcgcaccaaaaacactgcatttgttgctgttgaattcaagtatctgtacaaaaggtttgatattcaattgtaggactgtccttttacatctgatattcatgtgtaataccttgcttcttttcagctttgatcgtgattggaaaaagatagaagcttttgttggatcgaagactgttattcaggtgggcaaattataaatggaaaaggggatatcctctggcaaatgaataaagggaattgtggcatcaaatttcgtcacaaacctagcagaactgaatccctgatttgttgatatatgtcatatatgttgacctataataaacaactaatacacaatgcctttttttgtggtgtaatacacagtgcgttggtgcttgtgtccatgggttcaaatcccttttctccacttctcacaataaaatatttgcagacattgcacacgatcaactctccagtgaaataatttttgtttaccatctcaacttgattttgcagattaggagccatgcacagaagtattttttgaaggttcaaaagaatggaacaagtgagcatgtcccacctccacgaccaaagcgtaaagctgctcatccataccctcaaaaggcctccaaaaatggtagatcctcatatgctcataagttcagcacgcacccaacacatatatctttgatactaacagtacccccctctgcacaaaacatttacttcaatatatattctcatcttgcagagccaggatataccataaaggcagattcatcttccatgcttagagaactcaggcatgaatgccactgtttcgtcatggacacacaattctatcccaccaattgtagcctcatccatggtgaaaggtttgttgtccgtggtacctcttccttataaaaattcaaatgcaatatccatcagttaatccttatcttctttcactcagaagatttaatccttatcttctttcactcaaaagatttaagtgctggagcaatggcccccaacaatttttgctctaacagtactgaaggccctgcgagggcatggcaacctggtgaaactaatgatcagataaatcaagttccgtcactccgccgttagtacctcttaagatttttctttatatagttatctttctgcagtttgagtcatattgcccatttttattgtttctgtggcttctgttttgatcttcctctctgtgcacttgttttgtttcaatctttataacacttggttacttgtttagaataacaattaccaccaacaaattactgattctgcttgaggtgttttagaactgaaaagtagtgttacacgacagcacagtccattcccaggtcctggcaccttacagatattttttttttcatagatttgatcagtaacaatattgaggtttctgtcttcaaccaatgctttatttacatgattcaaaatttcagactggcattgttaacttttaatcttttaatgtagttatgccagattttgcacaagtatacagcttcttgggcagcgttttcgatccaagcacaagtggccatttacagaaactaaaggagatgaatccaattgatgttgagacggtatgtgaatcatggataagctttgttctgctcagttaaagtataattgtacgtgacaagtcaagacaactgaaacataagcataaagaatgttctttgtggtacttcactcaagcaatatgtatgcttttagtcagcattttagattgttttgttatctttgttgaaaccaacaaaaggcatatttaattcataatttccttagcatgcaattttcaaactcgacatttcaactgacgtgtgtccatttttctcccctttaggcattgttgttaatgagaaatctctccatcaatttgactagtcctgattttgaagatcaggtacgcagctctccagcatgcctctagaattcagtttggctgtgtactgccattacttccttcaaaagaaagaaaaatgcctttagaatttggatcatgcttgtgtatggttcactgctgtttgttttacagaaaatgttccatgcaacagaattcaagcattttctgtctgctgcattttccatacttgcctttttctctgtgatattttgttgacttcttgaaacatatgaaaggtaatgttagcaccacattgtgcatgtgctgtagtacgctaacagttattgtttactgtggtttggaggtaactagttctgaaaatcccataaatgcatgtatgatgagtattcgtttctgatttttaacaccttcattttatcaatatcataatttatttctttcatatggataaactaaacatgattttagaagcaagttcatgccttattggacttaggtgtctgtgttcacattctgtgcttctagcagggttgcccatttgccatggtttctggtactgtctgtgcagaatggctggaatgtatgggcagctatcagaaaatgtgtgcaaagtcaccaaattttagcaaacttttgaaactatcagaaatttttggtatgtaccaatatcaaattttctccagtacagcaggtcttaagttctagcccttctcttgtaacacacaattgagatgatgtatataagccataacattatgaagcatgagggcatccaaaataataataataataataataaaaggttgataccatattgaattttcttttcaaaagagttactcaccactgaaaaaaatagctttctttagtatgttggacatgctgtgcatcatagcaatttgaaataggatgtcatttacaaggctacacaattatggcattcagtatgcttccattacccaattagagcatatgtctgttcttctgaaaaaaggaactaacctgtgtcctatgaaatttattatagaagaagttgctatcttcatacagtaccccgtctgatgggcttgagctaggaagcaccagaagctcagttctagctgatagaccattaagtgctccattcatgt

SEQ ID NO: 25685 - DNA, 10852 bp, Oryza sativa
tatctcgcctcgcgacgacgccatggccaccgcctcctcactcttcctcgcctcccccgtcgccaccgcgccgacagcccgcgcccggtccacaccctcggcttcccctgcccggccgtccctgcgcctccggcggccgtcgacgttggccgcggccgcggtccaggccgagcaccagcccgcggtcgccgcggcgccgaagccgccggcactcccgttccgcgtcggccacggcttcgacctccaccgcctcgagccgggcctccccctcatcatcgggggcatcgacatcccccacgaccgcggctgcgacgcccactccgacggtacgggcgcggtggtggtggtggtggtggtggctattgttgctgcttggttctcttctctatgtgcttccgcttccgctccttgactcgttccgtcgctggcctttctttgtgcgcgcaggggacgtgctgctgcactgcgtggtggacgcgattctcggcgcgctcgggctgcctgacatcgggcagatcttcccggactccgacccccgttggaagggcgccgattcgtcggtgttcatgagggaagctgtgagtttctcgagctctggaaccacttttcagttcattgttttaaggcaattcgattttgtttctgcaagcatgttagactatttgtgtgctattaggactgtttagacttttaggagtccatggaatgcttcacctaaacaaatttgctgaataaatttgcagtttcagatattattgaattcttatgtctagttaactagtttgcctacttgaattagagataggaaatcaagtttgaagtctagactccaaacatccaaagtgtctgtactcgcactctcgcaatgcggtgtgttgcattggtcaaaactaacgcaagtcctccccggaaaaggaagaatttccccttaatgttgttgttgtgggtggaggacagacagttcatttttaccattttatttgttgcatctgaaagaatgaaacaccataaacatcggcggctgcttctgtcttgattatgttagctcctgattgcataaggtgcacgtgagtctgactttcaaattaggtcttggactttttgtactctaccagggcaaaaggtattccacgttttagaatttgagcaaggtgcttatcatgtgcttggaatgctgactgcatgtttccccttggacttttggatggaaagtatccccatgctttagaatttcaactcaacatgtgatcatttctctacatgacctcatggaacattgagaactgaaattagcttatttcctctttgattttgcattaaacagcatttggtcctgtcttagtcatcaggcaattgtatagtgtattatccaactggcctgatatttcgtgtgcactttctctttggtgctatatcattaaagtcaaaacatatgctagttgatgcagctttaggtggcttcatctgtctctgatcatagtgcaaatgtgcaatttcaggtgaaactgatgcatgaagctggctatgagctggggaacctagacgctacattgatcttgcagaaacccaaaattagcccattcaaggagacaatacggtctaacttgtgtgacttgctgggggcggatccatccgtcgtcaatctgaaggccaagacgcacgagaaagtcgacagtcttggtgaaaacaggagcatagctgctcacactgtagttcttctgatgcggaaataggaaaatggaagtgtactacatattacaggaattgaattgtaacatagtgaacaaattgtccttatgtaagtggtttatcactgaaattttagggcaaaaacaataaaaccgagtgcaatgtaaaattttatgtgtccagattgtgtcttgactgtttcacaatgaacattagaattttatggcagcaagattttcagcaacaattctggtggcatacgggatcatcattcatcagaagaaataaaagttactgttaaacatagtaaaagttttttacatcccagattacagcacaggtccgaaactgaaaccaaaatgcaaataattataccaagaacacacacaaacaaagttttaacaggaagagcaaaatagtacaacaaagcagcgtcctcacctcagatgccattttgctttcaatttatactgtttgtatgcccaaatcgatatatcgcatgtcactttaagttagtactttcacacattagtaaattactaaattaaaagagagaatcagtgtatatgagtatattgagacatcaactaattacactcactagactcgattgatgtacatcaccagctacatctgccatgtgtttgttcatactgcgcaatactgcatatatttgctcagagtcgccgtgccttgtatctgctgccacaaacttaaaaccttcgacccctcctacatctacaaaactccaccccgcttcctttttcaagccaactctcttcatttcagtcctaatctttgcagagtccttccatctcccaacaacggcatagacatttgacaaggagactctccatatgtcactctccggttccaagattgacaattctatagcagctttttctgcaagatcaatgttcccgtaaagagagcaagcagccagaagaggtccccaaatggatgaattgggatgaacaggcatgtttctgataaattgttctgcctcagcaaacctcccagatcttccaagtagatcaactacagaagcataatgatccatgctaggctcaattctgtagtcgtttttcatgctttgaaagcatctgtagccttctgaaaccaaaccagaatgactgcaagccgatatcagactcacaaatgtgatagcattgggtgaacatgttccatcatcctgcagctcattaaaaatccttagagatgatagcccatctccatgaataccataagcattgatcattgagttccacgaaacaatgtccttaatatccatctgctcaaatatctgctcagagaaatcaattcttcccaacttagcatacatacttatcagggcattgcagattgagacatcatacaaagatccagactttataatgtatccatggagcatctgcccttgctgcagtaatccagcattagaacatgcctgcactacgctcaagacagtgacaaagtcaggcacaagtccatcaccaccatgaagaatactaaaaagctccaaggcttcatccacatgatcactctttgccaggcatgagatcatggtgttccacgaaacaatatccttaatttgcatacctttgaacaccacatatgctgcatcaacttgctcaaatctagcatacatgcccatcagggagttttcgatgctaatgcttggcaaatcattcattttaatcaagtgcgcatggattccctttccatacttcaaggatcctgaaacagtgcagccaaaaagaagcgcagaaagaacatcagaattagggcatacatctcctctcctcaggtacaaatcctcaaaaagacctgtggcctcctcaacaaatccattcttagcatacattatgatgagagaattcaccactgaaacatcattctcgagccccaagcgaacaacaagcgcatgcaatgaactgaacaatcctgactctcccatcaaagagcacgcctgaataacactcaacattgtaacgttgttgggaaggacgttatcctccagcatcatgacgaacactttgagagcttctgctagcatcccattaagcacgcaccctgaaagcagggcagtccaagaaaccacatccctggaatccattccaagaagcagcttttctgcgctcaccacatccccaaccttggcgtacgtattgaccaacgagccaacaacaaacgggtcacagcaaaacccacttgtcacgaggtggccatgcaccatcctccctagcctcgcgaccttggctagcccacaagcctgaaggagagcggccgccgtgaactcgttggggcggaggccaccgtcctcgtcgtcggcatcctgggtcagcatgtccatgtaggcgcggatggcgtccaggggcgcgccgaggcggcagagagcggagacgagggaggcgcaggtggcggcgtcgcggcggggcatttcgtcgagcaggcggagcgcgtcggagaggaggccgcattggaggtaggcgtgcaggagagagttcgacgcggtgagaggctgggtacggtcgagcgcgccggacttgaggagggcagcgtggagcgcggaggtgagcggcgcatcccgccggtcagctgccccgcggaggaggctgacgggggtgggagcggtggtggcgcggcgaggaggaagaggaggcggaggcgacgacggagtggagagggagagcatcggagcttggagtgagactgagagcgagagcggcccagcaaatggattagaagttgaaccgttctataccttgctaatttctttgcatacgtacctacgtgcaccggctacggagaaagcaaagaaatgcaactttgggtgtaccgtgtacaagatacatcagtgcatctgtgggactccgccgtgctgcgtgtgcatctgaacatttcaatagctgattcacttctatttcttgtcgaaagtagtaggagaatacactgacatgtacttcctccgttttacaatgcaagtcattctagcatttcccacattcatattaatacatcaatatgaatgtggaaaatgctagaataacttacattgtgaaatggaaggagtatatgtcaatatctgtaagccaattaatggaaggcaaactatcttaatcgagagctacatagttgccaacgttcccctgtatgataaatgtttgaacgcttacagtacttctcatgtactcacacattccattaacatcccgaacattgaaacgattccatgacaccgtaaggtaacccatggaagagtaaagacttcggtgtttcaggtggatcaactttccgttagttttcctttttgctgtctgcgtcttcaagagcagagagcctttcaacaaggggtggatgggagtagtggtaggctgaataccacggatctgtgttcattgcagataagttctcttcctgaaatttgaaagcaaattccaaattaggctatgcaaatttgcaagcagtttgtgcaggtgaccaagggcaatacgaacaacgagaaccgacagtacgataagagaacgctaatgcggatgttcagttcaagtgaataatgagcgtgaaagtactttgggtaacagaacaagaatcagacagaccttgcggttcaggtgtctagcaattagagtgagaataaatcaaaaggatctttcgatggttacctgtagtttaacaagggctgcacggagctgaggagcatacccaaggttcttggcaaaagcatcagcctagaaattatatcaaggtaagtgcaactgaaagttataaagcagcagtagcagaaactttgaagggaaatagaaaaatgaacctgaaattcaaatgcccgactgacaaggttcagacaaaaactcagaaggtgctggacaggtattatagtgtgctacaatcaagcaacggacatgtcaatcaagttgtaacttgtaatagagcaatactagaaatccaccaaaaaatgcaagccactgcaaacttaaatgaaaaattacaatacctgtagtactattttcacagtacaagcaggtagttgtgctagggaaagactttgtatatctaaggaagaaaatattcttcacaaatatgagtaaacatacctgaaatatgatcagcccaattattacaggctgatcctcgaaaccaaaactttcaaaaaggtctttggagttccttactagcgtatatcctccaaattgtaggaacataaggagctgcataaaaaggagacgaagtgaaaaaactctcaacacacaaaagaagatttatctgttttttttccttctttgtactaaaaagcagcagtactctccagcaacagatgcaaagggactgtatcacagattcaatttcgaaaaagaaccattaatcctacttacatgctaaacactgtttatttgctctggatattgaatagtaactttttctgctaaccttatgccaaggtttgttttgttaaatagtcatccatctaaggaaatggcatgcttagcataacctagtagccactcatcagtcatcacacatcatatccatcatagaagcaggcatgtcaaacacagtacaaaaaaaggggccaggcgggtccaactggaaaaacccaggaccagatcctagtttggttcggtcagaaaaaaagaaagttatggtaaaaataggggaaatagttttttgagtcaaaccaaacttgggtcccatctcacaagtatgttgggcttctagccaaatggattgagctaaatattattctttggcgatattatgcatatttgaaaaaaagtgtattagttgcgggatcagacttaaaatacgtttgaatataatatttttgacaattcaccaattggaccgggtagaccagtaaaaccaagtaccagcagagtgaccagttaagcaccagtcaggattttcatgctatggtcatgcagtatttactttgaacaaacagggaagtcacttttcttaatagtaaattctttaccagaaacaatattgaaattagctaccctgtcctagtgatcaaatgcttgcatttatgcacttttcttatctgtaaccaaaacaatagttctcattcatgcattacatgatacaatgataaagttggggggaggggcacaaaaatgctgcatgtccttttaggagaaccaacgggacatttcggattacatacacattttttatcccagaagtacacaaatactatatcaacaaaatagatgaacaattgttatgcaaagtttatcatggcatcaaagagaatacctggacagctacaaaggaatacacagtgtggttgagtttccagtgcccaagttcatgtgcaataacagaaactatttcatcctcactactacactgaaaccgacaaaaggatccaggtgagtttcatgcatgtaattcaaaattataatgaaactaaacaacttagcatataacctgctgaatcaacgtgtcatagagaacaatgcgcttgttcttgaaaaacccatacatgtaagcctgaaagaaaattgtcagttcaaagcacacagaaaattacaaactatcagttatcaatgaaccacaaccctgaaggtagagtaatcaacatacattactgtggcttgatctggtagacccatccaccacgaaaagctttttcaatggaaaactgagtgaagctgctaatttctctattttctctctgagtactccttctggaagctgttaaaatatgtgcaaccatatctagttatacctcaaaagagcttttgccatccgtacggcttattaataggtcaacgtagttcaataacatgggacacgaattagaagatgcacaatggatgcatgtacctttctcacacaaaaaacagacaagtgaactaattacagcatactaggtatgctctacaacagaaaaagatactaaccggagtgaatttgttgaacagaggtgctatcacgatggggtatattgtcatcatcacaagagataatgcaaacataaaaccccatagatatattgccaggtagggccctccattctgaagcacagagaaataaactaatcagttcacacacttctacgagtttgtggtattcgggcccagatcccgcaaaaaacaggtaagcctgttctccagatactagccaacaatgaagaagtgtgtggtagaaagacaggagatacctgtactatgatgataatagcagccacaataggaggtccaagtaagatggatagcaaaatccctttgatcatgtccctaatgaagagccaaatagtttgctgaaaaaagtccaaagctagaggttcagaataaatatgttggggattagaacatagcaaattcataagccaagatacttttgtacttcactaatcttgcaggtgaacaccattcaaatgttaaaacatataataactgaggtgctaaaattgagaacacaaacataccttgttaaaaccatgtttagcttcaataacaaatgttgaataaagagagaatggtaagtctgtgatctgcattgcatgaagtatgtatcagtgtttcacatcaaatagtggagttggcatgttttagctgatggcttgcaaaagaagttgattcaccataagagaacactatgccaaagttctagtagatgtagacctaaacaatcaatatcagtatgcaactatgaacataggtgtagattaacatgtaaaagtcactggatgtactcaacagaaaagggcaaaaggatgattactcttatccaaggtaataaatagtgtatagcgggttgttagcggattagtgtctgtgtagcggattgcggatagcgggcgctattgcggacgctaagttccaatagcaaatataagaaaataaccataaatatatcaatattaacatcaaattcatacatttttaattactcctatatttcataacataaaaagtatgaaataacatatagatatataagataaataagataaacaatgtaaagttctacaatccataaatgaagaacaacatttaagcgttataatggtccaacaaagtcaatagcgggctgttatagcggtcgcgaagcgctatatttgagataagactcttatctcaaatatcctgatcttgatacatgcaaatttaagaaaatacaggcaacttttgccactatttttcaagttgaaaaatggtccagtcagagaagaactagagtggctgttcatgtctgtcagggccaaaagcagaatagggaaatgcatgtcaatagtttcataggtgtcactatgctatgcgcttcagtcctgactaataataacttttgatgcagtaactaacgacatagacaatccagcaaccaccatttgtgttaaactaaagctagcgattgtcaatcatggaaagctaaggcttcagtttatacgtaactcaatgtgctggaagacaactggaagctaatttaattttgaatgcaatgaaggtaaaaatatatgtgcaataaacatataagatgcttggcaggtacaagtaattattctatacctgtgaccaaatcatgacacctgctaagaatgcaagagtgtgtagtatctcattttcagcatttaggccagcattggttgctagctctccagatttctacaaaagaaggctaatcacaacaaaatacttgcataaagagtttacagaggcaagctgattgattttgttttaccttccaaacccagggaagaactctatagtacagaattgtggtatccattaatatagttacagcttcatggataaaatggaatttgctgtaacatgagcataaatgtcaacacacaaaatccaaaaaattggcagtctgaattactttagaacgattgcagtaaaatgaataatgtaaggttgcaaaaggtgagagcagtattacacataccttttatcaaggctataagctctggagcgctcaaacttttcaccactaattactcctaccaggggttttggcagtgttggcaacttaagggctctatgctgacggatgtcaagatatgtctcaaatatatacatgagaatcataaagcctgcaaaacgaatacaaatttttaaaaaattatttcatcatatacaatatccagtgttgaatgtaaatatataccatgacctgacttcactcgagaggcatgagtcttagctaacatatgcaagtcacagatcctattacaagtaacttcttttcagaatagatattgccatcttaaactcataaatcaccacaaactctacaaatattgcatcctactgcatgatagagagtgttgcaacacaacaaaaatacagaaattcaaccctcatgatcaattaagccaagatgacttcgcagctctatcgcacatctccactctaactacactcaatcacagacggtcttcactgtatttattaagaacaaaagcgtctgtgccatacattttcacttcaccggttcctataatcacatcattgaatgatgggcactcagcaaatcatcaacacaaaagcaaaccagtatactaggaacagctaatcacgaacaacataaaacatggcatcgataccgacattcagcaacttcattgcatcagcgccaaggcccttctcccccagcgccaacgccatcgccaatcgcattaagctccctcgactcaacttagattaatccaccctacccgctaccaccaagccgccacgcccaatcgccaccacagcacgagcaaatcgagccggagattaaaaacccaagcgcccacccaaaaaccctagggtttacgcacggatcccccgttccaaccgaaacccgacgccatccccacacagatcagcgatcaaggcgagcgtaccaccgcaccaaacgagagatgggggaggcgaggaaatcttacacagcacggcctccaggtaaggaagcgccattggagcaggatgggtggcggaggaggcgctccgggaatcgctaggcggcgggagacgggggagaggaggactgggggaggcacgggccgggccggggacagaaggaccagaagagggggagggagggaataacagaggggctgctgagcgtgatgatgcggaaagggtcgggagtggggatactttgctcgattccgttgctcggacctccgagagccggactggggaggaaggtataggaaaaa

SEQ ID NO: 25686 - DNA, 4061 bp, Oryza sativa
  unsure (1)..(4061): unsure at all n locations
ctgcagccccgtggcgagccgccgcctatgcaaggaagccgtcgaggttggagggcggtgcaaaggacagcggagacagggtgcggaggacggcgacagcgaatgtggtgagggacggcggcgcgaagatggaggagacgaggaagaggaagaagtggtgcgcgtcctcctcctcctcctcctcctagaacctatcaccatcgtcatcgccgtccgccatcaccccgttccgcgccgccgacttcgcacgttgctgctccgcccaccattgccccacttcgcctgcctgctctgcctgacgccgccccgctggctttgcgcgtcatcgtcccactcctcctcctcgaacttgtcgctatcgccatcctcatccgccatcaccccgctccgcgccgctggcttcgcgcgttgtcgctccgccaccatcgccccactttgcctgcctactctgtccgctgccgccccgctgacttcgcatgtcatcgtcccactcctcctgcctgctccgctcgcggccacccaacttcgccccacctgtcttctctgcacatacaaaactatattaaggacaaatctcctaacctcacaccaatcccaaaatgcaaaaacaaaacccctaatttatagtgtattaatgcttattaatgcgataggagctataggttttaaaaacacctcgtaaaactgtctatttgacattagggcagccacaataagccaataaaaaggattataaggctgaaaagatttctttggttggctatatatatattatggcaatagaccataaataataaatataaaaagtaaccataagcttatggcccaaacacaagcaataaaataatacagtatacacacactgaaaaatagaaccaaacaagaggagagaagcagtcagtgcttgatacaaattatttttttacgttgcaccagctataaacattgtgaaatgttctagaccattttttcaagcaagtgaatcctagcttaagagcgtgttaatcttatacaaattaagaatgctcttaacttttttttttcaaaattttgactatcagctttctattagatccaaatggtactttctccgtttcacaatgtaagtcattctagcatttcctacattcatattgatgttaatgaatctagctagatatatatgtctagattcattaacattaatacgaatgtgggaaatgctaaaatgacttacattgtgaaacggatggagtactatctaacaaaattattatatcgttaaaataattataatgaaaaaaacactcatataattcttatgccttaaaaggagctattgatggttaaagtttaaaaattttgaatgaataaagtctaacagtgtcatgtttaaatacaaagagaatatttgtttggacttagactaagttataagtcaattgataagtccaagaaagacggatttaacgtggggcttaaaaatccaaatacatatttattatctaaaaaagaccaaacaaacttcttgtagatatttgtaggttgaaacatgggctattccttttcttttgtttaagaccttgttatcttctagttggctttctccaaaattccaggcaatgagaattaccttccattctcaaaaacaaaaacgtgggctattggaccgcacctggagttcaatgggcaagggctcaatgggctgcgagttcatctagcccacgtcgaacaagttcggcactaataggcctatacgtcgaaaccaaagnnttttcccggggcaataagttcactttgggtccctctattgccccatctgattttcttccctgaccacaaaaccactacgacccgtcccccaacttacaaaaaccggacaaacagtctctcacagtttggctgaatggcacctacgggcttgttaactaagtctctgtccacgtggcattacggtgtgcttacgtggcaattcaacccgaaaaataaataaaacttgtgagacccacatgtcagtgtcacccaagaattataaaaaaagtggggcccacgtgggccccacatatcagtttcacgcagtctttagggcacatctggtgggccccacgttggccttcatggacaggcacctcctagttgttaaggacatcgccgcggtgttcttcccggccaccgagcgcgtcctcggcagggccgacgacctcgtcctcctcgtcgagtccttgcccgccaagctcacggcgcgatcgacggcctcgagctctttcgtcgccggcgccgtggggcacccgctggggcacggggcacggcggtggtggcggccgagcacgggggagctccccatcccatccactgtctttcgcttcgcctagctcgccctccgctgctctgcccgcggccgcgctcgcccgccgcccctccgccgccgcgctcgccctccgctgctttgcccactgttgcgcttgcccgccgccgctcctctgccgcgctcgcatattgtgtgttagtggctggttgcaggaagcaggtaaattagctagctaacaacgctaatgtgctaagcaagctaatgaattaaatatgactcatgcatgagtcatgcacgaaatggcatatacacacacacacacatacatgtgagtgtgctcagccatatacacatgcttggctaatatatacgtctgcatgttgttggcggcaaaccaacaagaagctagctagaggctatagctggtcgtctccatgcatgcatatatatgctcgcacgaagacgcatatgcatgcggccgtctgtacccggcgttatagatggccatctgggccgcccggcacggcacggcccaagcccggccgtgcctgggccgaggcttgtcgggccggcacggcccgaccgatgcaccgggccgtgccgtgccagcccacgggcggcatacacggcccaggcacggtccaatactagtcgggccgtgccgggccggcccgaaggcacgatgggctattgtgctgcctcacagaaagagtctatttttgatccctcaactctgtgggctgtgtttaaatggctggaaataagtctatttttgatccctcaactctgtgggttgtgtttaaatggctggaaataagtctatttttggtccctcaactctgtgggttgtgtttaaatggctggaaaataagtctattttgtatacctattttcttgggccatgccttatacgattatataagtctattttttgtccctatattttttttatttgatcgggccgtgccgggccggccccccgtgcccagggtgcagcccaggcacggcccggctgtcgggccgggccggcacgggcacgaccctagtcgggccgggccgtgcttgggccgggccaaaattgcgggcttcgtgccgggccgtgggcctcgggccatatggccatctatacccggcgtatatgcgtatgagctactcctatgggctcggaaggaactcgagaacttggaggtcgtcacgggcgggaacgacggcggcggtggcggtggcggtggcaacaacgtgcatggcgacaaggctcccgttgacggcaaaggagaggcagcgactccggcgaaacgcgccgacgtatcaggtggccaagaatgcggcgtggtccgcgtggaggatgtacagcgggtggagacgccagctggagagatcacgaatgccatgaaggacacggagatcatgaagaataaggaccaggagagaggaggcagcgagagggaagaagaggagaccgttgccatggccggcacggggagcagggaggaagcattgctggttatcttcgatacagcatggcaacaggggaacctccttatctggcgggagcggcgggacggcgggtgcgcttgcactaactcgtggccatggcgggtcagggaggcaggcgacgccgctggtcgctgggctgtggcggcggatggagtcacgtcgtcggtaaccgtcggcgggcgcgggcggcgaagggcggtggaagaaaaggggatagaatgacatgtggggcccacgtgggccctaccttttttataatttctatgtgaaactgaca

SEQ ID NO: 25687 - DNA, 25241 bp, Oryza sativa
agaaggttatttttgggacctaatggccatgcacagtactgctgcttggagatggtatgtggaaatggtttttgaacggtcatggcccctcgttatatttgtgtcggtacaagagaaagatacaaatgtttcaatgcaaacggaagatgtggagggtcctagcaatgcaggggatgttgttggaccatcgatgcaaaatgaggaaaatcaaccaagggaggagcaggccatgggcatggcggatgagggggagagagtcggtataattgttgatgaaatggagagggaagattcggataatgagcaagcggaggatgacgcatcatccgatgaggaaggtgatgtaatggccactgattgggcaaatgaggacttctctggtcttgttatatcatagggtgatcatgtaccctgggagtataaggagtacgaggtaattgagggtgcaaggtatgctcataaggatgagatgaaggaggcggtgaagcattgggcagtttcattgcagagagagtttagggtggtcaagtcaacaaattatgtgtatgaagtgaggtgcatgaaggaagattgtccgtggcgtgtccatgcatataagggtaaatggaatgattattggaaagttagcattgtgaccgagcacaagtgctacttacaaggggtggagaagtatcaccgaaacatcacttcagcttttgtggcaagtgagatgtacagcagtggtgttggtaacattggctttgaaccaaaatcaattattaggcacatcgagaacaaattcaagtacaccataagctatgcaaaggcctggagagccaaacaaaagatcattgagatgaggtatggcacatttgaagcttcttatgataatttgcctcgtttgttagccaccattgcccagaggaataataatacttactatgacctacatacatttacatcggttgaagatagaacaaagagtgtgctgcaaagagcctttttctcattgggtgcttgcatcaatgcttttgtgcattgtcgacctgttctatgcatagatggaacttttatgacaggtaaataccgaggtcagatattgacagcaattgggtgtgatgggaacaaccaggttctacctatggcttttgcatttgtagagagtgagaacactgaaagctggtactggttcctagagagagtgcacattgcagtggtgcgtatgaggcccaacgtttgccttatacatgatcgtcatgcgggtatgttgcgggctattgactacttgcagaacggttgggatgagaagggacttccagctaagtggcctgatgttcggagtcggtggtgcatgcgtcacatgggtgcaaatttctacaagcaattcaagaacaagcatcttatggagctctttaagaggctctgtgcacagaaccaagagaagaaatttaatgagttgtgggacaagttggatgagttgacaacgaagcaaacagatgagcaatctcgcagaccacaagttgaaggtgacgagcctcccatacctcttggtgcattacatgatgacccaccaacaatgagaaggaggtcagggtcggccatcagaaatttctctcagtggattgagaatgagcctaaggagaagtgggctctattgttcgacaccgatggatctcggtatggcattttgaccaccaatttggcagaggtgtacaactgggtaatgcgaggagtccgggtacttacattggctgctattggtgaattcatccttcacggcacgcaagcctactttagggatcgatacaagaaaattggtccgtccatggccgataacaacatagtgtttggcaacgtagtgacaaagtacatggaagataaaatcaaaaaggcacggagacatagagttgttgctcaaggcacacaagtgcatcggtatgaaataatgtgtgttgataggagcaggcgtggtatctatcgcaagcaagccgtgcaggaatgtgtattgaaggcggatggtggatgtacctgcagttgtatgaagccgaagcttcatcaccttccttgctcacacgttcttgctgctgccggtgattgtggcatatctcccaatgtgtacgtctcaaattatttcaggaaagaagcaatctttcatacatggagtgaggagatatatgggttcgggatctcaggatcttacacaacgctgagtgcccaagttttttatattccagatccatctaagtttagggtgaaaaagggtcgacgccaaactagacgcatcagaaatgatatggatgagtcagaagcaggtgggaggactttacgctgcagcaagtgtgatctgcgcggccatacttacaagacatgcccgaagaatgcagaagttccaagcggcgcagatgctagtccatctggacaggcaagtgatggtaggcgaccacctggtgaaggaacaacaagcaggcgcgcaaggccaaggcgtcgtcgcgcagcaggcgattccatggtgtaacaatgctttcgatttaggaaataaaatgatgtaatgagtgttcggactaaatacttctatcgtgtaatttcaattcaatcttgttgtaatgagtacctccgactattgttgtactagtagtattgcgaactattcggtgttgtatcataatgttatcgtgatgagtgttcggactaaacacttttgtttgtttgtactcttgtttaatatgtgttagtaattcgcttatgaacatttattacttatgttgaactaattatttatatgtttctgatcaacctatttgatgcaggtatggcgtacgacacaccggcgctgttgaaccgtgggattgacaggaaccaccgctcgttcctgtcagcagtcgagggtgcacagctcggcaccttccgtccacgcacgtcgcgcgagtggttgcgtgtcgacccccgtcacgttccttggtacgcgtatgttcacatttcaactcaacttttctttgttttatacttatgtttgaagtttgctctatacaggttgcgtgcggcaggccttctaccactttgtaggcttgttgaggcggcgggggacgaccgtgacccagcgaagcggtgggatgcagaccggtcactccttgccgctcttgtagaccgctggagacctgagacgcacacgttccaccttccctgtggggagatggctccgacactgcaggacgtgtcgtacctgctcgggctaccgctggcgggagcaccagttggtcccgtcgacggtgtttttgggtggaaggaggatatcactgcgcgcttcgagcaggtgatgcgccttccacacctaggaccgaccaccacccttcctccgtactctacagtcgggcctagcaaggcttggttgctccagttcactgtaagtacataagttgttattatcatacgtgcttatttgcgaccggatcagtgttttgtactaacatttcattcttaactgtaggcggaccttctgcaccctgacgctgatgattactcggtccgacgctcccttgaggcgtacctgttgtggttgttcgggtgggtgatgttcactagcacccacgggcacgctgtggacttccggctggtccactacgcacggtccatcgcggatgctcagccacaggacgtgccgcagtggagctggggttctgccgtgctagcagccacgtaccgtgccctctgtgaggcgtgcacgaagactgacgcgggagcgatcatcgctggctgtcctatgttgcttcagctttgggcagccgagaggtttgccatagggcgaccagtggtggacagcgcaccctacggggttggtcgcagcgcgcagtggccagaggacggtcccacgatggggacttactggtgtcgatgtggggttagtgcaacttcgctgcgttataagtttatcagtcctcttctttttttttccttcacataacatgtctaattccgatcatgtttattgcagcgtcgttacgctcacgtccaggtgagacgtggttacccggacttcgtgttcgagtttgaccgtctccagccgagcgacgtcatctgggagccgtacacagaagaggccgtcgctgcgagagcaccgctaggactttcgtccttgtgcacacgcgaccaggcttactggctcaccatcctgccgatggtgttcgacattttcgttgagcctcactggccgcagcgtgtgatgagacagttcggacttaggcaggtgtttcccggcaacgtgcagccgaccgtcccccctgccgaccactcgtgagttcggattgttcatttctaaatttttatgataattacatcatcgagccatacaatttacctctcttcacaggttgactcgacggggacagctagcaggcgcactttgggctccacgtgtacagcagtacgttgacgactgggtgttagctacagaggaggtgatcaacgagctcttcccacacacggaggagaactaccgtgactaccttcgctggtaccttcctcgcactcgtgcgcgtgtgaccttcactccagacgccccagagccgcacgttgccgctgtcacggacgcgtatcccacgcaccgtgaccgagactacttcgtggcggtacgtccaatttgtattacttccaacaattatgtcatttatcttgcataatataggacaactactgaattttttatttccatcttgcataggctgatgcggcacgggatatcagtgccgatatcaccgcagtccaggtgaggttgaacagaggtttgcacttgactgacgttgagcagaggtcgaccttcgaccggatgcaggagaagatgcgtgcggtcatgcgcgtcttctcctgtcgcagcgccgtggacgtcgtacctccagctggtccggtacacccacggcctcgcggtcctaccgtcggagcaggacctcgtttgtcttcgagcgcccctagcttcggagcagtgcgacctacagcaccggtttcgcacggtacagttcagcccagatattagttcatttttgtttcagcttttgcacgaatgtgtcaccatgttttaactgcacgtttcctcatcgcaggacctcgtatgccttcgagcgcgttcgcaggcacgaccggcgcttccgcgagctccgcaggggcgttcgccacctcttcaggcgcgttcgccagctcttcctctcacggagcgtcgatccctcgcccacacggtactttactttttattaatactgttaaatacctatacgaaactgatgatccttgtccagcaggatttgcagccgggatcttcggtactggggcctcttcgtctcacgccggtaggactggtcctactagccagttctacgacgacgacttgcacggtgcagaccaccaggacgtactaggctcctctcagcttggaggagctccagaggcgcacactcaggagcagccagaggtcacacctgtacaggcaggacgggttggccgtgccgtacccccggaccgactcacgtactcccaggggcacattagggcgcagggtaggagggacaggggtaagaggcctcgtcagtagtgttctacctcttcagtccttatgtgaccgtttcttttggcttacaaacttgtaaagcagtactacttttgctattactactgcagtactacttgtgtttgtctcgtctacgtagttcttttcattcgtatggtgcttgaacaacttatgctcacaacaacacactttcggcgcttcacggtagtgccatatccagtagcgcgcacagtccacaacagcacacatgaaaagcggcagctcgagttatcactatcaactttcggcgctgcctgttgacataaagtgaatcacgcccacgcgtgatcgtcttgtcacatctaatgaataatgtatctcattgagttcacatatattgcagtgaaaacgacgctatataattgacaatctgaaggcaacctcttcatatcttctttcccactaccacaccacacacgaaaatggaagcctattaattggtaatacgtaatctagaattgagattatgtacaacattcttcactacaattttacattttggcagcaaaccaaatatgatcaaatgcaattttaccttaccaaatatttggtagtgccaaaacttgcttatattttggcattaacaaaatatttgtacggtaacattccaaatatgccctaaaaaataataaaattgtattttaccaatcttggagattttaatcttctatagttttcaatataaaaagatttgataactattgatatttatataaaaaaaatatagagcacagtacaaaatcgccctcccccagggcggcaagggggccgcctgcaaaattccatgcccccttgccgcccatttgcaggcgggcccccgcacagtgcaaaatcgcccttgcggagggcggcaagggggccgcctgcaaatttcgttgacggccgtcgcccgagagcgaacggccgtctgccacgtcattttcgccgcccttgggagggcgatttttaaaaatcgccctcccagagggcggtaggcgactatttccgtcaattttcaaaatggaaaattatttttgtaaaacttttaataaaaaaaattataaataaaaaaaattctgcttccgccaggagcgagcaacagcaaccgagtcgccgacattgagctggtatgatctacaaaatcattttgattcctctaaacaaatactccctccatttttaaatatttgacaccgttgactttttagcatatatttaaccgttcgtcttattcaatatttttttaaaatatgtaaaactgtatgtatatatagaagtatatttaacgatgaatcaaatgataggaaaataattaataattacttaaattttttgaataagacaaacggttacatattttaaaaagtcaactgcgtcaaatatttagaaatagatggagtatgtatttccacggagtagttgatgaggtatacattttcttctctgatgaattattggcttgatttatgctattcatgatggttttccctctcccggtccccggcacaaaatctaacgatggaaagaaattaagaaatcaaagctaatatgctataccttgtgacaattcaccctccttcaaaaacaaaattggaaattcagatgtcttagtcctgctcttttcttcaacaagagttggacgaaaattaagatttttgtgacacgcttttcaaacttctaaacggtgcgtttcatacggaaactttctatatgaaagttgctctaagatatcatattaatttaattttcaagtttgtagtaattaaaactcaatcaatcatatgttaataccagctcgttttgcgtaaaaaaacttaatcttcatctttgagaaaataacatcacctaagtcgatactatcaaatatcaatatattagctgagaattcaatgtattacattacatgttacatgaaggaaagtccaaagccatttcctattgaacaacacgcagtgcaactgactgtattccaattgtaagatacaaacagaggaatctccacccttacccatttcccacggtattcatacgatccagaagacatacaaaagttgaactatatggcaccttgccttgttctatgtaatcaatatgacgggacggggtatgacttcctatgagaaacctatctgcttcaaaaacaatgcacacacagggaaagagtcatcatgcatgcttattgattgtcaccagggagagaaatgtcaatttatatggaataaataacaacaacattgtgtgcagaccgttccatttgtcaagccttggacgtcttctgatttggcttgaaaacataccttaccagagaatccttgattgacaaaagttctggaaattccgccttcagcttggtacaatcaagctcattattgcttctcggtgcaactatgaccttggcttgctcctccagggtaaagttcttccaagaaaaattcggatcaatgtaatccctatacatttccaatatttcattgtggctcaccacgccaggattagtgaaattccagatcccagtgaggtttctctttgccatttcgattgagataggaagaagctcatccaatattgtcattgaatttggtatatcaaccactttatcataccgggcgattttagtgatgaagttgcgaggattggatagatcggatgaaataggcatccttacacgaagtgtacatacattctcgtagttttttagcagttcctcaacctgttaaaaacaatgctaagattaactgtgaaatacaagtcaggaaaaataatctgatttaaaaatagaaactatcatgaacatacaggacaacaagatagcatggtaacacaacaaactactctaaccaaattcagacaagtgattctgctagtgagaggatctctctctgtgagactagacaccattttgttcgataaataaacaactgtttgcaaagattcaagatcatggcatataggggattcaaaataactcaaaaaacatacttgtgaaagtaaacgcatatttggtgcttctcatctaactcaaccacctataggttgaaacttcgaaacaaattgtggaaaacaaataatgtggctatgaacaataaacttgacacttaattggaactcgcaaagtattcttttctctagtattacaaaatttcatccaattgcgctacatattcagcatattcatttcatatcggtatgttttcaacctacagaagttaatgatttattttttttctacccagaacatccagcagaaaacctaccaagtgtcagaacacaatagttttggtcacactatacttacaatgcatgtcaggagtttatttctttaaaactaatgcatgcactccaagaaacaatgatctgataatgccagcaaggaaacaatcctaaaacaagatgaaatgcctctgtaaccttggcagcaatcacatacatgaagggtaaaacatatacaattctagtaaagtatatggtagcacattttaagtcgttaattagctaaacctatagaaactccagattcaaatagcacaactttctgtcaaagtaaaggctaagcctatagctagcataaagttaacactcccagaacttcaagatgttgacaggatttctagtgtcaatcttagctatttgattcaaggaaacttgctaccctttatttattaaaattggccaagatcatggagaatgttacacaaaatcaaagcatgatactatgaaaagtttaaaacttagaactagtgtgcaaatgtgcatggaccaataacagatcagaatgctcgacagaccaaaatgaatactgtgttttgattccagaaggcagaaggaaacatgttcctgcaagctttactcaatagtctgccatcattacaactaggagtaagtcaacccaagctgtcaacattgtcaaccataaggatctgcatcagcacgctgaccaagatattggggatattgtacagaccgccatgcaaagtcatgggcatgcagttccatcctatccactatccgttctcatctgacggtgcacactcgttgccccaattcctttcttctccttgctcgcttcactcggtagtttcttggcccgccgcggctgccatcatcggctcaaaaactccttccatcttgtaatcggcgatacaaaacacagaaatggactaaccgttggcaaatcttccggcctcgcacctcatcccggtatctaccttcttggcatccgaatccagaggtgcagccgtgtgcacagagatgattcatctcgacgaagagatggccggaacatttgattatggttgagtaccagtgagagtccattagttggaagaaaatgctcgtattgcagaaggtgatgttcacattcagtgctttgggtagaggtcatgcaaagggagaagcttttaccggatctagcaaccacctatcaccattttaattgttacaacgacaatctgactaaaatagcctacagctttccagcagctgaaattgcgatctggttaggagtgacggacatggcgaccggccttgaaggtgcagactctgaaggggtgagaatggatggtggattgagcagaagaaaggaattgagaaaacaagtggtgtgcaccgtctgatgagaatggatggtggattgagcagaactgcacgcctgtgactttgctaatcacagtcaggggatccgcttcctgtacagaccacgccagatctaatcaaacgagaactaatcaatactagtactggcatgaaactaactaatcatacgtccctcaaggcctcaaccaaagtgtcacctttcactccatgatcacacaaaaccatagttccaactttccaacgtgcaattacacatcgtcatcgtaaactaagcaaaatggagccggccggttagcttgctcagatgtgcacatagtccattcattgtggataagaaaatatatggccgtatatatccggttggatgtgtggccaggtaaaagaaacccttctcttaaaaaaaagaaagaaaagataggtgtcataccatggccttggttttggagtagaatgatccgacgaagttgggcgtgtcctcctccttgaacccgatccctgtgccgagctggtggccggcgtcgtactcgaagatgcagcccgtggcgtagttgatgagcacgaggccgcgggcgcggcagacgtcggcgagcgtaagcgtgccgcagacgttggcgcggatggtctcggtgcggtgggtctcgcaccagtcgacgttggggcggccggtgacccccgcggcattgaacacgtgggtgggcgcgacctcgtcgatgtcggtctcgagctgggcgcggttctcgaggcgcccggcgccgtaggcgaaggggatgccccgcgcggcgcagagctggccgagcaggcccccgatccacccggtccggccgtagatgaggaacttgtacgcctgcgactgcgcggtctccgccgactccgaggtggaggaggaggagccgttggtggcgacgcccatgcccgacgacgcggcgcggaaaagggtggcgcggcgcggcgcggcgagatccggatgggaggtgggaggccaggaggggagagtggaaaatggagcctgtctgggagggaggagaggtgaggtggagaagggggatggattttaatagctaccgaggtgagctgatgctgtcaccgatgtgcgcgcgggtggcggggcggcgtgtgctgcaccgacggtgacgctgcagcggtgtggtgcggccctgcagcacctggcgtgatccaccatgatccatcgccgattcgtctgtgcatccgcgtcgcgattttgcgagagaaatgccatccaccgacaggcgcaagcgcaagacataccactacgtactgacatactgtgcgcgcgagctactagactgcacgtctgtaccagtatagaaaagtctggctcccacagcgtggagtcgtgaacggtgcgtttttattttagagggcggaatttgcgaggggtggtagccggcgggatgatcgggggaagcgagcatgcagcaggggccatgtgatttggtggttggggaggagcgttgagacgaggcctccacgcctctggcgacgcgcacgcgctgctgctagcgcgctagcgacaaccgggcgcggtagatccaccgatcccaccacacataccgcgagtccgcgacaagtaataagttgcatcgcggtctcctgatctatccgatctcttccctttggttctcaaggaaaacgaacccttgtaaattcttacttttcgtaccaccttgtgtaatttttttttagataacgaccaccttgtgtaattctttttttagataatgaccaccttgtgtaatttcgtggccacttcattgttctttgaatatcacggtcactcgctactgctatctttctcagcaacttgctggtattagctttaggattttgctaatggaggtgatttcttttttaataatggattaagaatccggtctctacacaatgtacacaaccaaaaaacgaaactgaataaccgatgctctgttcgtcttttctttttaaggtaaagagagaactttattaatgtgtgaataagggattacattcttggttcattaagtctaggattcttgtgggagtacacagccttcactccgcatgcacaagatcattaccatttgggctaaaacatgtgctaccatatttgcttctctctttatcttatgcacttgcacttgttgaaaacactgcattattcctttaatctcttcaatcgtcatcgccaagccgatttcaaggaacctgctgttttaagtctttggctatttctacattatccatctccatcacaattggaatgtggatcagttcaaccgtcgctcgaagtcattcagcctgggcagcagagccatagtgatgcaaggctttgtggtcggcaagtagcaccaagcccctccagtccttgaagataaacccgacacttgcatccccagtttctttccctatagccagcatcaacattcagttttcattctggtggagcacaccatttctctacctgtctgtcaatacttgtagagagaatttctggtttggttctatacacaaagggcccttccctttgtggtcatcttccctttgtcagattggcaatagttgacttcatagcttactaggaagctaaccgagtcaactattgatgcatttcctttaccatggatcacaacatttcgcaggtgctaggctcttcaaagtaaatacagaacatgtgccttcaccaatctgttcaaactatccagcatcactagcaaccaatcaggccctgtccatttgaaactcctttcttccggcaatacccagtgtgctctcattgtctcctgtaaacctctagccacagtacactccaccgtagcatggacaccatttgcttctgtcagaccatagatcgggcaaatgccactctgttatatcttttgttttctcttgtttccccaagtgagcagtctgtcttgggctagcttccaggcgaaaattcacacttttcgttggacatttgtttgtcatatattcttctagatcttcgtctctccatctgttgccgagctagatgaatattcaatgcatatctttccggctagattctacgctaacttgtaagcactcctgacagtgaatattcctatcttctcaaggtgccatgctgggaaatcaggcatctccctttcgggtattttgatcttttaggatttcagatgcatcattttccttgactacatgtctaattcaaggttcattccatgttttggtgtcaggattcatgagcttgtgtacatatataagacgattccaggtcttcttctgcaagatctttggtttttccccatgtgcaatccattggctcctccagattttggtttggcgcccatctcctactctccatatcaaacccttgttcagcaattctagcccatattcaataccttttcaggttggcgatgcatcagaagagtaagtaccgtaagttgtatcagttaatgatccatttggataatatttctccttcagtacccgagcacacaagttttctggagtatcgatcaatctccatgtctgctaagtaagtagggcttgattaaaacatctaatatctcgaaaacctagtcctccgaataacttgggactcgttaacttttcctagccaatccaatgctctgttcgtctgtttgaagtactggaagttgcacttcggggatccgatgataataggaagcaagcagataaaaagatcaactcaaaatttttgccgggtcggcgaaagaatgccgaccaaatttcattaagattgggagtaaaatacatgtatcccgacattaaattgtcgagtcaaggcaaaagccttgaaacaaagtgagaaaaagaaaaggggagaactatttacagaagcagcaactcaaaggtctactcctcactaaactgaaaaataccggcagctctccagaccatcacatcttctttaatgtctgcaacgagcgactccacagctttctccttttgatcgaaggctcgagcattctgttctttccaaatccgctagcaaaccaacatgaagaaggagtcaaaagcatctctgtagctgggctgacaacagctgcgcgcacgctgccaccaaaccgccagttcttctccactttggccaggcagatcaaagccaatacccagccaagttctcaaaagtgaccaaaccctgttggtgtaggtgcaactggtgaaaaggtgtttgcaatcttcaggtgccgacaagcaaagaagaccgtccggaatattccggcccccccttttggctaaattaatccgcagccaaccttttgcctttggttgccacccaaagaaaaaatctgactctcgccggcgctttggtcttccaaattgcttccccaaaagggcacttagttgaggtaagaaagaagagatcataggctgaggacacagagaaaactccattagcagcaaacctccaaaccaccgaatctctcacaccctcctggacagccactgattgaagttcatcccaaagagaaaggtattcagccagagctctgctggaaagagaaccctgaaggtccctgaagatcaactcaaaattaaaaccaaaaagaaagaaaagcaagacggtacctgcaccggcattaataaagacagcgaaaccgtgtacaaagatgacagactacctacacatcttataaaggcttaaaaacaaaccttacatgcaaagagtaactgatttcagagtgattggaggcttcaatctgacaatatgtagagcatgttcagacattatgacgctaccattaccacacaaaatacgtaacgagtacagcacatgaatacagaatacttgcttgtacagtacatcggcgttggcttgattgaacccgttacaataaaaaaaaaagaagggaagtatcaaatagtttgagtgaaaattgtcagttcaaatcaaggttctcacacgtcagtacaaactgacggttcgttgtttgaccgtttaagatcgaccccaatcaccctgatcgccagtgtccagtgaccgttaattttgcagataagtactcgcttagtgtggcatatcaagcactcagtttatgcataatggcaaactaggttataattaaggtttggaatgcactcgttactccaggacatggaaccatgaaagtatcacggcatatcataattctagaacaaaaaagtttctggcgtcagtaaatttagtgacaaacaccacatcattctttataggtagcatagcattcacaatcgtgcaaattagttaataatgtaatttcaacgattacaattagcatttccgatctataggatgatcactaaagataatccagagagaaattagcaaatgcagcgcgctcgtgtatcatgcagagaagcagactatggttctattcctgatccttcagctatcatcctctccttttggatcttgactcccatgtacctgtcagatttttgcagacacgaaggatacatcaggttgaccactgaactatgcaaagaacattcctggcacgaaatcaaccaatgaacagttgaacacagagagataggagtatacctgccaagcatcatgacggtggcctgcgggttagtccccggcgaggcgttgaacgtggaaccatcgatgacgcgcagcgcctcgatgccgagcacacggtagtcgcggtcgacgaccctgccgacctggcagccgccgtggtagtgccagatggtcatgacggtgtcccggcagaactgctccagcgccctggggtcgctgccgccgcgcatgcgcatcaggttcgccgggaactcggccgtgacgttgatcgtcgccgggaaggcgaagttcgggtacgcgaaccgcgagaaggccctggaccggatgacccgctcgatggtcgcgatgcccgcggcgcagcggcggaggtcgtcggggtggctgaagtagttgaagctgacggtggggttgtcgtcggggtccaggttgcggagcgcgaggcggccggtggactgcgggccgagcaccttctccaggatgaagccgccgcggagcgccgcgtcggggacctggctcatggcctccacggcgcgcgcgatggcctcgggcgtgcgctgcttcggtggcaccgtcgcgagctggcccgtctgcggcgagaacatgccgaagctccgcacctgcgcggcggcggcgcccgaggtgcggctgttccagtcggacccgcttgcgccctcgatgtagctgccgaacctggtgatgccgaccacctggatgagcgacagctccaccggcgacggcgacggcacgtagatggcgttcatggggttgtcggacatgccctgcccgacgcctgggtggtcgaggacgaggctgatgccaaactcctcgaggtggtcggcggggccgacgccgctgagcatcagcagctgcgggctgcccagcgcccccgctgacaggatgatctcgtttctagcgccatggttgaggtacgccatgtgcgatccaccccgctcgtcgtggtacagcacgccacgcgccacgggcttggtccctgcaaatctcgcgcgttttcagtgcgcgcgaactactatggcagtacagcgcagcggcaccaagtgcgtgccagtgccacaacaattacttgccgtctgataattaacaaacttaccggtaagttggtaacacgagcttttgaacaagaaaaatgtggtttttctaaattatgcgtgacatggcctcacctttgcgagagaacacgatcctggccactctagcacggagaaacacgtcgatgccgtcggggcgcgagtaaccagcaagtccgccgccgtgtgccgccgtccctgcgcgtcaaagatggagccaccgaccttggtaccgaggatgtggtcgtacgtgaagccgttgtccggcacgacgccgatctcgagcaaccccctccgcagcgccgcctgccacgggcccagctccggctggaacgccaccacgtcctccacccactggtacgcgctcaccacctccttggggtcccacccgagggccctcacgtagccgggccccgcgcgcgtgaagaagccggcgttgatgcagctgccgccgcccagcacccgcggccgcgcgttgatcacgccgtcctccgacacgaaccgctgcgacggggacgccccggacgtgtccgcgagcacgtccgcgaagtgcgccatgttgaggacgcgcgcgtcgtcgtacggcgagcccccgcgctcgagcaggagcacgcggtaccgctccgacagcgtcgccgccagcgggcaccccgccgtgcccccgcctatgatgatgtagtcgtagtacgccatcaccggcgcctccaccgcctccctcatgaacgtgtagttcacacctcgcactgtcacacacacacacaccatgattacaagaatcagtaaaaatcagacggaccaagaaatcaaaaaacaagactgatcaccttgttgagagaagcacagcagtagctgcccaaacagaaacagggtcgtggcaacgaggaatgccatcgtctgcgtctgtgctgacgagatcaggaatgtgcgtcgtgtttgatgtgtttggcgtacaggatcaggtgtgcttatatactggcgagagatgaatggtttgctaaagaaaccgttgttgcatgggccgttagtctggtttggtacggtttggtgcaagtggaaccggcctccggccttcatgctccgcagcctttgtgtcagctcaagtgttcgacagattcggatatgttaatcacctctgctccgtgcttgtctgcttattttgtaggcgaatgagaggagatgtgggaaacgtaagattgaaatacgccatcctcggtttatggcgtaattatccagagcgtatctgttgtcagaatgcatttctgaagatgatatgtcgtagcatcataaaacaacaaactacaggcacatgtcagattaaaaactgttctttctcgattacacacacatacaccacaaaccacaagcgcacactacgtgcaacatataccgttttagtcagatatatatgaacacaggtgtttgttggagtattatcatagaacagtataatgtctgaattctgatcactggcgaccatgtagacaattttcagcaccagatgcatgctctaataattcgctccgcagaagtatttctctactatagtctatgcacacttgactgagtcgtcctatgttgagcatgccatgagtgtgacgaaagaaaggactcagaattaagaaaccaaaacggcaaaaaccaccggtgatcacctcacttcactctgatccgcaccaattaacctttgcttggccgctgagcctacattttttttatgctcttgccgttgccctggaactcgctggtccggtgcaagcaggattgtccaagaggcttttggagcatttgatcagtagagtttattgaacatgctcttacatcatctgttaacttagtaactgctactacaaacataacctaatcttccacagatgacaattagagaccagcattagctgcatcggcctaacattttacaggccacccaagtggccaggaactgtgtcaactgcttcttgtacatacagacggagagaacagattctcagtacagggagttataggtgcaaaatgtcgcgacgatggaagctacgcagatcacgaaggacggaagcagggttacattcaggaggctgttctggccaaggtaacccgccgccgtgatcgtcatgtccgccgcgacgcgagccaaagtgccggcttccgtcgagaggagcccgccgttgtaggttccgcgcgagagcctcgacgacatcacccgggaaaggagggacaggttcactcctgcatcgttttgttcacagggtcagaagtgaaatggtggtttcagaaaattcagacacgcctcacttctgtttcagtctcttgtttactgtcacttaccttcgagcacctcagcgaagacgaacgtgatgagagccgaggagacgtattgcgggacggagtagtgagaggtgaaacggaagctcatggctatgccgatcaggaccatgatttccgatgccactaaaatttgcctaaagaaaacaaaagagaaacgagtggaaattaaacactgaggattatagtggaaaaggaaacaaaacttaatgtgctagtgctagtatgtatgcttacctgtcttggaacaagttggtgacatagctcccaacgatgacatttacaggaagaactgtcaacccaagaactgctagaaacatggccacggtgcttgtagaccagttgaagtagaacgtagtgaccacgctcgactcggacagtagaatttccattgcaaacttgagcataaagtagatcaatagctgaactttcacagatggtgtcagcaatctgtatgctgcagcaagtgatgttgctggtttatgtgagtcttcagggtcttcttcattttcgtcattatcctctccattttcatccagactctcctttgcatctatgagaaaaggctgtgctagaccatcttccaaattactatttcttcgatggcctgctatgcaaagcaaattacttaattactattttcagagcatttaccatcatgtccttggcataacttctcaaactatgttttaaactatgcaacggagaaattttacctgaatcagatgacggtgtgttgactgaattctctctaacaatgtggtctggctctttaaatgaaatccacaaccaaaataagtacgtaatccaagccaagcacatgatccacccgggcaacgtgttctgatcaaatgtaaaaccgtagatcttaaaatttgtctgcagcaaaccggcaagagcaggaccacaggccattccaagagcactagcactaacaaatcctgcagatgcctgcagcctggttttgagaggcacacagtcgctgatgtacctgcggttcactgctctggcagaacccaacctacacaacatatatcagtgtgatcactagaacagctttatattgcaatgattaaacgagcacaacaaacattacaaagtttcaggaagctaacaaaaaaaaagcataagtactagatcaaaaagaacaagacattccatacccgcagagcagccggccaactataagaacagttaaggaattcacatcatatgccaaagcatacagcaggttacccaaaaacagcataatgctgctgaacacgaggggcctgaaatatgacttatttgaccaggcactgaagtaaactgaagagaacacttgagcaacagccatcgatccgatgatcacgccgcaaacggtagctgctgctccgaggctgactgagtagtcatctgcagtcggcacgatgatgtatgtgttcaccatgtaaagaaatgtgttagctaggttcagaagcagcgacatgaaatggtagctctggtcatcgacaagatcttctgagccactatgcatatcttctggaatgataagtgcatgttgccctatgaattgcagtaagtttgttgcgtgtgtgagtttctgcaccgaatgatttatttggtctatgatagggtcctgaggcatcagaaggaaagttagttcactccattttacagcataaatgtctgatcttgtcatgtgaacatttaacaagaaatggagtacctttaaggtaattgatggatgatcatagatggatggaaagtttccttgatgatcttggagaaatgcaaggttgcgcgacaaagcaccaactacagccacaataccctgcacccataaactgcatcataagtacatgaggtgtcaagtgcaaagttataaggaacaatataacctcacagcgcaaattatgttttcgaagatgcaagaaagagaatttaccacttgcttgaagatctgctgaagctgggaacagggatggtttgcacgagtggagacgtaatagtccgtgaatttgtagccaaaacgcttatcgaatttcttgagtatttttcggatgccggtagcattcatatcaacaaatctaagagcttcataagatcaattccaacctccctatatgcctctctagctcagaaatttgggatgcatctgcttgttccatgagcaatgcacgctcttctcccaatttctcgattctgctagcaagatggccttgttgttgcagaagaaagagcacaatcttctcaatctacacaaaagaaacttgatgttaagtggtaaaacaagaacgacattttttatcaacaactcaggtcttttctttctttcatattttgaaggaaattcagtctgttttacctgatcatcaagcatccttgagaactctttaagaacctgttcacgatttcttccaccattctgcgtctgctgaacatactgttttacctttttcttcatcattttgtaattgatgtagtacctacaatagcaaaaataaataattagtaacaatatttagaagatcagaagtatggcttctgtacaggattcagtctcctttcactacctgtttccgtatattacaattcacaaatttcattcataacttcaaggaaaaggaaagggtgggcaatcaagcaacatccacattatgctcttttttttctttcaaaaagacatatacatctaatttatgcatatcaatcggtgtaagtgggccaacccgcaagcccacttataggccaaataagtgggttcgcgggtcgacccacttataccctattcagatcagtgcatccacatggcaaaatgttaaggaactttcagagttcaaaatcaacatactctttccactcctccaattggtccgccatcagtctcttcccgaaattaaccatcttggcgttttactgagggaacctgaaactgcaatggaacaattagcatgccgctagaaacgaatcgatcaagtctagtggtatagcatttacagttcaattcagaacgacaaccagtactgtttgttcagagttcaggaaatacaacttttctgttgaagcaaaacatgaagaaagcgacatagtgatgatctaaatctttcagcaaatgacctagaagcttaatgtactatacatatggttagtgccaaagtacagatcaagcctcaacatgaataaaggcataaaatctcatggtccaacatgtcagtgacagagagtacatggaaaaggacagaactttaacacaagaaccacaaagataatgttaacatgtctgcaaaagcttaaaatattcgcgacagatccagaacgacaggacacttagcaaggtgacacagaatcatctagtcacactttcagataaatctctggcctccttttagcgatgcccaactccaggatgcagaacaacatagattagatggctcaatggtgttccaagagccaagtaagcatctttcgacactatggtttgttacgtcccttgttcccacgcttccctagcaaagaaatactcaagtgcagctgcaggctgcagctagcactgtactttgaaactttttttgaaagaagacagtactaggaaaccattttaatggcacgaatccaattagcccttctcgacagtactaggaaactaaaggtgcatgcttttcctcctattgttttggactctgaagatactactccctccgttttattttaagtgcagtcgtgagtttccgtatccaacttttatcgtccgtcttatttatttttttttaaaaaaaataaaaaacataagtcacgcataaagtattattcatattttatcataaagtattattcatattttatcatctaataacaataaaagtactaatcataaaaaaaataaataagacgaatgattaaaattagatataaaaacttatggttgcgtttaaatgggacggagggagtactccctccgtttcataatgtaagactttctattattgctcatatttatataaatgttaacgaatctagacatatataaaaatatgagtaatgctagaaagacttacattatgaaaaggataaagtagtaaactagccattacgctcggagagtgaaccatcagctgaaattctgaagtaggtctattgatcaaatcacgagcgagtgtttcttttgtaaatacccaatgtaagtatactcatcaaccactcaagacatgactcccatgtcctcgcaagaagaaagacaagaaaaacagaacacggctgcatgctagcgttagcctttaggtgcaccacctgaagtcagtgacgatggcatatcaccattattgggatgcgcattgcaagtgactcatgtttgtcacttcttcccgttaattcaccatcgccagtatggagagacaggaaagggctagaaaggcaacttaggttggcattgccaatcagaaagcaagaaaatggtaagaaagaagagagcaaagattgaacttcgggcctaaggcatatagattatcacaatcacaagcaattgaagcaaaaacgagcccctaatccttatgcaaatcgtatttttggcaattcggcatagcagaaattagaaaatattagttatctctcatcttaccgcgcgttcttcggtgattccctgatttcgtcctcctcccggcgaaacgatctctcctcctgttagatgaccatcaacaaatccaccgaatcgtaccaagcgctgaggccagaattatcgcgggaatccgtttctctcctccggttccagctgcggcaccaacgaatcattgtatgcacacccaagaacacgatcgaatcagaaaaccacacacaacccaaacggaaagagagaaccacacgcgcctgcatgcatgcagcgggtgcggagatcgcttacgaggggatcccgtcgcaattcagaggacgcgcccgagtgctgcaacggctaatgtcgacactgtctgtgtgtgtgctgggctccgctcaggggagatgaggaggagagggccggggggcaatatttatagcggcgactgcgggagagagaagacatggaggagggggcctcctcgccggggctgtggccgggacagccataggtatgcgtgtgtggaggcctggccgtcggtcgtatcgcgcgcggaggccgacgtggagggggggatctcgaccgggacggttccgttttggcgtttgcgtggccaaaaacgcctcgccatccccctccaccacctaggcccctttggttcttggctggctggcctcttgtgtagtcgtgtgtacgtgcttacgcacgttgctaccgcgcgcatgcggtgtgtgacttggcttggcttggatcaacttggctgcctcagggttcacaatcttggaaccaaatttatgagattttggatctatcggtggatcccaataggaatataggacacggccaaatatattgtgcaaatacatgaaaaatatttaaattcaactaaaatttgttcaagttgcaaaacttttgtcctctcacccaaccaacacacggagagagagagagagagataaaatactaactttgatacagataattcgagtcgggtaattaaaaccgctcaatccttgattcaataggttaaaaagtgtcttcaacctaccgggaagcatgatagtcggggagagatggcaacccagactcattgacatagttattaggaccggaccgaacattgagctggtcatagcctcggttcatggtttgattggttcaaccggttgaaccgccagctcaacacaattcatatggtctgagatatgcactattatcacacaacccaacatagctcagtgatggggttgctcgtatgaaatgaggaggttgaggattcgaatcccaccacacaaccttttatcatatattttcttctctctatcccacctgcgccccatctcctcaggtccccaccaacgcggcgatttaattgacctcatcgactagtccttgatgggaaatatcgacaggggatacccgtataccgggtagtgtgagtattaaagtacgttggtacgaggatctacatgattcgacatcaagcagacaaagaggtaatgattatactggttcaggccccttgcaaggtactaacttaataggttaatagctaccggatagtatgagtattgaagtacgttggtacgaggatctacatgattcgacatcaagcat

SEQ ID NO: 25688 - DNA, 3653 bp, Oryza sativa
gaaatagtaggggtggttgaacaaactacacaaaaatgccgcccatgtttttatgaatatatgcagaaaaatttggagacttgatggggactctcatagtctcacactgggtactactggagaaatgatctttgctgggtcggctgattttcacaatagtctcattctaataaaaaccaagactaaagattgtttttagtcccggttggtactacaaaccaggactaaaatgtttttttagtcccagttggtaactccaactgggagtaaatatttctctcccatctctgatagattaagtctcagacgaaatatttagagataagatcgtccctctccaacccccctcggatatcgctgttgatgaaaaaatcgaacacaccgacctgggagatctgcttagctcctgtgcaggtccaaagattaatgagatacgggcgtgccagtcagtttaatcctgcaactgacaagatatgcaaatagtagatcaaaacagcaaatcggctgacaagccgatggtgtagttccagccgatagccgataatagccgatgctaataccagccgatagcgatagggttaagcaatcggctatatgtccaatgtagataatgatataaaggcaatcggctgatgaccatgtaatgaaataacaatatattccagtataaaccaatcagcaaataatgatatgataaataagcatcgatccgaaggtcaaagcacacatcggctggaggtctgatgtcatgaaatccacaagattagattaaacagtgaagcctttgttgtcatcggctaaatccaacttatatgtatatgcaatccttatgagccgatgcaacgtccagataactcaccggctaaaaccccgatgaaacccttattggcaatcaagaagcaggctagagattatggttctaagcacgacttagtagatcaaacttaactgatgcagcactaagtatgaaaagaaacataatatctagacaatcaagccattgactgagttttcagggtggtagatgtctaagctaatctaatctagcaacgcgatttaaccgataccgacagaaaccctaaaacgagaagcagccaatagagctaaattgatatgctaagattagattaacagagacatatgataaataggtaggcaagtatatcatccaaaccagagcaatccaagaggtcgaatgtactgatgtagccttgaacgacgccgacgtaaacgatacaattgcctgggccggcggaacattagacttatcccttcgccggagatcgaagacgatgcagccccgcgtcgggtgccaagttctgccggaacgtaaaataaagtagaaaaggtaaaaggtggcgatgcaccgaattgtattgatcgtggagatagattacatagaccccgggtgtacatatttatacccatgggttgatacaagtccttgtcggataagaaagaaactaacctaaagataaaaggaaactaacaaactattcctaattaatagataaactgccatgccacattctctttaaactcggtcacttagggataagcttcctttagtagattgatttccttaaccgaatatagtaggaacccgactattggcgacttgataactcccattggctgatttcgagatgctgcagccgataatgattctaagccgatgacgtctttgccgattaccaaattttactgttatcaatcgcccctctctaactccctcagatccgatccaagcctcctcctcccctctactccccctcctcccctcccatccggcggccgacaggtggccagcgccgagcaggtggcctgtggccgggggggcgggcccggtggcggcgggcaggcgggcggtggtcgtgccaggcggcgccgagcaggcggctctgtaggcccgcgcggcgggggggggcgtgcccgacggcggtgagcagacagacggtggccgtgccgggcggcgccgagcaggcggcctggggccgaggtggccgcgcgtggcggcggctggaagggccgcgcccagcggcggcgggcaggcggccggcggccaacggggccgtaggcgtcggccgtggcgagcggaggcagccggctttgttttctttttatgtatataatatgtgattcattgagatgtataatttgattattcattgtacatttgtatagatctgaaatgtataatctgtgatatattagatttgtttggtattttttttaggatttgtgatgtatttgatttgtgtgtatgagtaactttaagatttgtgatgttactttgatttggggtttgatttcaggatgtgcatgccacttgattaaggagaaaaaaaaagggactatctggactgcccgctaccctctatttagtcccggttgataacaacaaccgggactaattgttgttatcaaccgggactaaagatggatctttagtcccggttatttcaaccggattaaagatggatatctttagtcccagattcctacttccggttggaaatccgggactaaggagggttaccaatcgggagtaaaaaggtttctccaccagtgagggtctcgagcccctaccgctcccatggcagatccgttaccattgtccagatcaatatactgtcatttgtgttgcatacgttaagtgaataacatcactaccgctctagatattttttagataaaggctactgtggtagatatgagtgatctgaaatattttcaccataattatttcatctgttcacaaatataagcatttatagagcctttttaaaaataagattttttctaaaaaagactataataacaaccctctccccaccccagttcaaatgaggttttatctcatagctaactctgaatgcaaatctatcacagactttaaatcgatcaacatgatatcggtagacaaatgacgaattcttcttagaagtgttgttacgaggagtgcttcatagactttgagattcttcctagatagttgtagtggtgtaacctgtcacaaggcaatataatatggtcgtgttatctagttttttagcttgatgtaaaggttgaatgttttcattgttaaatgaaattttccactatctttttgaaaaaagtattataaaatatggtgtatgatgagaatatgtgtaggctactacaaatatagataggtgtggttcgatctcataatctttatagtggtagagctaaaatgaaatggatgaagtattactggtttgctttactttgcattggatcgagtttaggctatgcgagtgcttgagtttagactaaggagatacatatatgataaaaataaacgatatgtagctagaaaaaaaaactctaggccaagttactaaacaccctcctaaaaatatgtagctgaacccctaaatccttggtctataatagttcacccagattaatttaactttacatttaaataaataaaataaaagttaatagttagttctctcaattgaagtaggcaagggggacgaggctcctttaacgtaagttagagggaagtgtgtcgctgacttgtgagcctataagtgtaggtccacctgttagggactcacgtctctctgactttatgttaaagaagctgttttcggaccaagggttacaggttaccaggggcg

SEQ ID NO: 25689 - DNA, 625 bp, Oryza sativa
tcctgcagccccggttcgtgtcggaggacggcgtgatcaacgcgcggccgcgggtgctgggcggcggcagctgcatcaacgccggcttcttcacgcgcgcggggcccggctacgtgagggccctcgggtgggaccccaaggaggtggtgagcgcgtaccagtgggtggaggacgtggtggcgttccagccggagctgggcccgtggcaggcggcgctgcggagggggttgctcgagatcggcgtcgtgccggacaacggcttcacgtacgaccacatcctcggtaccaaggtcggtggctccatctttgacgcgcagggacggcggcacacggcggcggacttgctgcgttactcgcgccccgacggcatcgacgtgtttctccgtgctagagtggccaggatcgtgttctctcgcaaaggtgaggccatgtcacccataatttataaaaaccacatttttcttgttcaaaagctcgtgttaccaacataccggtaagtttgttaattatcgacggcaagttaattgttgtggcacttgcacccacttggtgccgctgccctgtactgccatagtagttcgcgcgcactgaaaacccgcgagatttgcagggaccaagcccgtgg

SEQ ID NO: 25690 - DNA, 7670 bp, Oryza sativa
ttccaaattttgccccaacaattatttggcaactttaattttttttagataatggaatataacatcccggtttttactcaaaagagttacagccaattattacatagaagcgtttgacgaacatagtgtaaatctaattgaatagaacacaccgcaaggaacaataaagaatctagcctaacataaggagattacaattattgaagtctatttgtaaatctccaaccataattggcaaaaagttgtataaccatagtctccaactttcgatatgcaactttcagaaactcttcatcatcttcacacatttgtagttgtgcccaaaaccgaagccaatgggttgctccgaaaattattttggcaactttaatagtgtatataaaagtcatttggattgataccaatttttgccaagatcaatatagttgataacttgatattactcttccctacccaaaaaagccaaaacttgtccaaggtttggcacgaaccaaacatgccctgaaaaactgagcaacgtttgattagacatctgccctgctatcttcgggccgtattgaattgaagtctaccaaattctgcccgtactaaaacccaatgaaatgttaccctaccaaaattttgttattgcttggcatttgtcttgtgggcacattttggtttcagaccagaccatttttgatagtgctaaatattttggtaggggctcaaatcaaaatgatactagcttcaaaccaagatgatagcgcttaccagcaccacaaaactggagtactgaagatgatggcgttttgtacctgtcccattcaaatcacttgcacagcaattgattggaaaggggctaaggctactcttgatttctgttagtaacaagtataactaacaaccgaaagtaatgatggcatcgtacaagttgattggtcagaaatgaatagttgaaatatacaggcaggaactcgacatcagtagttcagtactactaccaccaaattggctaataccttctacagttctactcacgaaatctaggacaatggttgatgaaatgttaagtaaacatgcctctaaaaataatggaaactatcaactacaccctatcgtgtcattacttcatacacaggcttgtcccgcttcacctgattttttcatggacctactcaactgaaaaacagggtgtctgcacagcctccctactcctttccgaaatttaaatctgtcaaataaaccttccacattgtcattactgaatttgcttgcagaattgctggcttggctacttgaatcactatctatgggagaaaattccctgctgctgttgtcatggtccttattgtcgcgtttcttgggtcgtccagcactaccttgtgcgtcattatgacgcaatggttctgctctaaagaggaagtgatcaagagtagccccactaatcattggaaaatcattattttgctgagttgaacaaatggtgggcttgtccaaatgctctaatgcctgaggttcatctttgtcacttggggaaccagagcttgatgggaatgcacttgatggcatagctgtttcttcccgtcccttcacagtcttcaagataagtgtcttgagaaaattcatcacttgaactgcatgtatcaaagcagtcaagggatcggccatctataaaagagatggtatgttacatgattagtctgtgaaatagcaaattctgtagatagcaagaaaaaataaataaagccaaatagattttgagaataacctgagtcatgtttggtgcaaaaaccatagcaatgttgcgagcgttcatcttattgtagttttcatgttccacaacatctgccatcagattgatggcccaatcaagtagtgctgcttccactggaggtagagtactcgcaaggagagcgcattcttcttcagtgttgcagtgcatcacttgttctggagtcaatgagtccaatactccacttggaagttcacgaaaccatgcctaccatcagcatcacaccggtcatggaatggtgtagaagagaacaaacagataaaaagtaacaatacaaaaactcatttttctgtagacttcttaaaaatataatttagtctatgtatgcgctagatactctagagtctagtctatctattgattactgtctgaaatcttatatctaaatctctgtactgcataaacaatgtctgcattatcatatttgaaggctttgtacatgttcaatttccatagagaaagatttccataaggttgggttttatgcatttaaaacatatggtaaataaatcaaaggttaattaaaagcacaagaaataattgtcaccacacctttatgaggcccgtcagacagtgcatgtcaacaccatccggaacaacacccatgtttagttgctccctgacatgtagttcctgactattgtctgcatttattctgaagattccttcagcctgggaaaacaagaagcagaatttcagaacttttttccattttttgctgagtagtgtaaatgctagtattattaaggttccaaaatttgttggccatttggccttacctgaagccccccaagttgatataacttcttttgcatggtcaatagtattgttggcacactgtttcctctgttatcgtatgagcattgcatggacgttggtgaaactccaaatacactcacactgtgtaaggaaatagattaaacataaactaagttagggtctgagctttgctagaaattcactaataaaggtaggctgcaaagttcttttaaggaaaagaacttataacaattgaacttaagaaacagaaatgatccttagttcccctctacaactgaaaggttatgtatcatacatacaacaataccaggataggaatcagtaaggggtaacaactaactacaaaagatgaaacatatggagcgcccttgcctgttcggaaaaaagactttggtgccccaacggatggttgagagtaagatagtaaaattaaaacagtgatagatgggacaagcagtattctaaatagtgctaaaattaattatattttggcataaatttcaaatgctaaaagtgcttatattttgggactgaggaatatatcacaacatcccaatgcctgacaaggacaaagagagtcatctccacaaaaggaatgtgctttacaagattccccagtagtcgaacttggcagtgccatccttggaaatggcaacagttctggcttcctgtaagagtttgcaaacgtaacagtcctattggctcgtcgctcgtgggtaaccaattccgaatcggtaataagggctcggcgaggcaactattctgtgtgcacttttgcttagttacgcggcaatgtggcactatatttagcatcatgccatgaacttaattcggaaacgaacagcagtgcagggtgaaaatgggcttaatccacacaggtagtagcaccgcagatgctgatctccggagcggaactccaattccagagcccccgcctcaaatccacggagcatggagaaggcgaagcaaggcaatggcgcggcactgacctggcgctaggcgcggggcggggcacgtcgggctcgaggtcggcggggaggccgaggaaccccacgaagcggtcgaaggtgacgtgcgagacgtgccgcacgtcggtgggccggccaatctgcatccccgcagcagccgccgccgccgccgcggccccttcgtcctccgcggcgcgcacgctgctgcacagcagcagcgacctccgcagcgccgccgccaccgtctccacgacggacacccctcctcctcctcctcccctcgccgccggcagcatcagcggcgatgacaccggcacctcgccctccatctcctcctcctccccttcgtactcctcttcctcctcctcctcctcctcctcctccacctcctcgtcctcgtcgtcctcctcttcctcctcgtcggagtcggggcgggagaaggggatctggtggccgaagcggatctgggacggcgccatggaaggagtatgtatctaggatgccaacttcctcgcgagaagcaaagaccggagagagggaggaaggaaagaataggcggcggtctcggtggtgggagagaagtgggtttggaggcgtgacgagaggtggcttaagcttaagcccgcttcgctgcctcgctggtttgcttgactgcctctttaaacttcgctgtcttcggctctaaaaaaacaagcccaccgtttaatccccatctgccggcgtcctaatcatgcgatcgatcatttttgggccctctcgtctgccttaggtgaccaatcgaagatacatttgaaaaaaaaaacagagtaatggaataaacaacagaagccactgtagtaagatggagaagaaaatgaactcttttttttcatgaaatggtgcagttgttacagccaatggcaggtgtgaatacattccgtaatgctcgtaccatcggggtgacaataattgcacggcttatgattagatgcaaaccagtttttcaatcaatcggatgatggtgctcgtcgaattttcgtgaggaacactgcacatcgtcctggaaggtcggacttgcagattagtacatgtcgatatttttctgttcttgcaagtcaataatacacgttgattcttggtgccgtgatgaactaccggttaaaagtgtattggttaaccagctttttaaatccgttggtccgtagacgccaaacggacagccccttaaacttttgacttgagtgtgtgcattagccattgtacatgtacgtacaggcgtacactcgcgcgtgaagctgtcttgagctcatactcaaaccatcaaatttgatgtagcaaatcttcctttacttgacaaatgtttcctgagagtctgaaactagtactaatactacttcaaagatcgtcaggaatgagctccagacaaatttccgaacctgataagcatggatactgatttgctgttggacccgtgcagcgagcttccaatccctggtctgttctcttgatcaagcaagcaatttctttatctaaagaaagaaaccaaattctgtctgtttattcctagttattactagcattcaggtacgggcattcacaccagtagctggtttccccggaacaaacctgctctcggtttttcattcgtctaatctttacatcagatgtacctctcatcacccacatgcttgtactcgctcatgtttctactttggcactttgccatggaattattgggtgtcaattggtgtcagtgaccgtgaggatgtgaccacccgcgaggacgagatccttgcgcttagagccggtacaataaaataactcaacaggcttcaaaaagttacatatcatcgtatttctacgtggaggaaagataaaccagaaaaaggaagggaacggacgactaatctagcgccgacgatagcacggctccatatgcgcatgcaactagtactagcgattaaaaatacattttttgggccccacaccaccccatccgatcccgtgtggtttgctctccttctccttccgcccaagtagtatttcccattgccgagcagtgcaactgcgcaacacaggttcagatcaagcacgcggaatcgctctcctcttcctcctccatatcttctccgatgcagcgacgcttcttcctagcatcgccgtcggtgccaccgttcgccgcggcgtgcagatgaaggccatctgaaagcgtcggcactctcttccgttcattaaaagactgatcccagtttccagcctccgggcgacaccactgtgtgctagatctgcgccggtcgcttgatcgacgcccaccgcatgaagctggcgttgtctccatgctaagaccctgtttctttcaacttgagattattataatccagattatgagagtaaactgaaagaaacagacaacttattgaagtagcttattataatctggaacccagcttattataatctgataagctcatttaggtgagctttttccaaattattgggtaaaaaattacccatcatgccaccccacttcctctttagacttgcaaacccaataatctaggaaataaacaactaaccgcttattttactacagattataacaatctagcttatagtaatctgactcaataatctagattataataatcctaagctgaaagaaacagagcctaaatcttgctgtcttgtgggtgatttcgttgattaaaacaaacaatcggctagggagtggttcagtagttctgatgtcctccgtaccagtggatttggttttcttttcttggttttttctctatttctgcctgatctcagatgtatgcgtatcttgtttacaaaaagcggattttgtttccgtgtattttttcgccgctgagtgtattcttttttacctcgctccatctgattttcgatagcttccattcaattctattcatgtagacataagaactcatgtttcagaacatgaatggccacaaacatgaagttcacttttgatcatacactgtaagtactcataaagtatgtgcatgtataattaaatatttctttcatgagatgtagtaagcacaatagctagtctattgtattagttaactgtaatattagctataaaatgatatggagataatggagccagcagcagactatactattgaccttgctcttaaagcacactactactagaatctacggagtatatataagatccagacatttttctgtcctttccgtgggacacacttgatgttctttttcatgtcttgtggcctgaggtcctcttgattggataacggacacattgctttagtcaaaagactttattctgaaacctgtagacatgatgagtactagtatatatctaaacctggttcgttagtgcatgcaaatgtcattatcgaattttggtatgcttgcttcaaaaatagattttggagcatggatgcaatggaccataatcatccagcatcgctcgtcagtcatcacagattcgcagttcactggaaaaagtgcaccggaggtccctgaacttgtcaccgagatccgaaaacgtcctcaaaccgcaaaaccagatacatgaggtccctcaactatagaaaaccgatcacccgagatccttcggtggttttaactctggttttggtctatgtggcagctgagtcaccatggactcacctgtcagcatgccacgtcgtcactccctctctctctttcccttcctctccctttctcctctttctctctcttcacttttctccagcgggcatgggcggcgggggcggccgcagcggcgacgctctgggagcagcggggaaggtggaaggggaggaggggtctacccggaggtgctgcggtcgctgctggtcacggtgtacagccacagcatggcggcggcggcggcggcggtgaagaagaaggacgacagcatcgagtgcgcggtgtgcctcgcggagctcgaggagggcgacgaggccaggttcctcccccggtgcggccacggcttccacgccgagtgcgtcgacatgtggctcggttcccactccacctgcccgcgttgccgcctcaccgtcatcgtgtcgtcgccgcttcttctttctcccgtcccgcagacgccgccgtgatgcgcgacgacgacgtacgggcccgcccgccatggccgcgctcacctccca

SEQ ID NO: 25691 - DNA, 2353 bp, Oryza sativa
gtcgcagccgccgccgccgccttgtcgcccgccgcctactctctcgcctctccccggcatcgtctgcctcagccgccggccggcttgccgcctcgtcgccccagccgccgccccagaagagaagagaagagaagagaagagtgagagagagaggagggagagaatagggaaagagagaggctgatgtggattgtctgacatgtggggcccacgtggttcccacgctgactcagctgccacgtcggacaaaaccggtgtcaaaaccaccgagggaacggttttgttagttgagggatgccggtatctggttttgcgattgggggacgattttgtatctcgatgacaagttgagggaccttgggtgtactttttcccagttcacttgacagctcgcaaggatccatatgacaagaaggccacgttttgccatggcgggttcatctcgtttggagatgggcctctgggcctcataggccgatacccgataggccgtagcatctccgggctgtgaattattcggcccataccatgcgatacggcaatgcacactgcacgtttgttccttccacgaaccgatcccctcttcctggcaagtcgcaacgccgccgaacggcacgaagctctccaatgccgccgctgccccgcccaccgccgacaccgacctcggccgcaccagctccgtgccctcgccagatcgccgccgtcgtgctgaaccacccttcgtccgccctcacgccggcctcgacgcgctccctctcggcgtccctcctcgccgtcgcgccgtcgctcccgacccccgtggccgactccgtcctcaagctcctctggcaccacgcgccgcgcgcgctcctcttcttccactcgctcctccacctcccgccgcgcgcgcacgccgtgggtccctccacgctcgacctcgcgctcgacctctccgcgcgcctccgccgcccgcgccagctcaccaactccatcctcggcctcttcccgcgccaccgcctcgccttcaccccgcgcaccttccccatcctcttcgagcgcctcgccgtgtcgcagcgccgccccgacctcgccgtccgcctcttcctctcgctccaccgctcccaccgcgtcgcgcaggacctccccctgttcaactccctcctcgacgctctgtccaagtcgcgccacgccggcaaggccgcctccctcgtccgcgctcttgagcagcgcttcacccccgacgtggtgacgtacaacacgctcgccgacggatggtgccgcgtcaaggacacctcccgcgcgctcgacgtgctgcggctgatggtcgagtccggtattgcccccacgaagaccacctataacatcatccttaaaggcttcttccgtgctggacagctacggcacgcatgggacttcttcctccagatgaagaagagggggagtaaagacgagagctgtaagcccgacgtcgtctcgtacactaccatggttcatgggctgggtgttgccgggcagctggagaaagctcgcaaggtgtttgatgaaatggctaaagaagggtgtgctccatcggttgctacctacaatgcgcttattcaggtgatctgcaagaagggtaatgtggaggatgcagtaacggtgtttgatggtatgcgtgttaagggctatgtccctaacgtggttacatacactgtgttgatccgaggcctctgccatgctgggaagattgaccgaggtttgaagctgttggagaggatgaagaatggaggctgcgaacccatcgttcagacatacaatgttcttataaggtatttatttgaggaaggggagatggaaaagggtttggatttgtttgagaagatgagtaaaggagaggagtgcctgcccaaccaagacacatacaacatcataataagtgctatgtttatgcgcaagagggctgaggacatggtactggctgcaaggatggtggaagaaatggtggatagaggttatctgcctagaaggttcatgttcaaccgtgtgttgaacgggttgatgctgacagggaatcaggagctttcacggaaactcttgagaatgcaagagaaatatagacgtttgcaacgagaaataagactgtaattgacatttgatgttctcgaaacatttgagattatgttcatcctgaggcttagttacagaagtgaattcttgccttcagagcaccatatcagttttaaaagtactcataggtggtcctatgatgagtccaactgcaaatatcacttgattattggtatgtattctgagtctgaacatgaaattcactcaattgtttgagtataacagttagtgttcttggttttatcttttgtttcagtctttgagcggg

SEQ ID NO: 25692 - DNA, 1093 bp, Oryza sativa
ttggggggtcgtgccagtcgccctaaccggactgccgtgccattgagtgagcgaacaatacccccaaacgatatgccacacgactatgcttctagacgtcgattcccacaatgccacaccaccatgctcctagccggcgagctcctatcaacatgctagatccaggcgacttccgaagaaaagagcatcagatccacaggagctccgtcatcaccgtgttaagccttggatggatgagaaagggacccgccacgccaccgtccttgcacccacgcggaactccggcggtatgctcgggcggcagagaggtcgaggaggggtcgatgagttcggggtaaaacaactgcacgatatccctatgatctgcctgccaaccgttctctggagtagaatgttcacatggtttggaaggtgaaaaaaaatgtagagaaaacgcctgatcaatcagcgttgcattgcagtttgcaaatcaaagccggcattgtcgcgataggcgtcatgctcagcgaagtggagtacaacgatgcacccgatcaccgtttccatgcgtcaagtgagcagcacagcagcagcagcagcgttgcctgcgacccagcgagtcatgcagtgcgagtcgggacttgtcgctgggccactgcaccacgcccagacagagagcagcatccaatgcctcactctgcccgagccactgactgacaaggtcagtgcatgcaggctgcagctgctgcagagcgctctctttctctctccccccgcgcggccccaggacacgcccctcgccggggcccccccgtcgcccatgccaccaccaccgcggccaccgccaccgaggcaggcgcgctccccacaacccaaccaaagaaaattatcgccgcacctgccgcctgcgtcgtgtgtcgccggccatcacgcgacgcacgcacgcacgcacgtctacaggcgacaaccgctcaaactcaacaagtactctacctctactccaactacaagcatcgcgtgccatcgaacacggtgagaattgttttggcttcaaaagttgcgaggaaaaaaagagttacaggacatgacataatccctgcggatttgggttttc

SEQ ID NO: 25693 - DNA, 4518 bp, Oryza sativa
attagtcccattaattcatccaatcggctagttgtcgtgacctttacagaaccaatgatgcatattgttttctgtgtggaagaagaatcctcttttgcatggattgtaattctcatttgcacattgacctttgcacttatattagtctcatgtattctttcaacacctaaaagttttatcataagtatttcatttgcccatacattgacctgctaaaaacctatatatatatattctggatgagaaatccttttaaaagcttttctagctaggatgagtttaatgcatatatatgaaaccagccacacacatgatcaacctaacattgcacaatgctagcaagattataatatcgagatgtcaaattcaatcattagcaatatgaaaattagtgctgttgtggtctgaatatgatagattatctcttttatataaatcaatataaataattacctgttgaaaaccaacactgatctcataatatgatttgtaaaaaaagggtagcatatgtgtgtcccacttcatttttcatgatctatatgggcaggggctgatgctttaatttagatctcatctgtaattaaccagctagtacttttccagtagccagggctttctttctttgattatttgcttttctttcttgtttgtttcattcgcgaaaagactatggaccatgcataatgcatctttgttttcaaaaagtcactttctagatggaacctcgacctgagaaatcatggttttcttgtagagcttaaagtttggtcatgcttccttttactataggaaatagtgaagacatcccataaatcaataaataattagccagctaggcatgtcttgatctcgagaaatgttcatatttgctatgagattttgttcaaatttcctgtgaaaaatccttgcagtccaagcgatgccttaactattttgcatcggggcatagtactggtactgaaccaactaattaattaagcttagagagtggcttagctagctagcagagataccagctagctagtgatcataattaatttctaggggatttccattattaactctataggttttttttggctaaaaaagggtataccatttcgttgaaaaacaggaatcaatataacctatgctgttatcctatttttgcagcaagtccctgcatgtaattagaatattaaaattagtacctattttttttgcagggagagactacattaagtatgccttcattacgacattaatcgtgccctaactaacaaccttaaattggagctgtataaattagtcacgtgcagccagtcttgattaattcttgaaactttagttaatcatttgtcaagtgttgcttaatgttgtatccaccaggcaaaaaatagtaccacttaattattttgtagcaagctatagctttcttcagtacttcccactgattgcagtgtggaattaaattaattaattagtctgcttctgacttcgttagtttcttcccctttttttttctgaaagaacgttttcttccctttcttctgaataaaataaaggagatgaattggttttcatacaacctggcactcaattgagagaaaatactgatagagtttttttttgaaggaataatgaaagagtttcatgtgcaacaaaacttagaaattaaaggtgccaactccagaatcagaatgtgcaagaatgaatctttcttcctgacttgtgtgcgatgcagctgaaattttaggtcagaattattcctgttctaaatgtagccttacctcgtttctgagcccaagtgtgtattgggtttgaaactgatagtaatggcccaaatggcttaattacaaggaggacgctctcttggatcgctaactaattgagtccattccaccaacagcaagattcatagcaggccttcatgcgggccagagcccactttaggcccagccttctctgatgcagttcagtgctgcttcagttttcagatagtgacagatggggctgaaaaattgcagatcgagtcccttttccttcatcaccggagaccagggtttccccgacggtaggcacggtaaccacggtaaaatttaaattattttctaatttaaaatttaaattattttctaaatttatttaaatttaaggtggttaccgtggtttttttaccgtaccccacgataaaactggtaaccgcgtgattaccgacggtaatgtaaaccctgcaagagacatagagaaaagatggaacagaacacgacgaacagttgttcagagctgaaaaccgctcaagctgaagcttaattgttgatcaggtactgctggtacttaacactaatcgattgcatggacaacacaaaatgtattattccctccgttttaggttataaaacgttttgactttttgacttttactattttaaatttaactaagtttctaaaaaaaatagtaacattttcaacccaagacaaatttattataaaaatatatttaattattgatttgatgaaactaatttagtattataaatattactatatttgactataaacttagacaaacttaaaacagtttgacttatatcataaaactgagctagggagtattattcgagaattcatcacagagccaacgctatctgtgtgtgcgcgcgctcgcaaatggcttgcatcaaaattgaggaaaaaatcattcaaatctgtatattcgcttaaagcaaaccgttacaacaatcattccgtacttattcgctgtccacacatttcacacgtactccctctatcctataaaaaatcaacctagtactgaatgtgacatatcctaatattacgaatctgtacatacatccgtccaaattcattgtactagaatatgtcacatgtattagattcgttttttagggacggaggaagtagctctatttttcttacaaattacaatcatacagtacgtatacactgtctacgcatttcacccactacatggtatctctcttttccttctgtatctatactccctgctgtcatctgaatgtctagatagagtaagccataagaatttttttaaggaaaggcaggagattttgccttatgtagtaagccgtaagattacgtagtatagaggtaggaacagcacagcgagaagcatcccgataatcaccctgcagattgaattaattaagcagttaggatggtaacgtcgaaacgaggactctctccgtttctaaatgtttgataccgttgtctttttagcatatgtttgaccattcgtcttattaaaaagaattatgcaatatgtaaaactatatgtatacgtgaaagtatatttaaccatgaatcaaatgatatgaaaaaaaattaataattgcttaatttttttaaataagacgaatgatcaaacatatttaaaaaagtcaacggcgtcaaatatttagaaacagagggagtatatactttctcacttaattagtaaatcagttggaagatcttacgcggtgataataatctcaggatgcagcccgtattcttttgcaaatatgaatgatgaaatggcttgtggtacagcagcctgcaaaatgtttgcacagatcaagagatcatcagttttccttgcgtagaacaggattacaatggcgagctaacataggagagtccgaaacgttccaatttgggtaaagctaagattaactctgagtctctgaccattatgtttgaacacagaaaaaactggccattatgttcttttaaaaatctgaccattgtgaacttaactatttgagtaaatctaagctaggaagtgatcaagattaaaagttatcaatctcagggaaaaaaagattaacaattatcaatcgtcttgccatggtaaagaaaagctactttcaaccattatcaaccgcgctcgctttctgaatattcaagcaggtaattaagaagggttggatttccatcatcgaagcaagaaaagaaaaagattaaagagcgtagttggaaggtaatatggaaatgtgtcgtgagaaagttgcgtttggtctctaaacgtctgactacaaataacattgtaattagatacctgtatgatggcagcccggagtttgttgccgtgaaggccaacaattttggatgcaatggtcatcgcaatgggtccaagagcaaacttcaaaacctgtcccaggatgcagccgcacagatcacaagctatgatactttcctgactttccatggacaaacctgcagataaaatgagcatgaccccgccccaaaaacaagtgtccaagacatgcatatttgttacaaaggaaaataaaagacaatctgttactgttagtgggaaatttaaaaaggaaaaataatgtatatcccctgtacctggtgtatcatatactcctatgatatatacataggcagaacaatttatatttatgcatgtatgagcacatgtcaatgttttaatgcgagtataaatttgtacttacccgtgctgatcataggcagcgctcctatgcccagtgacaaggacgcgatattcac

SEQ ID NO: 25694 - DNA, 4958 bp, Oryza sativa
atgcatatataatatatgcatatatatatatatatatatatatatatatatatatatatatattatatttatatatgtttcaatacatatgtacatgcataatatatatgtatttatacatatatatgttttgcaaatgcatatgtatgtatgtgtgtgtgtgtctatatatatatatatatatatatatatatatatatatatatagccactcatatagggcaccatggtgcccggcaccatggtatcaaatgcacaaaatcactcaaatttttcaaaattttcaaattgtgagtatatacctagttataataattcgattcatacctatacctatcaacaaaacaactcaaatttaactttatttcacaatccatgattacatacctaactaattatatgtatggatgctatatacctagaatcaaaatctaacaaaaacaagttcaaattcagttcaaacttgctttgaactagttagtaaagtggttaatgttaatacctaagtgctttgaactgcttttgctttgcgcactacaaataaatgacaaacgacgagagatctaattaatatacacttgtatgtatttgaatcggagaaatataaatgtagagcatgtgtactcacagaaaatttgaacttccgcctaagtctttctctccagttgccgcggaccaaatgacggaaccgataccaagccctacatggagtttaaagctatgattcgtagtagcaattaacataacaagattttcttaattaacagaggaacttatgacagtacctgtctataagttcgaaaaccttgtcaaacgtagactcttttttatccattgagtcatatacattgacggtgcaggccgacaggtcgaagagtaaaagcacccagtggaatctacaatgtgcgtgggatgcattacatatgaaacacttagcaagttcatacgggaatgaaatttggtataggaagacagtaaaattaaactaactctgtgttgtacggcaacagtatgaacgtcttgtaatgctgcgcctttaggagatggacgagattgtcctctgtggcttgcggatattggtcgagcattgcgacgtttactttccgagggtcgatgaatccagtatcgaaaaccccccgccgtcgggccctttgaatctccattctacaatgataaaagggagtatattattttctatagtctacttatatacaaggacctaattaattaaaggagacgtagtaagaaatctaactgaacgatatacttacaaaatccagcaactcataatagagacgtcgagggcatccagctggtatagttcgtagattcccttgaaattgatccagagaatgtcatcctttaattaattaggtctttgttcttggcggcgtcaactttcgccttcttcgttgcccttgtgtgggcaagcggtggagcttggggggcccttgactttgaaggtgccggaagaggagcttgcggaggagtcggtgcaggagcctaaggtggagacggtgctggagcatgaggaggagtcggtgcaagagcctaaggtggagacggtgcaggagcctgaggaggagtcggtgtaggagcctgaggtggagacggtgctgaagcctgaggaggagatggcagagcccgaagagatggtgcatgagacgccgcttgtcgcccagggaggatgatgtaccgcctgcgccatagaataatggcatggcttgtgtctcgtagatgcgtctcaccgtctcctccagggtaatccagcgcgaggtcctcgtacgcgccttcgaccaactcaacttcgaccttggagtatcctgctggaatcggcctgcagtggtaagtacctgaaaggtccattgggatggccatgcccgacgccaccttcatgtggtgagaggttatttattagtaatcaacatatataagcagcaactagcggaatggccaaatctaaaatatataaactacgagcttacctttattgataagttcttgaaaggaatatgcagctcacatggtgtccactgaatgatgtcatcaacggggcaagtggattcgtcctgggtttgtatggcgtccatactctgtgatcctacctgccccattgaggcgcagctgctacggtttcctgacgggctcaccattgcaggaggaatggtcggctggggatcatgggaccgatgtgcggccatgcgttcatcaaccttccttgccacctcctcttgcatgctgcgctcgtagctcgataccctgaactctagatctgcaatcttcaccttggtatctctcttgctcctcatccgactcctgtacgtgtggatgtcctccttgaacctaatcttccaaggaatcacccctttcgctcgtgttcgtcctggatgctctggagtctgcagggcgagtgacagctcgtccctctctctgtccggtcggaacgtgccctaagaagaggcttccactgcgtctgctagtcaacgcgcagcctcttgtatctgatcgccgaagaccagtgggccatcagctgggttgagcgttccaccgtgagcatagtaccagaacttcgatcgttccggctaattagcggtggccggttcgatacccctctcaagcaagcttgcctccatctcctcccacttcggcatcgcaacgctatagccgcctgaccccaagtggtgatggtacttcttcttggcggcattttctttgtttctttccattatcgcctgcccttgttcacctgtcttatatgcaacgaactcgtcccagtgatcccttagctttgggaatgtgtcgaagttcggtgtctgccccttcaggatatatttctggtacagatctcccttgaagctctgaaactgttctgccattttcttcagagtccaccttttcactttgtcctctctacccgcgggaagggtgaatgtctcgagcattgtggtccacagcatctctttcttcgaatctgggacaaagctctcatgatctctgcgtgcccttgttctttgccagtacaccgtactgacaggcacgttatcccgcacaacccaaccactgtgacatacatagttcttggcggcttctgccggggcactaggtcgtccatcttcttccacttccgttatgatgtgccgaccctcaagcttcttcgtggtacctcgttacccgcgtgccctcttctgtccaacggagggttgacttccactagccttctcctcctggttcccctccacatccctttccacgtgcccctcctggttcccctctgcatccctctccacgttcccttcctcgttcaaatactggtttggatcctcgttcccctcttcttcgttccagtactggctacttccctccgcgattgtatcgtacaatatttgttcctcatcgcgattagccatctgttcatacaggaaacatctgctaagtcatgagacatttatgttttaacaatcttatattaaaactcaaataatcttatatgctaagactaaaatagtcatgtatgctaagtgtaactgtcgtatattagaaccctacacaatcttacatgctaagtctaattacaaatctaataatcttatactaaaactcaaatagtgatatatgctaagtctagatgacgtatattataggaccctagctagtcaataattatatactaagtctaattacaaatataataatcttatatcaaaactcaaataattttatatgctaagactaaaatagtcatgtatgctaagtgtaactgtcgtatattagaaccctacacaatcttacatgctaagtctaattacaaatctaataatcttatactaaaactcaaatagtgatatatgctaagtctaggtgacatatattataggaccctagctagtcaataattatatactaagtctaattacaaatataataatcttgtattaaaacttaaataatcttatactaaaactcaaatagtcatgtatgctaagtgtaactgtcgtatattagaacactacacaatcttatatgctaagtctaattacaaatctaataatcttaattgcattacaaatataacaatcatatatataattacgtcacttgcctgcgcgaattccttcgagggctagctctaccactccggcttgagagatgactctgacaacgtcttttctgcaagatacaaaaagatgtattaggataaacgcgaagtaacatatattgcatttgacgttcacgtttcgttcacgatatcgttcacgttcgcgttctcgttaaggtcacgtttcattcacctacgtttgttcgttcacgttcattcatctgcctataattgcatttcacgttcacgttcgttcgctcgttcacgttatcgttcacgttcgttcgctcgttctcattcacgttcgttggctcgttcacgttagttcgctcgttctcgttcacgttcattcaccttgttctcgttcatgttcgttcgctcgttcacgttctcggtgtggcggcagtgggacggcggtgtgccggcaacggaacggcggcgcggcggcggcgtggcgccgcgcgcggcatcgggccgacgcatggcgcggcggcgtggcgccgcgcgcagcatcggcgtggtacgacggcggcgtgctgcgcgcggcgcggtgccgtcggggcggtacgcccggtggcggcgttgcacgccggcggcgttgcgcgccggcggtgtgcggcgcgaggatcggagagagagatcgagggaggcggcgtgtcacgccccgaactagccccgagcgggactagaccgtgacgctccaaattaacctgttaatcgataccagtcccaggaaacagtgctggtatcacaggaagacagaatatcacagcaacagaggtctctttattatagagtaggagtacagtcatattgggctgcggacagatcccgagctcacaactgcattacaaaagggaag

SEQ ID NO: 25695 - DNA, 40466 bp, Oryza sativa
  unsure (1)..(40466): unsure at all n locations
tttcaaacggccacccaggcctggctgatcccatcatctgtcaagtgttgcttaatgttgtatctgacggcggcggcgactggccggtcggccaccatggcgcgtgcgcgcgggaagcaacggcgcgcggcgacgatttggcggcgtcggcgggaacggcagcgagagtggagagggagggctcggcgcggctcacgggcagagcggggagaaagagagagagagggagagagagatggggagggagggaaatatgggcctaaagggaattcggcccatcgaacccgagggaggcaaaatagacttttgcagagggaattgatttgggaaggatttggattcgggattgaacttgacgatagatcggggattcgagatctgagatggcacagacactagacaacaagcaaagaaacagatttcgcaattagggtttttaagagatagttttcccgctaggcgccatgacggaacgggcgctgcacggcggcggctctcaccccagagatgcggcggcggcggaggaggcggaggcggcggcgacgacgacgagcgcgagacgacggcgagatacggcggcggcgtcggcgcggggatgccctaggcagtggcggcgaaggagaagccgagagagattgatcgggcaaaaacttctaagtgttagtggagaagacgagggcgcgcatcgggaatatatatacccctagatctttagtcccggttgatgagaacaaccggnactatagatttagtcccggttgtttagtcccggttgttctcatcaaccgagactaaagatcttttcccgctattttcaaattctttttaaacccggttagggttaagaaccgggactactgataagcgcactgaatattattttccattacatatgtgtttctaaaatagaagataatgcattacaattatttaaagtacaaagattaatgacaattacttcgaaaaattactgttgtctgtaataaattaagtggataaatcgtaataagcaaatatatgatttagaattaataaaaattgtaataatcatatatacttagcatatgaatgatattattaaattcgtaaaaactctaattaacatatgtatatacatacggcatgatttacaattaataaaaattgtaatcatcatatatacttagcataggaattatattaaattaattgttaaaaactctaattaacatatgtaaataccacatgcatgatttaaaaattttaaaaattcgaatagtcatatataattagcatatgaatgatagtaaattaaattgtgaaaaactctaattaacatatgtaaatgccacatgcaggatttgaaacttttaaaaattctctagtcaattataattagcatatgtaaatgccacatgcatatgaatgatagtaaattaaatgttaaaaactctaattaacatatgaaattgccacctgcgtgatttaaaacttttaaaaattgtaagtatcgcatataactagcatatacatgatttaaacttgttaaaacctctaataatcgtgcgtaattaacatatgccatacatcaattgatttatatggataatcaatacatccaaaatagtttacatcgtgtacacaataattacggcaatacatcggcggtgacggttgaccgcacgtactttctcctcactattgttcccttcttgtgatcgctacgtgagtaaggggtgtcttcatttgataggaggatgctagggtcaatcgtcaccgtgaaagggggttgcccatccaactgatcgtaatcctcgtcagtcttgtcctcaactccgacgatttttcttttgcttgggagaaccacatgacacttaggctcgttaggccatctgcccttctttcctttgctagacatgtccttcacgaaaaagacttgcgttacatcattggcaaggacaaaaggttcgtccgagtatccaaccttgttaaggtcaaccgttgtcatcccactgtcatcaatcattacgcctccaccagtcaacctaacccattggtaccggaacagagggaccttgagaggaccatagtcaagttcccatatgtcctcgatggcaccgtaatacgtgccagttgttccatcgtgtcccatggcatcgacacgaacagcgctgttttggttcgtgctcttcatgtcttgggctctcgtgtagaatgtatacccattgatctcatatccctggaatgtcgcgatcgacccagacggtcccctcgccaggaaggcaagttgttggttgatcgactcgttacccatgagatgttgtcgtagccacgcggggaaagtatcaatgtgatgccatgtaatccatgcatcggacttaccgatgttcctggcgcgaactagagccaagtgctcctcgacataaggagctaccaatgaagattgttgcagaaccgtgaaatgggctttacggaataaatcgttgtctaccgtcattattgctttccttccgagagttccctttccccgtagtcttccttcatggcgtgattcaggtaccccgattgagcgaagatcttcgataaattctacgcaaaattcgatgacctcctctgttccataacccttggcgatgcttgcctctggacgagcacggttacgaacatacttcttcagaatgcccatgtacctctcgaaaggacatgttgtgtaggtacacaggcccgagaatactgatctctttcacaaggtgacaaagcagatgcgtcattatattgaaaaatgaaggtggaaatatcaactcaaaactgacgagacattgcaccacattattctgaagggcttctaatctattcggatcgatgaccttctgcgaaattgcgttcatgaatgcacatatctttgntatcggtgcccggacattgtctggaaggataccccttattacaactggtagcagttgtgtcatcaacacgtgacagtcatgagactttaggtttgtgaacttcttttccttcgtgcttattattcgcttgatattcgtggggtatccagacggtacctttatgctctccaagcattcaaacatactttccttctctgccatactaagagtgtagctggctggactcaagtaatggcttcctttctcctttggttccggctgaaggtcgccgcgttcttccatatgcttcagatcattacgtgcttccagtgtatctttcgactttccgtgtacacctaggaagccaagaaggtttacgcaaaggttcttagtgaggtgcatcacgtcgattgcgtggcgtacgtccaagaattcccaattgggtaactcccaaaatatagagttctttttccacatcgccgcgtgaccatcttcgctctctataggctggcttccaggcccctttccgaacactactttaagatctttaaccatagcaaacactgttttcccgctgcgatgtttaggcttcgtacggtggttagccttatgttcgaagtgcttgcctttcttccgtaccggatggtttgctacaaggaatcgacgatgacccatgtaaacaaccttcctacagtgcttaagatacgtactttctgtttcatccatacagtgagtgcaagccttgtaccccttgttggactgtccggataggttgctaagtgcaggccaatcgttgctggttacgaacagcagcgctcgtaggttaaactcctcctgtttgtcgttgtcccacacggggacaccttccttcttccacaacagtttaagatcttcgaccagtggtcttaggtacacatggatgtcgttaccaggttgcttgggcccttgaataataatcggcatcattatgtacttcctcttcatgcatagccaaggggggaagggtatagatacacatcgtaacggggccaagtgctatggccgctgctcatctctccaaaaggattcatgccatccgtactcaaatcaaacggtatgtttcgtgcgttctttccaaattctttaaattttctgtcgatgtttcgccactgcgaaccatcggcggggtgtctcagcatcccgtcctgttgacgctcttcagcgtgccatcgcatcattctagcattccccttattcctgaacaaacaccttagccgtggtattatagggaaataccacatcaccttagcaggaattctcttctttgttagctgcccgtcaacttctcctggatcgtctcgtctaatcttgtatcgtagtgctttgcaaacagggcatgcttctaggttctcatactcctcaccgcgatataggatacaatcattcggacatgcgtgaatcttctgaacttccagtcctagcgggcagactatcttcttagcctcgtacgttgtctggggcaatttgtttccctccggaagaatgttcttgacgagtttcaataaatcgccaaatgccttgtcactaaccccattttttgccttccattgcaagaactccagagtggtatccaactttttgtgcccctgctcgcaacctgggtataacgaagttctgtggtcctctaacatcttgtccaatttatgggcccccttttcactttcgcagtcctccttggcatcctgcaacatctgaccaagatcatccgcaacgtcgttaccatcagcatccctttcctcctcgcccgtttgatttccttcaaatccaacgtactgagcaaagtccggaatattgtcgtcttccacttcatcttcttccatttcaataccttgctctccgtgggatgtccaacaattatagcttggcataaaccccgactcaaacaagtggaaatgaatagtcctggatgcagaatactccttctgattcttacacttattgcatggacaacaaataaaacccctttgcctattagcttcggccactctcaaaaaatagtgcacgccgtcaataaactctttggaccgccggtcagcgtacatccattgccgatccatctacatgagtcgaaaaaaatcgtacacaaataattattcttacaataatgacagtcatacaataattataagataattacaaactgtttcaacagtcatacaataatgacacatctttattcatacaaaaatcataaaatattacaccaaataattcttatttactatttctaaagttttaaactaattttaatgtgttttacttcttttaattttcattttagtttgtttctagtattcaagattaactttcactatagttttccttctcaactattttataaaaccttctttatcaaatcaactaaatttgtatatattctttctaacccacacaaattttctctctcatcaacttacaactaaattttagagacaaaaaagtgtgcaaaacatactgcaaatgtaatatgacaaaaaaaacattggaggatgaagttgcaaactttttaggcacctccgatttgtatgtaattaccaaaataaattcactagaaattttggcatgacctaccctcttttttgaagaaattttgaagcttgctcgggcagctggaggaggaagaagacatatatatataggggtgggactttaattccggttggtgttaccaaccggggctaaagatccccgagatctaccaaccgggactaaagttacgatcactaaagatcccgggggcctgacaggccctgacagcatttgaaccgggactaaagatggtgaccaaccgggactaaagatcaaatatgcccattacccttttgaaccgggactaaaaatcatctttagcctcggtttttattgcatccgggactattgtggaatttggccgaccgacgaaagatggtttctccaccagtggatcaaagactccaagtagcctagtataatatttagcctgtcaatcaggacaatgacatgtcagcaatgaattcaggatcaaaatgtaggggttttcttgagaggtgaattatgctaacggacaacttaacaatgacagtgacagaccagtgcagctacttttcatggaaacaatggcatctattgcttaattaatgacaatgaaaatattgcttgattctgttcagacctactggattgccatgaggccatccacactgcaagagttgcactcccaagctcttgaacatgtcacatgtaccgtgtagaacagcgtaaaccattcaaggcacaacttttacaatgcataacccctctgttctttttcggtgttgtattagaatacatgcaaacctcaaaaatctttaccagctaaaatatcgaaaaaaataataagatttgatatgtggaaatgagtttgttaaatttggcattttagttatatttctactaattcttatagatatatgattagacaaagagaatggtaacaacatgtgcatttgatactctctcagttgtactagacaagtaaaaaagacacaagggagtacaaatcagtcagcacatatttcattttggcacttgatatttagtgccatctcaccactcatattatagttttattattgatttagggtccgtgcggctgccctcctttggaatcactacgaagcagggtttaatctttcggtttggtcatttgtatcggggtggccgaaataccgaatttttggtctgaaattatatgaattattgaataaaatttgatcaaaatattactaaattcacgaaaaaatgaaaaaaaataaaaatttcggccgaaataatatcacatcgggaggtccgatagaacaaatccaaaattttgaaccctgctgtggagcaaggttccagcttaaaaaaggaaagaagaagaagaagaagacaaacagcggaatttcaccgaatttgaatgaaaattcaaaattcagtttgaataattctaccaaaaatagatcgatgatcataaagataagtaaaatccaggagaatcctgtcctccgggctgatcgagcctatgtgaggggatagggtttggcttctcgagttttggtcttcgtggaccgtctacaaattcaacctcaacaaacgacaaaaatttggggaccgacaaatctcgccagcttaactgattaatgctaattatacgtgaaaaagactttttaaaaaaaaagggggggggggggagggagatacaatagtcgtcagatactacggctgaataactcgtacatagatgaatccatatgcgaggggaaaacatacgtatatatggtttctctcaactacttgaaatcttgaattaacctgaacgccttatccgaacaaaataataaaattgttaatctcattcaacttcagcgactaagggcacccacaatggttatctataggctctctataagagatccatgtcagcatattttcctacttgaaagagattaaataaaaagagagagcaaagctatctactaacctggagatagtctatagagaaaaacgaggcaatgtattagagagctatagatacccatatagacatactactgagatggttaatattaatctagtctattgctgagatgtacatattttatagatagcaccttactttaccattgcgggtgctctaattgttataattgaattcagagagaggcacagacagtgatagatcctatcattaattaattcattatgatagatgttcttcatgaatgcatgcattcgaacgtacgtacctctggttagtagtggatttgaaaacagccaatacaataccaacaagagcagccagtatgtttacgtttcgaagaacttggatgatgaacttgacctccattgggagccgtcttacttgctcgtccaagacgtaggttgcagcttcccagtatttcttacatgaactagccaagtcccctattatctttagacccggttgatattatcaactgggactaaaaattaacgcgtcgtatataatccctcacacttatcctctcctcctcgatcgcaaactcctcctcatctttaacttcctcctcctccctttcctcctgtctctctctctctcttatcctctccttttcttgaagcagcagcgaggagcgagcgaaagcggcacgcgcgcgggggcgggggcggggttggggggcacgtgctgggctggggaggcggcgggcggtggtggagcgatggcggatgggcggatttacaatttgtttttgtatatttttgttgaatttgtttttgggaatttttgatgtgaatatgtgatgtatgtgtgatgtttcttttagaatttgtgatgcatttgatctatgattcggaggtgatttggggttttcgtgatttggggatggagtgaaatcaatatgcaagcagttaaaattaatgaaaaaaaggaaaaaaaaaatatctactcccgattagtggtaacactaagcgggactaaagatccatctttagttcccgttatttcactcgggactaaagaaatgcatctttagtctcggattagtagtcccggttacaaaacaggactactaggggttgtgaaccgtggtttaaaaccacttctccaccagtgatgggtttgtcagaaatgaaatttaatcaatacaaataatggaattgactaaaaataataataaaagtaattaactcagagcattatgtatgtatatgagataatttagttaaatcaaaaagtaatttatatatacgataaaagtatatgtcgacgagtgatactcgtggaccggatgagttgagcattggaggacatggtagtcgaggtcggagaggtggacgatactcatggtgggcagggccgtcgacgggggagtgcgaaaacgacgaccgcacagggcccccaacttttgggggccccacaccaccatctagggtgggccacatgcctggcgatcagctaatgagagctagggtagaagcaaagccaaggcatcgcaagcgtcaaacgattggagatcgcatgcgtcagttagatcgaggtgtcgcaggtcaatgaaggagcagtccatcctataattcccaggtattgtgcgtgcgtgcatcgagacggcgagggcgcgaggcgccgcgcagctggcagagcgtcgatcgagcgggcggcggtggtggtgcaaatcgtggcaaccatcagcgaggaggacagccggaggcgagcgtggaggccgagcctaaagcaacttctagcgggcgcttgccggcttcactaatcacttcatcaggtaatttactaatttgacgaactactgttacagtattgtgagtgaacaaacaattgaatggattcctgattgaatcaaacacatgtctttgcttttgttgataaaaaaataatagatttgtttcgtcaatcacctcatcatgccttctagaaagataaagtatgattcgggtgctgaaaatatgtcttcaacattattaattatgaacaattaaagattttatttaaacaacactatacagatgatgattttcggtagaacagcagtgatacctactcttttagcattaatatttgatatatttttaaacattgcacgaaataatacatactaaaactgaaattatgccctctatattaaattagatatatgaatttttttaaaatttagagctttgatttgtatttcgctccgaggccttaaatttctgtagacggccctcacggtgaggtgcaagatggacaaggggttggcgacgttgcccaccagccagaccgccaagtcgcgcagctccggcgtgacccggccgctccggcgcgccaccgcgtagccgagcagcagctcggcgtagagcggaacgagcgccataacagcctcccctaccaccatattttttgcaatgaaaaatggttccccccaactaggtaatgctagtagtattttttccaaggaaaatcctgttcgtttccactgcaagaagtggatgaaattttggatatttgtggcacgctttttaaactgctaaactgtatgtttcataaaaaactttctatatgaaagttgctctaaaatatcagattaatctattttctaagtttgtaataattaaaactcaattaatcacacgttattatcaccttattttacgtaaaatacataatttttatcttcaggagattcaaacaccatctagacattgaaaatgacacggtgcttggtagcagtcgtcgtatgtttgacacgcaaatccccttccgtagctgcatcgatctgcttggtggtagtagtatgtttttgcatcggtctgcttggtatagtagtagacagtagtacctggtctgcttgatttttaatagctctttatataatttttaatagatcattttggaatgggatatgcatatcctattctggatcaaatacactttcgtcctcgcttcgtgtaaaagggttaacccggaagtgatatgtttgaaaggaagagcacttataagttgattttacccttactaaactaataaggtggtactaaacatatgcacacaccttcatgagctatactgaccttatcctaagggcaagtgttatggtagatgtgactaccacatctaaatttatccacatcatttactcataaattaagaggcaatctatacactatgtcacctctagtacacaaataccaatgtctcttatactctcacacccctcttaaaatttgtgtggaggttgcctcttcatttaggggtggtttaccatttctctcctcacttatctcctctacctcatcactcaatccaatatggcacatttaggggcagcatatgaaacattataatacttgccctaattggccaggctatcacactggaccgcaccagaaacttcatcaaaaaggtagagaggaacaagcgctagaagagctacccctactgccatattatttgatctctctctaggcgtggaaccctgccctttttttccccatttaaacgatgattttttgtgcgtccaaaggttggggaacgctgattttttgcacgatttttgcatggtaccgtatcaatgtagaagcgttgatttttttttctcacgggattttccatcggaagtgcgcgcgattttcgttcgctatgaattgaacgaaagttaaaatatatagtgcccacacttaacaaatttgagaatttgcatgcctgaatgcccaatgtgattaggtttcagatgattacttctaatcaaatgttaatcggaacataatcttgacacaccattgcaatattgcatcgctccttaaaacagatttcttttcatgaatgcacaaaaatactatgcgtcagtatattagaagaaaatagagttttagtttcacaacgcaataaatcagatagacccttgccgcatgcaaggtaaaggaccgcgaagggaggaaaaacaagctgaaaatgctgctcctataaagagggagagaggtggtggagtaactgctgccctatgttcccaacaggtccccaaatgaagcggcactagcaagagaccaaagacgattcttctaaaggatggactccagaaccaccgagaccggcgaaagggacgaatcaaaaacactggctttccgctccttccacagctgccaggataccaggaggaccagagtgtcaaagcccttgcgaagacactttggtagacaggccctagaagacggccaccagacctaaagagagcagccatgggaaggggcgagccaacgccaaccagaagacaggacgaggcgccagacttgacgtatgaacacacagtgtaggaggatatggttcgtcgtttcaagctcctgggcgcaaaaaggatgaaccgagtgactatcgatcacgcccttttgcaggagatcggcaagcagcaagataaaacagaaaacataattagatgaacgatagccgatcggccgatagagccgatgacgtatcgtcaggacccagccgatgcagttaaaccaaatcggttgtggcttttagatgaatagataaagtgcaaaccctaaatatgccctaacggttgtaataccatctctttggtttttgtcaatcattttaagacagtattataaaaaatagtcaatagaccagtacttagagcaaaaacaaataatgtattgactaatactctaatacagacttatataaagaaatcaatctatataaacgtaccaaataacaatcgatcaccagatataaagtttaagagagatcaatctaacttgatgcatttatataaatcaatctatctatataagtggcaaatattcataaacagatcatgaaacatgcattgtcatgtatattaggtaagatcggctgaaactccgatactatccttaattatgattaactccggattagtttctatgattctaagcacggctagggatgatgcatcacaaaatacgcagagaaacataaagtcaaaacaatcaaggagttaacaacttttcgggatggtagaaccttagctaatctaatctagtaagacgatttaagccaataccgacaaaaaccctaaaacgagaatcaactgatatgactaaattgagatactaagactatattaactaagatatgtgataaaaatgaccacaataaaatgattgatacattaaaatgatataatagccccgatagcgcaagccttcaagacaagttaccacttgtcgagagatcgcagccgataccccgacttgaagcaagaactcgttggaaagtaaaagaaaagagttatctcaattgaggcccaaaccaagataaatatcctaattaatagatacaattgccttagatgagatctatctctaaacggcaatgatagttatctcaattgaggcccaaaccgagcccaagttaggctgtatcggcttcccaccagatcggctcaaccagattccgactctgtttcaagtcgatgcgtagtctgttttggcaaaaatcaatctcctttgattccgtttcgatatccaactccaaatccgagtctatcttgccaaatttcactgttaacacatgctcccccaattccgatgtgttatataacacagtggaattatctctttcagtccgcaacttgctagtgttatcctttcgactattaagcacatgtttacaaataacaaccaccaccctaaaaaatttcacaccgttacttccattttcaccgctcaagccacgcaatcttcttcaagaagctccgacgatttctccagtgttccattgatctactacgaattactttgtaccgttcaattgttttctccttttttttaatgacaggtcattgtggaggttcaaaaggaataggatacaagaaactttggtaagtttgcggtttcatgtgcaaggcaagaaattgtgcaagtttgtggctttaatgtggtatgaatgtgttgtgcaaatatgtggcatttgaactgcatatgtgaatgatgtaaattttaagatgcatatgtgctaaaatggggaatatgtgatatttggggtgcctggcatatatttgtgatgtttctgtttttcagagggcgtggctagtaaatcctgaggctagctaatattctgaatttgttttttttttcgaatttcacctcatcactgatgggtcataacaaaatccatcacaggtgacctcatctgtgacagctttgatactataccccgtcaaagatgatatacctatgacaggccgaatataatgcacccgtcacagcctcaaagataagtcacctgtggggttgcaaccacggactgcggtgtggtcatcatcacctgtgacgggctcggaaatacatgcccatcagaggtgactgatacctctaacgggcatgaaatacatgcccatcagaggtgattgatacctctaacgggcaccatcaaaggtgactgagactcaacagtgaccattagtctctgactaggcccaaaccggcccttcaaaggtgatggttaggacccatcacaggtgacctaatccggtgtagtgaggcttaccctcgtttctgtactatgttctatccggccggaaagctaatcccatgactaatttggctccaaattagttacgccgtgcattcatgcagctcgtgttgtatcagtcgttgagccattccggcggctctctttatttacttgcggtgctgatcgctgaagcaacacagaccggcccatcagcgaaccacgcgatgttttgtagccagagtttttagataaaaggtatggcaaagtataacattgcaatgcttttttttttcatttttctgttctggtccttcccttctctgttactataaaagaagccaaatgtgatggagcgccagatgcaacaagagaaacaagaagcagtcaactgaagatcccatttttatcatcaatccacttttggaagctgagaattccgttaaaaattaaaatcctctagtggtatttaacaaaggataacctagcaaaacggagatggaatggcgacgatgttgggtgctcttttgtaatcaagatgaaacgatacaacatcttttcattgattgccatatatgtggttagatgtgtttcaaatgtgtcattttcattacctttctggttcaaaccgcctcataaggttgctaacttgtttggagtttagttcaaaggtttggattaatctaggctaaaatactaaatctctttatttggattgcagctatatgttgggcgatgtggatctctagaaatggcattgtctcaatggcataaaaatcaacttcgttaattaaatgtcattttcaggaaaatatattgaatgagacagtagtctgttttattaaaagagggagaaagcatcttgatgaaagaaggttgcaaactgttggagactaccgttgtgcacttctttgctaagggttggaacatgaggaaaataattgaggggtatagtttgctggcttttcttgtttgcagccgtgtatgtcctttggtcgatgcacttcgttgttgttttgtttcgggttagagccttagtgttccctttcagttgtgatcttgggtaaagttcaaacttgtactgaaggacctcctgtgtttgtgtacagccttgttggtgtagaggccggatttgagaagaaaataaagttagtacatatagataaaaaaaaacaatttgagaagaaaataaacgtgaacgtgggctgtgaggcccatctccctgaatttggcttcgaccagaaaagagagaggaggcctacaaaacccgacataaaagtgtaaaaagtatacataaggtccctcatcttgtttccaaattacaaaattatccagaaccgaaaaaatatgtgtcatccctcaacttacaaaactgaggcactttgtggcaaaaccagatatgtgtcatccctctccgcctaaaaaggagacgaccaccttaggacttgttcggttacatgatgattcaatcctggctaggagtgacaagaatagtaagaaatttattatagatacaacgagagatcgggatttattccggaccgcatgatatggacaataatagaccgagaatcaatccactagttaagagttgtggaactaatccggatgttttattataccagtaaattggttaccgatccggaataaatcctccggcatgaggaggaggcggcggcgccgcacgcagcacgccaacagcaagacgaacaacagcacggcgtagggcggagcaatatcctccgccacacgccgacgccgggcggccatttcccagctcaccctcgccgccatgttttgcaggcttagcttttgtttcttctacctcaaaaccgggacacgttcttcttcaaggagcttccaagttccaacaatgggacctgacgcttcacgacacacgaccaccgagaactctcggaactgaaaaagagcacaaccaagatgaacttaactcttaacgacctcaagaagaccagcaccgaacctggcaatgaagttgaagggcagcaccgagacaccaagatgaccggaaaagagcagagaaccaccaagacgaacttgaacttccactaagacacacttgacggcctgaagaagagaaacacgtaccacaaagatgaacttgacgacctgaagaaaaccagcaccgaactatctctatctgagcaagttggagagcagcacgagacaccgacacgaatttgacgacatgaagagagcgcagggaaccacctgacgatgaagaagagaagcaccgcgcgccaaggcgaacttgacgacctgaagaaggccagcaccaaaacggactctttcaagcaccaccgacgggagctgaggaagaacggaatggaggacggcggcgaatggaacagagcggacgatgaaaagaaaagcctcaaaatgtaaataaaaaaaattgatgcatcccagcggcagcacgccacctatgcagcaccgctctcgatggacgacgcgtgtattacgtacggatccgacggggtgctccgctcgggtgtggcaaattggcgcggcaacgcgtgcgccagctggccccctccccccaagtgatttttttccttttctttcttttcacgatttttttttcttttctttcctttcacgatttttttaatcttcaacacatggttttcaaatgttttgtgttgaaaatttttaaatcttgacttgaaaattttcaaatctcgagttaaaagttttcaattctcggattgaaagttttcaaatatcaagttgaaacttttcaaatatgagttgaaaattttcaaaatttatctttcatatttaaatttcaagttaataaattttaaagtttaagctgaaagttttcaaatcatgagttgaatattttaaatcttagttgaaagttttcaaatcttgatcaaaagttttaaattttcagttaagagtttcaaatttctaattgaaagttttcaattttgtgttagaagtttttaaattttgagtcaaaaattttcaaaataaaatgaggttgaaacttacctagctatcttgcgaaaaaaagagaaaaaatcgcgtgagaaaaaggaaaaatcacatgagaaaaaaaattgcacgcaaaaacgaaggacggagagggagataagcacgtgtgaaaaaaaatcacgcgaaagaaaggaaaaaaagaaatgtgctactgcagtgtagagctgtaggctagagtggggcctagtggatccaaatcacgtgcgagttagtttgctcgtgcgtctgtgtgagataggattcctcgctccgcttgacttgacgcagttgcgaatataatggccaaaaggtccagggcccgacatcccgtcccatggcacgaccttttggtccggccaggcacgacatggcctaattggtgtcaagcctatgccggcccggcctgacagttgggctgagcctgggggcgctaccttggcacagtgggctggcttcgcatggcacgacacacgagggaggcgaatagacttattcagatgtgtataaggcagtccaaagaggagggaggcaatctagacttattcaagccatatatagggcacaacccaaagaggaggaatgcaaaataaacctattctaaggacgagcacagtgtgttggtcgtgcctacgtgccggcccagcatggtccgattcttataggactgtgcctaggccgtaggttgtgcccgtgggcgggcacaacctgacccggtcattaagcgggttgtgcttgcccaacttatatcgggcctaggcctggtcgtgcacgggccgggtggctcatttggtcatctgtagttgcgaatcagcatcgctcctctcgatcggctccctctgacttgcttgttccattcgaacccatcccggcttgcacacatcgacctctccccacctcctctcgaacgatccagatggccaggcgaaccccgacgccaagggcggatctactatgggcacggaggggctcaagcccccacaagcatcgttagaactatgtaagccctcactgagtttcttataaaatgagggttaaaattatgtctagtttgttcagccccacgtgttacttcttctatcctccattgtcagtgcttacaactgctccttttgcatcatgggcatcttcccgtccccggtcgtgtgggcagcattacagcaacacgagtttgtcctggaactggtactcgcccaacatagtcgccggtgatgtacgagtactacactataccgcctgctgacgctggtcgtcgtggtgttattcttggtgctggcacacgcgctctctctctctctctctctctctctctctctctctctctctctctctctctctctctctctcatgaaagcggagtgtgcatccatcaccatttgcgaagatgacctttgattattattttgtgattagaaaaaaaggctcgtgcgttgaaacgggtgaaggctattttaatcgtattattgttattttttttatctaaaaagtatatgagatttctattttgatagtattgatatctaatttagaacctttgttgggattatggtcatatactgtacgttgctttcttagggcctgacaagaattctaaagcaattagcggtactcgttccaagttagctgtgagtgttttaaaaggatttcttatacgactcctggtgcattttcaaaagtgaacgaatttaataaccaactcaaatacggacaacgtacaaagtattggcggaaacattttcaatttttataataatagagaagagatgaacaattgattttgaagataattggttttgaagattttctgatgatgaattgacctgacgatgaacaatgagttttgttagtttgggtctggtcagaccgacgtgtgttgtgcagtcaaatcggccagcccgatggtctgatcggacggctctgtgtcggttctggtttcggattgtttttttatacttgtgattaatttatgtttatgaattctagatgaatattatgcatatgtaatgctgttgtgaactaatgttaagtcaagttggagaggacttgtgctcagatattgtatcttgtttgattcatatgtaggtgtctcttaatgcctggggagagtgttactagtgattgatcgggagtcaacttggaagaagatgatgtccagacgatcaggatatcatggttggtgaagattccatatggtataccatgaagatattgtgtgcgtatggatgcggagtccaaatttggtatgattgtagtttataaagtttgtttattgtatgggaaggtttcctaggagattaggacttcttgtacaagttgggtttgtggttttagactgcttacttcgagtataaatagagagggggttgagacttcccggcatcgattttgtgcaagttgagtttagaaaaaagttagtattttgagtttagtcgagatttgtgagaggagtgttgttgttgcactttgtaaacatgagtagaagtaagttcaatctacttttgaaatatcttcaatttgtatatgcttgggttcggcggtcacaccgacagcatatgtaatgctgttgtgaactaatgttaagtcaagttggagaggacttgtgctcagatattgtatcttgtttgattcatatgtaggtgtctcttaatgcctggggagagtgttactagtgattgatcgggagtcaacttggaagaagatgatgtccagacgatcaggatatcatggttggtgaagattccatatggtataccatgaagatattgtgtgcgtatggatgcggagtccaaatttggtatgattgtagtttataaagtttgtttattgtatgggaaggtttcctaggagattaggacttcttgtacaagttgggtttgtggttttagactgcttacttcgagtataaatagagagggggttgagacttcccggcatcgattttgtgcaagttgagtttagaaaaaagttagtattttgagtttagtcgagatttgtgagaggagtgttgttgttgcactttgtaaacatgagtagaagtaagttcaatctacttttgaaatatcttcaatttgtatatgcttgggttcggcggtcacaccgacagcattgcggcagtcagaccggtggctttaaggcggttagaatggcggcaacgacaagcgacatcagcgcgatgtgcgggtagaccgaagctacttcgccaatcagaccggaggtctccgtgcggtcaaaccggtgcatctactttggtcagaccgaccttcatcgtttcgagagtaacttttaattccgctaaaagttttgatttgtgagtacctcaaccattcactcccctttggtggcttagttcttgctggcgatcttacaaacctgtgatctcctgagtgtaaccaaggatccttgatcccggtgccctggagtgaaatttccctagcgaatacacaatcgcacgaaagtagaacgaagagcacacagatgaatttggcgcaagaacttgcattctacttttcaggttttctctccttttatgagtactaaaaagaagtggctttgaggccgacgattgcgcacccacgaacgaggaattccacagcgggtccgacggaagggcattccaccacggtgccatcaggggcagtcccaaatgggactccggtagaagggggaaccaccacgacgctggtggggcaggctacggtagagtgcggtggtggtggggaagtaagtcgctgtcgggaaccaccacgacgtcggcgggggcatgttgtgctggattgcatcggcggtggggaaggacctcgccgtcaggaaccaccacggcgcctgcggtgaagtgcgtcggtggtggggaaggaccttgccgtcaggaatgaccacgacgtcggcgagggcaggatgcggtgtagcgcagcggtggcggggacaagcgaggagtcggacggagcaaggacgtgcaacggcaagtagcgcggcggcagaatcatagcgtggggaaagtgcagtggtggagtcatagctccgtcgacggctggggatgacctcggcttcggcagcggcggaagggacgaccacggctccggcggtggcggaaagggtcagccacagctccagtggcagctggggaagacctcagctccggtgggggcagcggtggagtgtgggtatggcggcggctagagaagaactcactccgacggcagcaatacacgcgaggaggaggaggtgagaggaggagcgagtactgcaaaggtgcagtcttcgtgcgaacatcttcgtgcggtgttcgcacggaggcgtagtattcgtgcggtggagatggagagggttaaatcgcggtggacggtagggatcagatcagggcaatacagatgcagatggacggcagagattacacatgttggattggaagggtaaattcttcctttttatatcttagtatagaaaagggtaataattaactatttgtcacttaccagtaacaattaaggatttgccactaagctacgagtggcaaatccttaatagccacatcttaaaagtggcaaaaagttaaatgcctctaaaaaacaggtaaaatatgttctagagatgttgtttgttataaattgataaatgataaagaataaaatggaactaggatagtcactctcccataagaacagtagaggatttcaattgagagtatccaacaaggaaaaatggcgttatgctccgatggaaataaacaaaaacttaggaggaaaaatcaccccaatcacatgattgcacacttgaatggagatttgccagtacttctggcaaacataaacgaacaaattgttcaatcatggagaacgaaaaaccagaaagttacaagtgaaaactccatattcccacaaggacttgtttaaaaaaactagaaggggttacaaaaggcacagccgtatatatcttgttgcaaagaaatagtgaattgtgtacaacagtaagaagcctgaagatcgcatcaagaaccgacatggacctgcctgtaggatgttgcaaaaagatgagggtgcaaaaggagaggcgtatctgtaaggtatctggaaactgagggaaaaagtgcaaagctggaaggacctggatgtaagaaatcagagcccaggggcatatgtgcaacgaaaatgaagaacgcaaggacctggccataattcgatatctggaaactttgagggaaaaagtgcaaagcttgaaggacctggatgtaagaaatcagagcccaggggcatatgtgcaacgaaaataacgaacaaaataccgaacgcgcaaggacctggccagaattcgcaaaaaaatttggaccatttctcgatttgtgcgtgtcatccttgcgcaggggccatgctaatcttctctgtatcgttccaattttatcggatgtctccgaagagacaagctgactacagcgcgcgggtttataagctggttccatcgtctttcggtttccgatgtggtactaaacatcccccgcaacgccaccgcgcaaaccatcggatccccatccaacggactaaagtgggtagcagcgccacccgcgcggtacggcgcgcgtgggctgcaccttccgacgcagcccaaatcaggatacggcccattagtatatattctcctcctcccagcccacatcacatgcgtttcacactttcgcctgtaatcgctcaagtagtcaagtatgagctctgtctgcacgaactgattgtcactagtgtaccatcaaactactagacgtgacttgtgataatctcagacgcttatggagtgaaacatggtaaaaaaatgcgtttatgtgcttgatcactttgatcagccttgcctccatcgtctgaaacatgataagaagacctttgttacgaaagtgtgaaacgattctgttattccttcggctatgccgtaattcaactttcacaaaatgttttcccaaaaactcgctgacagtgtcgacaacatctactgcgaacaaaccacgaataatcaaatcatgtactcaacgagtcagtaaagaaaccgtttgaagcaagtggcaaattaacactagctgaagcacgataaggattcacagagctgttattcaaaagagtaagaatgacatcaacattcacataatccgtcactccctagaacattacactcgtggaacaaaagagaaactcaagacgaggcatttacacggacaaaatccaacggaggaaagaggtgaagctacccaccatccctcttgaggttattcacttggttcacttcccttggaacttcgacaaaaagttttgaaacgaggaaaaaccctccattgcctcttgcggaagagggagcgtgaagggaggaagaactctgtgtccagccttgagatccttcgtgccagtgatagatggacgagcaagtgcaggttcctgtttattgagcatctctatgatgtatgagaaagttccgaaggtcaggcagctctgaatcattgtttgtggtgcacctggaaccaaaagaagaaaaaggaccatcagttaatgaataggtacgaaactatgatctttttgttaacattttcctatataggaagaaccgataatccgatatcactgttaatagtaatgttatcatcatgcgaataaggagctattttgtcacaggacaaaagtgtgttctcaataatgataagaaacactcatgatctcacaagaaattgtcgattttgtagtgcttcattttaccagtgcaaaaatgaagacataaatggacaactctaaatgcaaaactgtgtgcacaccaatacagcaaaagacaagaaaaatgaaatatagaacaaaaataataacaactgtagtgaaaataaacaaatatttcaggtgcatccaaaccaaattagtttaggacgcattatcaacaagataggagataaagatacaaatgcctatatgaacaaactaagggaacatgaaaatgaaaaaattgtagagattgaatcatcaaacttgaaacggatgccagagattaataactcccaaaagggctgcatgcattcttaatgaacaatgtcaggaccgtttgagatcacctattccataactcagcataatgaaaattgctcttgttgatattaataccagtcctagccaggacatccaggaacaagttgtaaatttaaacagttcacactcacagctacattgtgtgtgtaacgttacctggaaaactcagggcaaggccagtgcaacagcctgcaattccagcattgagaactgcagatataaaaggattcacaagttaatgattgtacttgacatttgattgtagtacatcctaaggattgggacatggtttcctagagaaagaaatgagcacaatagatatcaagactgaccatcatctttcccacgtagttgtctcaaagtgcaggcaaccaaactttgaacaccagcaagaacagcaaatatctagagcaaaagacaaaataatggcatgagctgtgaacaatgaaacatctgctgcaaaatgaacatgtgtaatgtgaatcattaccttagcagaagatgcagcatcagcaaacgagcctttaaaccctttagtggtgaccaaaccttttcctgtcaagttatcagaaaaggcgagttggaaaaaaatattttgtgctttggcccaaaggacaacaggcaacaggatggctaacagagtacatgaaacaaggaggaacgttgaccttacaatgaaagtctatgatccacttccatataagttccattgaaagcattaacccaagaggtaaatggtaatgaatgtgattgtaggtcaaggcattaagagtttacttaaagtttatctaagccttctggctatccacaacattcttatatggagcatgcaaggaagccatgtcaatttatactagttaaaacagtattcaagtaatctttacctattataaaagttaaaggtgtttttgccagaattttggtacgtcatccgtgtttgaaacggttttaattttatatttcggttttaatctatatctctacaagaaattcccgtcttctgtataaaagaaagaaagaaaaagtccgactcaaaaaaggtaaataaagaaagaaaagaaagtccgacataacgagcgattaaaaaaaacttcttcgtcgtcagtaaaaaaacatctcttgtccgactcctgtagaaaaaggaaaaaaaaatctcccagtaaaaaaaagtccgtttggtttttttggcaccggtattttttttcccttttttctttgcacgcaaaagacttttttacgcgcacatgctaagtcttttggttttttgtcccttttttaatccgatctgttcaccgtgcgcctcttgggtgcttttagctttttttcgtcaatcttttttgtcgccagttttttctcccatgtgctttttgtttttctcatccggttttataatcccatctgttcgccgcacgccttctgtggtgaaccttagcgccgcgccgccgccatatcgatcgtgtgttttctcctccaatttgattgaaaaaatcgattccccactcctctctcatcattttatccatgattttccctacgattgggctttaattgccagatttaatctatgttctacacttgccgatgatgacggcaatcttccccagtcagttttatcccgagttttacgctctaattttggggaaaacggaaagagtagatcgagtggatcaaaaaccctcgaccaattttggttgaccaataaagattcggccggatttgatgggtagatttgctccggcaaacgtacgggcacgggattatcttcgggggcacaggattatcttcgagaggttgaagatggtagtcatattcgggaaatttaagatggtagggtcgaagagaagcagaccaaatggagggaggtagcggactagccgctgaaaaggaaggaaggctttcggccaaaaacccaagaaatattttcattaacttttttttaattataatctatagcaatcccaatgttaagatttttattaacattttcaattatagtgtatagtgatcccaatatttcaatttattacttagctcttaatgtatcactgaaaaaagtatttacccgttgcaacgtacgggcatcttttctagttaagataaaataatcaaattttccagcaaattaaggctggaaggacattttaaacattgtttttcttacacaagtcaatgtggcccaagattgtctaaacaagagagcacaaaagtggttttgtttggttagatgtattcagttatgttggctgagttgaacagatgatcgatttgacatgatgggtagcaagctggttttagtagagtgcatataacaggaccttctgatgcaccttaatccactttgatattcttaatccatggtaagaaacttaacaaggaaacatacatgctgggagcatcaccaactaaatatatgcatctaggaggaaagtagaaacagattggatagagtgtgtgcaaccgcaacttattttggacaattaaacagtcaaacaccagcatgcacatggcccaagcaattgaaccttttggttgcatcaagccatgataataagttagcactggcagttaagtaggaaataaatgtgtcatcaactcatcatttcatcgtgtagatcaccctttacttcatattcagttttagtcaacaaagctccagctttcccctaccccaaaaaagaatagcagtactgttgaaatgtcctccaactatgaaaaatggaaccttatcatttctccaaggatggttttaaaggtgcttccagtaaaacaacacagcatagagcatggaccaacctgacttgatttacaagaaaaaaaaatatgtcgacctttttcaaaatgagatgctgtggatgtcatgtgttgaaaaaggcttgtcatatggcaatataactcaagagaacaattttttggtgtaatctgcaaaggttttaacatataagggatgaagattaaacttgaagttcagggtggaaactgtactgtagcaggagttgaaggaacaaaactgatatgttcagttagatgagttttatggttgtggacataattaagtaatatgtacatcagcaaaatatgtacaataagagaatgcacaaggagaaccaccttcatttcaaacaaaacaacaacaaaaatatcttccggggtgttatttgtctggttttgtaagtatggggtaaaagcaaccggtgagaaatagacatcgagcaaaatcaagggccaaaaagatgggctctataaaaaagaacacatatgcatgcattccaccctgtacaccacttagtatcaatcaaatttaataaaaacacaatttcagcgctggtacattcctatatacagaccctaagctaaactaaacgtctcccactcgaaccaaatgttcctggaagcctctcaaaacccatataccgcgaaactaatccaactaaaggaatttctttcaaggatggtctgattggcacaattacatagtacatacagtatatctctactagactacgagcacaaccatgcaatattgcagataacaccactattataccaccagataccaaattgttccggccgcacgcccgcaaagcgcaatagtgcaatgcacagccaacttacagcaatcacaccgaattggagtattgaattgaaggaatctaatactactaaccactcccgtctcacaggtcgcaagaaccctaacctaaccggaacgggaacagggaagggtacaagggtgtcgttaccatatccgacgacggcgccgacgagggacccagcggcggactcccacgcgaaccgcaggaggcagaccccgggcgccgcggtggccgccgcgagcgggctcgggttccgcgacaccgcgaggcggctcaggatggggttcgcgcccggcaccgccctcctccccgcccccgcccccgccctctcgtccgacgactcagcgtcggtggtgtccccgccgtccgacgagaacccgtcctcctccccttcctccttcctcctcctcgcgtcgccgccgccgctcgccatcgccgcttctcctctctctctctctctctctctctctctctctctctctcgcgtgtacgcgcgcgcgtgtggccgtagcacacgcgcggcggcgtcacgggagggtgtacgtgtcacgtgtcggtgtgctgcagtggcagggagtggtaaatagcctcctcggttgatctaataagtcaaataataaccaaaatttaaactttttgaacttgattttaaagttatttaaatatatttttaacgtatattttttattattagcttttgagccactacaaacatatatataaaaaatttaccaatagattcttttaggccctgtttggttcagcataggattattataatctagattattaggagtatcgacgggtgatacccgtagaccggatatagagggtattggggtacgttggtacaaggatctacgtagtacgacatcaagcaaccaaaagacaagaattatactggttcaagccccttgataggtaatagccctaatccagttggtatgggattatatggtggaaaatacaggttacaaagggaacgatggaacttgtcagatctggcgagattgtagtcgagttggttcgacttactctcgatgacttggctcctcgtagacttcggcttcgtaggctgtgtgggttgtattggctctgagattcgatgtcctatgccctccccgggggtcccttttatatcgcagacctggaggtttccaagtagaactcggaggtatcagaccctatacgatacatcaacgacccagttctgtccgagtaggattcttcccatctgtagatttcgtgaaaggtttccttagaatatgcaggaaatatccgcgtgcgcgtgggtatgccatatcgatatgtaacgtatatcgaagggtaaagggtatgccgaacccgtaaccctgacaaggagtaactgaaacaaacaagtagattattatgctagattattataatctatagccagattagtataatccaataatctcctctatagccagattagtataattcgcaccgtcggtagtgtgtctatttaaaggaattttgggagcccattttgaagtccgccaaccctgttgaacacacaccgcctaccagcgctctttgccttctccaccgccgcaagaaaccctagttcactaactttggcccattttccggcgatctccaaacagcaatggatctcggcaaatcggcttccaccagcgcgacgttgaagaaccttcaggaggacggcgcccttcccggccgtggaagcatggagagagaagcaggaggtactaatcctcagcccatcttgggtcacatggttgcgatcgaagattacgttctctgcggttttctccctccgccttccgagtttcttctcctggtcttgaagttctatggtctttctcttcttcatttgaatcctaattccatcgcctttcttagtatctttgttcatctctgtgaggcctacattggggtagagccttattcttgatctcttccgcttctattatgagctgcgttggatggaacccaatagagtgtctggttgcgtcgggttccgacttcgtgatggcatgaagtcgcgttatgtccccttccagtgtcctttttcccgcagcaagtggcggaacaggtggttctatcttgagatcaaggactcgaaccctgtcttcgttgttcccgaggatcaaccggacaagattccagcctggactgccaagcctcccttgaccccctctcttcagtcgtttatcgacatcatcgatgatctccaagaacggggcttgtcgggatatgaagtcgttgcagacttcgtcggtaggcggatccagccgctccaggctcgggcccatccagcctataactattccgggccggaagacgcgacccaggtttctcctcggggtatctttctcgcattcatcttgacgtgcttgcgttcgcattccgcttgacttatcgaaggttggttctcgattaacaggtctgagcagcgaagtcgtggagcggcgcgtcggccaagtgatgatcagcggcccgaccacggcgagtgacatccccgtgcccctttgtgaaaagggggcgacggaacgcgatgaagccatcaacgtaagtgtattcgataagcatcttgcattcctcctttcgaaatcaccttatgacttgattaagcataggcccttcctttgactgacatcatcgggccgctcgcgaaccatcaggtggcgacatctctgaaggagaaggttgtcaaggaggcgtctgacgcggccaccactagcggtggcaatgtcccgaccaagccgaggaaattctcgtctatactcggacatcgtcgcaaggcagcgaccccctcggtaatttaatcttgtcattagatcatgcggcaaggagggtttttccttactctgtattgattgtctttcaggcctcggacgcgtctcctccacctccacgacgacaacgcattgtgatgatcggcgagaagtaagtagatagattcctgaatttccgtgcttctcattcgagcggtgtttgacccgtggttgttcgtagggaagcgcgggcgaaggctgcacgagctaagtctggaggagcttccagcacatcacctgccgcggcctcgacagatgtcgtgcccgcagccgggagccgggaagcgacgcctagcggccccgtcagcgatcctgcgggaggtcgtggtctgccagctgccgtcctcacctgggaggagctccaagtcgagatggggcgcctcctcgaagctggtgctcgcggcatcgaccgcgagattgcggaggcgaggtcggaggcggcgacggtgaacgcgcgtgctgatcgactggtgcgcaagttggctgaagcccatgaagacctcacgaaaatgagggagctggtggccggcaacgagcgacaacggaaggggctcgaggaccgcatgtcggaactcgggaacaacctgtccaagatccggggctcgttgcgggtcacctacactggactccactagctcgccggggagtgcggcatcgagtccacaatcccagtgaatcccgatgagttctctctgacctcctcccttgcggaactggcgacggcgatgggggagatcccctccaagcatgcagccaggatcgcggaggagacgtcgaacgggatctacaccggggcgtgtcatgtcctcgcgtgtgtaaggctgtcgcatcctgaactcgatctgcgcgagatcttggatcagggggcggcaagcaacacgcgtaaggaggtgatggaagaagtcggtgatctgggggagtctgttctccccctttttgaagagtaggacttcttgtatttgttagataatgtgtaaaaattgaactctgaccgccttcgtgcgtgcaattaccatccttgtttagttttgtatgttgatctcggaagcttttgtccattgtagagatgctgatgacgaggatgtccagcagcgcgggcagcccgagtcactggcgataattccggtactcgagcttgaaccacacatctcgcctgacaatgtggatcaaacccttggtgcggaggccgggatagcgacgactacctcaagtgagtagccccttcacctcttagtgacctcctgattaggtcatccatgttccaaaagaggtatccagcttgtcttagtggttgtcacgtttagcagatctcgaggatgcccttgaaagccaagatcgtcgtatccaatactggaagacgaagtttgaagtggcggaactcgagagaaccatgctggccgtgaagaaagagcaggctgtggaaacgctccgaggtcgcgaggtgtggtttaactcgtacttgaagagttgctgcacctccatggccagagtatgcagggaacttcgagtagtccgcggtgatcccgaggagtcggcggccgggtacatctcgtggctgaacggggcttgtgcccaactcgatggcatcggcaagcgtatcgacgaggccttgaaacatgagtgtcgtcgagcgagctgatacgccggaggacacgtgctggcttgcctacgagatcaccgcccgcgcctggacctcgaatttctccgcgaaggttttgctcgttctcagagaactctggcggagatagaccatctggtgaggtcgatgtcgccattggccgagaagatcttccagtttatgaactggcgttggccttcttggtagtactcgtaccctgcgacaaatatcttagggaaagatgtaatgcagcgagagatttatgtaaaaactgtaagaagtactttgtgaataaagaaatctatctttaacaaatgtttcttactctagatgtcgtgtgtaacagtgtgttctcagttaacgactttagtcagccgtttgagtcgtacactctccctagcccccagccttgtcgtcgggggaattttctcggaggataaggctcttggacccttgacctgccttggttgaataagctctgatcctagcccccagtcgtaaagttggaaaattgatttccgatttcacggcttggttaatacgcacggcgagaactcttacacgaccagatcttacatggtctttcgtctctacaggatctgacaaggccttatcggctctgggcgtccccagccgaagatcccttaggttcctcgcaggccttgtcgagacggcataaagggacataagggcaggtttcaacgctaggtgtcatcagagtaagggatcatcaggcgaaaacacattgattgtgatatgggcctagatataggctttattgatactataagggtacttacaggtacggtggtattgactcatacatagaatttacatagttggtcaatgttccaagaatttgctaattcgcgaccgtcgccgtctgcgatttggaatgcgcctggccgcaagacttgtgtgatcatgtaaggtccttcccattttggtgagagtttgtttcgccctgcttgggtttgaactcgtctgaggacatagtcgtcgatcgaaagtatgcgtgctcggatacgcttctcgtgataacggcggagggcctgttgatagctggctgctcgaacggcaactcgttcacgatgctcctcgagaagatttacatcgatgtctcgctgctcctcctggttctcgtcggagtacttctatactcgtgtactctggtgtcgtagctcgccggggagcatggcctcagagccgtacacgaggaagaagggtgtttccttattggacgttgtcggtgtggtgcgtacggcccatagtactgacgggagttcttcaacccactttttgtcgtgtgacatgagcctgtcgtagacgcgggttttcatcccttgtagtactatgtcgtttgcgctctcgacttgtccgttgctttgagggtgagagaccgaggcgaagcatattttgacccccagggcgatgcagtaatcctggaaatcagcgctgatgaactgggagccgttgtcggttatgatgcggtgcggtagtccgtatctgcagaatatccctttgatgaatttgatggcgttgtcggccttgatttcccccgtgggtactgcttcgatccattttgtgaatttgtcgatcgccacgaataggaatttgtagccgccctgtcctcgtgggaatggcccgagtatatctagcccccagcatgagaactgccaagtcagagggatagtctggagcgcttgtgcgggtatctttgtgtgtttactgtggaattgacaggcttcgcatcgctggaccatgtcgcatgcatctttaagggcggttggccagaaaaagccttgtcgaaaagctttgccgaccaatgtccgaccagcggcgtgtgacccacatatgccttcatgtatgtcgaggaggaggtgtctgccgtcgtcggtagagacgcatttgagaagtaccccgtttggcgcttttttgtatagatcgttgccgatcatacagtagatctttgctttacgggttattttctcggcctctgtatcgtcctcgggcaactcctcgctgctaatgaatttgattagtgggatgcgccagtcgtctgtggtttcgatgtcggcaacggcgtgttctgcctcggtgacctccgagccaatgtcgggggtgttcgggctatcttcgtcgctaaccttttccaccgatggcttcgtcaggatatcgagaaaagtaccgggctcgagcggttctcgtctggacgcgcgtcgtgctaggtcgtctggctcgacattgtccttgcggtagatgtgtcggacctcgatcccatcgaaccttttctctagcttcctgacttctgcgagatacttggataactcggggttagagcatttataatctttgtgcacctggttcgcgactagctcggagtcccctttgacgattagtcgcttggccccaagtgcagttgcggctcgtatcccggcgagtaatccttcgtattctgcagtgttattggttgccctgaagttgaggtggattgcgtgtttgaattgatctccgaagggagacgtcaagataaatcctgcccctgctccttggctgttgagtgcgccatcgaacgccattgtccatgtttcgttgtcgccttggttatctgatttgttatctggcatagtccaatcggcgacgaagtcggcgagtacctgggacttgatggctgtttgtggtacaaagtggacatcaaactggctcagctcgactacccatttcgcaatgcggccgacaacgtctttgtttctcacaacttcgccaagggggcaagaggagacaactgtgacactgtgggcttgaaagtagtggcgcagcttccttgatgtcataatgactgcataaagcagcttttggatctgtgggtatcttgtctttgcatcatggagagcttcgctgatgtaataaactggtcgctgtacttctctctctcgacaacaatgacagtgctaacggaatatggcgtggcggcaatatagaggaataattcttcattaggttggggagcaacaagtacaggggggtttgataggtagcgcttgagtgcaatgaatgcctcttcggcttcccgtgtccatacaaatttgtcttgtttcttcagcaaggcgaagaaaggttatcctcgttctcccatcctggcgacaaacctgcttagcgctgccatgcatccggttagcttttgtacctccttgagtcttgtgggcgacttcatgttctcaattgctttgatcttctcgggatttgcttctattcctctgccagagacaaggaatccgagtagcttgcccgacggtactccgaacgtgcacttctcaggattgagcatgaggcgatatcgtcgaaggttgtcgaacgtttcccatagatcgtcaatcaatgagtcgcctgtcttggttttgacaacgatgtcgtcgacgtaagccttgacattgttgccaagctggtcgctaagtgcgccctggatcgtgcgctggaaagtattcccggcggttatcagtccgaacggcatcttaacatagcaaaatactccgaacggcgtgatgaatgctgtcttctcttcgtcctcttttgccatgctgatttggtggtagccagagtaagcgttgaggaagctcaatagctcgcaaccggctgttgaatccaccagttgatctattcgagggagaggaaagtgatccttggggcacgccttgttgaggtcggtgaagtcgacacacattctccattttccgttggccttccgcaccatgactggattggctagccactttggatgaagtacttctctgatgaagccagctttgagaagtttgtcaagctcttctcgtatggcttgttttcggtctggtgcaaatctccgcagtctttgctttactagcttggcatcgggtcgtaccatgagtttgtgctcaatcaccttcctggggacccccggcatgtcggacggctgccaagcgaacacgtcggcattatcgcggaggaaggtgatgagcgcgagtttctatttctcgtttagtgtcgccccgatcttaacggttttgtcggggttggcactggagagtggaacgaccttgatggcgccgtccggcttcggcgtcttgtttgtcttgctcactttcttgggtggctcagtcgtggcggatgggctgggcgtttgctcgaccatgtcgaggctccgcttgtcacactgcaccgctagctttgcgttcccccgaatagtgattgttcccttcggtcccggcatcttgagcacttgatacacgtagtgaaatgcggccatgaacttcacaagtgcagttctcccgatgatggcgttgcaagctgtatcgaattcaacgacatcgaaggtaatctgctctgttcggaaattgttggcttggccgaaagtcacgggcaacgtaatcttgcccaaaggtctggacgatgattggggagtaattccatggaagggttgatcagttggtgtcaactcgctttgcggaattcccgttgcgtccaaagtgctggcgaagagaagattgattgagctgcccccgtcgatgagaactcgcgctaccttgatgttccgaatggtgggttcgaccatgattggatatcgtcctgggataacggcggtcttggggtggtcttcttccgagaactctatcttctgctcagaccacttcatcttgggtgcagccccctgccatgtggagcagacttcacgttccactttcttgtattctcgtttggaggagtacgttgtagaactgccgaagatgtgtgagacgtggaggtcggagtctggatacgctgaatccgattcattaggagccgtctcttcgttcttctcgacaacacgtactcgcttgcctttttcaaatgccatgtgcttctcgagcgactttttaaaaacaaggcaatcttctagagaatgtctgtccgtcttgtgtatggggcaccatgatttctttgtgtcgctgccttgtgggtctgggcgcttgggagggttcgcgtattctgctgcgaggacttccgcttgagctttccttttcccatttttgcgatttttcttcttgcttgactcagatgcgtctgtggctggtttcttcactccccccggtcttcggcatgtcgttcttgcgccttagcgcatcatccgcgtgggcgcatcgctcgacgatctcgaataatctccgagtggttgtgatgcgtcttgtcgccaactcctaggtagtgtagcgatctctgacaccggatttgaaggcacgaattacagaagcgtcggtgatttcaggaattgtgtttctgcactcgttgaaacgtcgaacatattccctcaatgattcacccgagttttgtgtcaacgcgtgtaggtcgtcttcgatcgcgtggcgcttgtatgttccttggaaattggcgacgaattgttgccacaggtctgcccacgaagagattgagtagggaggaatatgcatcagccatgaacgtgcagaacccttcaatgcggttggtaaatagttcgctaacgcgttgtcgtctgctccggcagcataaagtactgtggagtagacttgaaggaactcctctgggtcggtgctcccatcatacttttctattgctccgggtcggaatctctcaggccatcggacatcacgtagggaacgaccgaaagccctacacccagcgttgggggcggtgggttgtcggcggtcgtgtgtctttcgtggatgtctgtctgacgatgaggaggacgctgatgatgacgatgacgatgggtcacttggttccgacgtacgattatgaggatgacggcctggatctcgggaatcctgtcgtcgtctcccgctgttgtctcggcaccgatctccatcatcatcgtcgttacggcgcgggcatgaccagtattgtctggcccccgtcgttcgcgatcgttgcgatcgtggtggttgtcgtggtcccggtcctcgtttgagcggtctcctcgatttccgttatcatggcgccgtgaggagacatgacgccgagagcgatccacgttgtctcgtgtgagtcgtgcttctcggcggccgttgatttgatctcgaagatcgccagtgccgcgaggtggaggggtagctcgttgaggggattccctctgttacggatcttcaccattggcatcgccagttggtggctgctcctggtgtgctgcggtagcggcttcttcaaacgcattgctgaggttagtcacagattcccgtagtcgttctgtccaacactcgaggtcatcgttcagaacgggatcgtaaggagtttccctcagtatagcttgaacggccctgatgtgttgggctggtgtagtcgattgatttgccgcttctgcgttggcgtgcgctgacgtgccaacgtcatcgatagccaatacctcccgcggtgcgctcgttatcgatgacccatagtcctcgagaagatgtaagaccgatggtttgtgaggatcgatatcgattaccccaacgaatcgatctgaggttggagttgctccttgttccttgccgttatccctgatgggggcatatgacttaggagatggagctttcatggcgccgaggaagactttgcagctcgagaggtcgtgattctttgtcttgtgaataggacaatagacatcccgagttggagaagtgcgctgaattccacgttctttgcaggcgcgaatttcagcacagacgttgaggaaaacccagcaatcttgcagagtgtgtttcttggttttgtggataggacaccaagaccttgtggcttcggaagtcatctttgtcggctcgcggttcatgtcggaaagacaaggtttgaccgtatcagaatccttctcgagcttggatgttgtcgatgttccgttcttcgtttcaacgggaggatttttcgacatggagtcgccttggttcgtagccactgcgttctcgtttccggtcattgggggaccggttgagatcagcgtcgtggtgtaaaccgggaagacgatttcgccaacttgagtccataccagcattgttgaagcagggagtacttggctgaggctggtgttgacgttgttgtcgacgaagctggatgacatagtagtagaaccttgagtaccaagtgtccctacctggcgcgccactatcgacgggtgatacccgtagaccgggtatagagggtattggggtacgttggtacaaggatctacgtagtacgacatcaagcaaccaaaagacaagaattatactagttcaggccccttgataggtaatagccctaatccagttggtatgggattatatggtggaaaacacaggttacaaagggaacgatggaacttatcagatccggcgagattgtagtcgagttggttcgacttactctcgatgacttggctcttcgtagactccggcttcgtaggctgtgtgggttgtgttggctctgagattcaatgtcctatgccctccccgggggtcccttttatatcgcagatctagaggtctctaagtagaactcggaggtatcagaccctatacgatacgtcaacgacccagttctgtccgagtaggattcttcccatctgtagatttcgtgaaaggtttccttacaggaaatatccgcgtgcgcgtgagtatgctatatcgatatgtaacgtatatcgaagggtaaagggtatgccgaacctgtaaccctgacaaggagtaactgaaacaaacaagtagattattatgctagattattataatctatagccagattagtataatccaataatctcctctagaggaggtttttttcagattattgagtggctgaagacccactacccttagatgcatctaataatccaaagaaacaaacaactcacaacttattctatgtcagcttattataatctagcttagagtaatctgatttaataatctagattacaataatcttaaactgaaacaaacagtatcttggcatatcagggaatacggatgatccatggggtaaaattttctggtaaatccaagtgaggggggtggctgtgactgcaggtgggcccgggactgggtcggcggggattctctgcggccgggtggagtacggcgctattcggtggcggctcttcggttaaaaatgttttttattactttttaattaaaaaccgtttttggcgagtgttgcactgttgccttgcccttttgtgttgttgaaaagatgtgaaccgttcttcttccgagcaagttggacatgtttctcgatggataacacaagtgggggttatcatctactatttgatttggaactagttactagctgggttggtgttctctaggagaaaaacatactgtggtgctttttttaattagcaaatcacacatagggataaggagaatgtatgatatatactcgagttaattttgaagagaaacccaaaaaataagttagacgtatgtttcaaagataatttcaaatgtcaccgattgatattggaatatatttaaggagcatgtagctataccataagatgtacttcccccgtttcacaatg

SEQ ID NO: 25696 - DNA, 33234 bp, Oryza sativa
  unsure (1)..(33234): unsure at all n locations
cttacattgtgaaacggaggaagtaattgtgatttgcggctgataaccataagaaccaatactcggctatctttcgacgccttaagtcctcaataatttatatgttggaaatgtaatgtaagctcatatggatttgttttatttaataaataaatcatgacgacgtgaagatcaactatcacaatcatatcatgtaagtatattctacacatggagtacatggacatatcaaacataattgacaaaattctccctctccagatgcatgatgtagaagttgatggtttcggagacctactctcccgaacatcggtgcagggctgcatgcagcatgctgatgagcagattgcaaatcctaaaatatttttcacatactccttttttgtgtgtagatagcgcctgtttgtgctcttgaaaagatgtgaactgttccaagcatgttggacatgtttctcgatggataaaacaagtgggattcttgtgtgtttgatctggactagttgggatggtgttctcgataaaaaaaaaacgtaacattttcatgatcaaaccacatagggttaaggaggaagtacatgatttagtggaattaatttatatccagtagaaaacatcagagtattcatgtatatttcaaacataatttgtaatcgataaatgttggaatatctcggaaaaacatgtcacaaatttaataccatgggatgctagttctgatctatgacagagcaaccaatacttagctatgtgtttgaagccttgagagtccatattgatttggcgaattttgctacgaaaatcatgatttcgcagctttacttgcaggatatgcaccgttaaagtcacgatatcttttggcaaattttgcctattgatttgtactttacatatattggctttaattgtggaccgataagccctagaaaactaacgaagcaaccatcaaatatttatgtataatatttttacatatctgttagcggtttgaatgctaatactgaaaaatagactactgtgaaaaaacaaatctactccaaaatcaacttttaaaattcgaaatttagttgtggataataaacgagtgaacgagtttgctaaaagtttattgtgtaggaaaaagaggatgtgagggatgatcaatagctagaaaattgatgaatagtagtgctgaaaaatactggtccgtaaatagggagtttatatgtaagatttcaaacatattggtgacatggacaagataggacgataagaatcgaatatatatctcataaagctgatacccttcttaaaaaaaaactcataaagctgatgcgatgtagaatcctaacggcaagaatgacataatttcatctacgaaaactcacagatgtcctaatcatacttgcaatatggctaaaaagccaataaagccgtgagagaaatttcccaagctagctacagtactagctagctttagcaaatatatatactatgatggtatgatatctcctaaaagcgtgctttatattattgatagtgaaatatgtatcacatttgttgaataacatttttataagtccttaaccaactgatcatcgaaagaattgcgtcacgctgttactacagaagcataatgacaacatatcaaacaactatcaaatgagctattaattagcatcgtgtcggcaagataaagtccctagggtacaaccaaaatgataggtccccaaagtacgaatcggatgatatgtcagtttgtttattttgtctaaccatatatccatccgcctaatgccaccggatcttttaggctctttcaaatagatgatttgaaaaaaaaaatagaacaatataaaaaaagattttagtagaaatataagtatgaatcagaggattgcaagacacataaatattcgtttgattaggttgtatgaaaaacacagaaataaaataagagaaataaactcaaagaaaattttataaaatattggagctcttgataactttcctttataaaatctttataagattgtctatttcatttaaatttgaaaggtatgataggatttaatcttttatttcaaatgtttttgtagaaaattttcttatagaattataatcctttaaattctaaaatgattaaacttaagccatatataatcacactgtacactgattttcagactttttaactggaaatttgatgatgtaaattcttcatagattcaatcatgattatcttaatctaatcacatcgataccgcgtgatgtgttttgattctttaaaaacgaaaggcgacatgtgaaagaaattatagcatcatatgttatctatatttcctaataagccaaaacgacttaagaaataaaaattaatttgtaggtaaaacttttatatatttgctcgtgccaacttaaaagtcaatgttaaaaaatacgttgaaaatatctaaaagttaactttgaaatcaagttaaaaaaatattaaaatttagcttttttttcttcgactattaggtcaaaccgatgggactctcggtggcgacgcaaaccttttgagaggtgagacgaggccctgtcacgtaaaactccaaaacctcagggtcccatctgcacaagtaccctcccatccagcaggccccaccacaaaatcctttttctttttttcattttttctgtgcttttttcttcctccttttttcacagtggcttgcatctgtcaccctcccgagctccccactcgtctccacctccccgcgatcccctcctccactcccccccgcgcgctcccatcaagaggagagagagtgagaggaggtagctctgccaccggagcggctgcggggagcggcggcagtgctcctccttccggggagatcggggtcgctggttggatccaagaaacggtagctttcgggggttggttcttgtttttgggggaatctttcggttggggagtgagttggctgatctgtgtgtgtgtgtgtgcaggggagggggatttgctggcggggaggagccgagtagggagatgagccgggggcggtcgccggagccgctggatttcttcatctggacagtcgaggtacgctcacctgtggactccctcccgtcttcttcttcttcttcttcttctttttctgattttctccaccgactaatttgtgttttggatgctgatttcgcggaaatttaggggctctctcgtcgccgcatttcagctaggtggggctttagttcgggggaattttttggtaggggattgggggggaacatttgatatgattggtctttcagtttgcagttgttcagtcagttcttagctttagtagattgcttgttcggatttgagggtggactcgtgggggccaaatttggaggtacattttttatatgctgttaattgccagactttttcgtaggcagttcataagcggttactgcggttagtataaatcttttatgtgattttgtaataaagttccctgtacttcctgcatatcttatgcttttgttcgaggtttcacttgttttgcacttgtcattcagtaaatcattgatcgtttagctttataaagcttgtgatgggttctattgtgttgatgccattgtgctggggtgcaaggaaaaccatcagaccatacaagatacatgtgtttcatgcatttgtttgcgagcttttcgttggcctagtgaatgctgttacattaagttcagttaactggggcgctcttttgctttgtattacaatcgcgaatataatatacttttttggcacaatatgggataatacatccattgtatgatactgatttgtgttgcaatgggcataaatgcaaccttttagacatctatatactgtctgactgcatatattacctcttatcttgagctagaacgcctaaacaaaggataactagtttgattgtaaatattgcagtgcaatagttcggattttatcttgttagaaattgggcctatgtgcaattcagttcaagccctgctaaatttgtagcaacctgaacctccaacatagcccctgctaagacaaagtttgattaaggactaacctagaaggctagcccaagtttaattcatgatgaggagcagcccagaccagattttaactcttgtcgaactcaagatatgtttagtattacttggttgagtattgctctgttggctgaaattgcgctcaactttaaacaagagagagatttacaagcagctaactcatgtggtgagctggttctccataaatatctttgtcactaaccatctaaagtattaatccctctgttcctaaatattagcatttcaagtttgtttagcaaatactaaggttgaggtaaaagattccctttcagtcacatcagtgtcagatttgaattgcttggattacctttctaagcacctgattggttgaaaaatggctagattcccatgcattggaatcagtatcctagaaatgcttatatcgtgtacaataattgaaacttagagatgcttatatttgggaacggagggagtattatttatcatttaaagttgaggacagctgtgctcaatcatgaacaatgtatcttcacatgcatatgtaggtacatgcactgtacagcctatccaaagttttccaagattcatccaaatgcattataataaataaaagacgggctgattggtttgaattgaaatggatctgtttcgaggcacattgacggtggtgaataatacttgaattttcatgtgcatcaattgaaatgttcctttcattacaatggaatacttcctccgtttcatattataagactttctagcattgcctacattcatatatatgttaatgaatctagacatatatgtgtgcctagattcattaacatctatatgaatgtgggcaatgctagaaagtcttataacctgaaacggaggtagtacaacttttcataagggttgcatgtgttatctaacacaagcaggtttagcataatgtttaaaccatatctaccatgccttttaattttcatgtgcctatgctttctcttttcgctctttgttctttttgtcattcatatctatgtgggttttggttcctgtaaaattgaaaagggcatcttagtttcatttaatcattttaaggatctcatcacgcggtgatatttactctgaaatagtgttttcatttgatccttatgttttggcaatctgtttttgttctaactgactaacttgatatttacctattcgcagttttgaacatatagcagttagtgtcatgtgcatgatcgaaagggcatgttacctcaaggtgcttaatatttacctaagattatcaattctctttcaggatgttggattatggcttgaagagataaaccttggcagctacaggcaagtttttgaggaaaacggtgtcaatggagagtatcttgaaagcctgtcgatgtttactacagaacagattctgcggtttatcaggaggtgccatatgaaatggggagatttcattacattgtgcaaagagttgaggcgcatcaaaggtttgtatatttctgtgccttagcctttagtacgaaggaataaccataacacatttctactactctaaaagcattttgctgctacatattttaccttttgtttctcatttgattttatgatgtgccaagcagtcgtcataatcaaattctcttttcctttcactaatgccatgctttatgtcaaattcgaaaccaatcaaaatactagttgattgaagtggttgaaggtcactgttttaacttttacccctcaaaagtttttgatggtgctatgcaaattgattccttttattttgttttgatgtaaatatgaagcacaaatagataaaaaaccatgatccaattatcaacatatattgcattattcaaaagtcaactttgactaagcatcaatattacctcaaaacatgctgtgtgcctggttaattatgaatacatatcttcggaatgttggctgaatggatgattatgccgaatagtattattgtgcaagcactttaggaataatggggatgaggatactagcaaaaggtgattgtgattggatctggtccgcgtcaatagtactttgaattatgctgcatgttttgctaattatgaatggatatctttggaatgttggttgattatgtcgaacaacatcgttgcacaagcacttggggataattgggatactggcaaattagcaaaaggtgattgtgattggatctggtcccatccttaccatcacttcgatctacttttggattctagcatggcactgatgggtattgtagaccaatatgtaagactgaatctagaaatacacccttgttacaccattgaacttgtctgatggattaatgaacttgccatacaagtctgcaaactttcggcattctttgaagagttctttctttctcttttggttcttgtagacagtttaagatgccatgattgcacacagatattgatatgtacttctaactgctcaattggttggtgttttggcactgaatgtttatttacctgacgcctgcaaaatctaatctccagtggcctgcctgaaaggggagcaagaagtccgcaggccatggtgggcgccgtcatgcctatcggtggtgttcgtgagggcggccaagcggaaccggcagtcccgagtcgtctccctgaagctggagccctagtacccatccaccgcctcaaatctttgcgcattcgccgttctaccccgccttccagctcctcttggtggaggcggcactgcaaccgcacaccgttggtgtgctagttcccagtgatatgaaaggtcttttgctgtgaagagcagaagtatgctgctctactatgttcaaccggtcctcttatccttttttttcttgatctgttttaatcatgatatatagggtttggaatagtaaccttggtgtagacaaacaagatacatatattgtgcagatggttccccttaaaagtttctgctgcttgcaagtcagtctgagcttgttctagtaggtatttttatcttgtgaaagattgatccccctagagatcttgatcaatctgcagaaaatgcagatgttttatttggtgttggtaaaaaaaaaaacactactacttccaacatttcttttatttgatgacattgtagaattagaatctgtctggtcaatcactcaaaaactttgcatcattgatacttttcaatttacatgaacaagggagaaccgcatcactaaaacttccattaggaatacttctgtaaaatttatcatttgtataaattttactgatgtctttgttatgaaaaagatatccctggtggttatatgtatctagacctggcccttgggcgtgtacattgtatctgtacaatgtagcaggagtacacgtgtatccagaaccttctgccgtatccaagcaagaggtgtgcagtgactgacaggtgggccgcattaaaagcaggcccacttgtcagccgtaatcctcctcttgctagccttctggattctggaaccttctcccacggggtggaccccacatgtcatcgtctcaaaacagttacgctggactttaccgcaggtgcacctagcatctccgcgacgagccaatccagaaccttctccccccaaaaaccctcggccactcgtccgccctctcactgacagtggggcccacgcggtggggccacaaggtcagtgacccgtagtaaccccccatcttcttgctccgcaaggcgcacgccatttatacgcctccgtcctccgtcgcgccgcccccacaaaaaccctaccgccgcccccaaaaccctcgcctcgccgtcgccgccgccgccgccgttgctgtctcccctcggcgaatccacggtagctctcccgctccccctcctcggtggtaggagtagcggaggagatgctcggggcctcgaggcgttccgtctgcaccgccgcggcggcggcggcggccgggtcacgccgccgcgccgccgccggcgtcgcctccgccgtttccggggattcctccgtctcgtcttcctcggcgcccccacgctcggtacgtgccatctccggccttgactttctctacggctgcggctgtttcgggctggttgcgggttcagagggaaaatgtgggggctggtcgtgatcgcaaattagcggaaattgagtggtgcttaatctgtatagtactcttgttcgcccattacgtggtatcaatttgagttaattttgcggtgtgtgttaattcaagctaattcgttggtttaagttcatcttgttgattgtgatatttaatagtcgattgggggaatcattagatttttactgtctgattgattgtttgaattgagtcgagcctttgagcttctgtatgtgatactcacaacccacatgtatcgtccgattctcaggtgattaatggggagcctggtgtccctcagcttcagaagaggttgctctctgtgcttgctgcgcccaagcttaccgggaccgacaatgctgcctccctcaagctgagggagggttcccttgttggcaggcgatatgaatcgagtgctgcagcagttgattcttctgatacgccacctgtggagaagcatgagtaccaggcagaggtaactactggagcaatggctaatgttttatttttcttaatcaatctcgtgttaccaacggtgtcatgatattgtccaatgtgcatggcaggtcaataggctcatggacttgattgttcacagcttgtatagcaacaaggaggtgtttcttcgagagcttgtcaggtgggtgtcattcaagaacataagttgttcactaattgaagtttgtactaatcatcatcttggtttactcttgtgcgtttagtttgatctctatggtttaattttttttaatttcttcatcgtgtatctgtttgcagcaatgcaagtgatgcacttgataagttgcggtatcttagtgtcactgatcctgatcttataaaggatggtgctggtcttgacattcgcatccaaacagataaggagaatggaataataccaatcacgtaagtattagttacttgatcaattatgtggctcctttcttgcaaactcatgcctgcatttgctcctttttatctttagtgatactgggattggtatgacgaggcaagaacttgttgattctcttggaactatagcgagcagtggaactgccaaattccttaaggcactaaaggtgtgttccatttgcactttgctgatgttaccttcatgtccttatttttctttgtttcttatcctgtcatattactaatcttaagtattattatataataggagagccaagaggctggtgttgacagcaacttgattggtcaatttggtgttggattctattctgcgtttcttgtttctgataaggtaagatgctatcgtgattgtctttaattagaaggttaatagctggctgttaatgacctagtgtttatttcccattgtccttggctgacatgttaatatttcatgaatattatttattttgtctaataggttgcagtgtcaactaagagcccaaaatctgacaagcaatatgtttgggaaggcgaggcagaatctagttcttacaccattagagaggagacagacccagagaagctccttcctaggggaactcgccttactctgtaccttaaggtctatttgcttattttgatatcatccaactcattttatacatgacctgtttctaactacaattcttggtattgtttcagcgtgaggacaagggtttcgcacaccctgagaagattcagaaacttgtgaagaattactcacagtttgtttccttccctatttatacttggcaagagaaaggttacacaaaagaggtgaatgctcttcctttgttaattattttttattggaccaatgcatcaatttaattgtggcatattttgctcttttaggttgaggtcgatgaacctgttaaagctaaagaaggcgacgatgagactaacacagaggtaactgtgatatgcttttctgccaagataaatctgttatacttaatacttgtgcataattgtattaccatgatattaacaggttaagaaaaagacaaaaacagttgttgagaagtactgggattgggagcttacaaatgaaacacaacctatatgggtgagatttgatctgttcagtgtgctaatatgtttttattaatgaatgcacccatcacttattgaaaatatgaaggttccaaaaaaaaactgaagctttttttttcattctctgtttatgggagcttcggaaccctagagaggtatcaactgaggagtacaatgagttttacaagaagacattcaatgagtacatggatcccttagcatcctcacactttactacagaggtatgtctgattgcatttgattagttatcagttgattctttctttttgtcaattgaaccagaatcaaggttgatataggtagcagtgcagttattttgatgatatgttcattgtgcatgactattctatgaagacaagttttttttcatgcttatacatttgacaaatttaaccaaacttgcgatatcacagtattctgtaactgctgtgaccaaattaatatcttcatactattctttcacaaagagtcaaagacacacgagtgctattcatcaggcaaacatatttatatacaggaacagataatagttcatccttcgttaacactaactcagctggtaaagttatgtaatacatgtctattgctgcatatgcgactcttcatttcaattatggtggttctattcaaatatttttttggatatccacaagcatgcgaatgtttggttttgtaacattgtattgcattattcagtgaaaatgatattgtgatcagtgcggcaaagatgccaaactggttcatctttttggttagaattgcaccgatctccatgtgatagttcatttatcttcatggattggcaccaatatagcacatctgtctatctcacggtaaaactgtgcctgattgcacttcacaggctcacttggctgtgtttgattttattcatgcagggggaagtagaattcagatctattctctatgtgcctgctacaaagaaggaggatataactgataggaagaccaaaaatatcaggctttatgttaagcgcgtgtttatatcagacgactttgatggggaactggtatgcttaatacacagcagctcttcatgattctttgtcaagttttagataaccatggaaatctgacaataaaaaaatgttattgatcagttcccaagatacctgagctttgtgaggggtgttgttgactcaaatgaccttccattaaatgtttctcgtgagatcctgcaagaaagccgaattgtaagtgttaatgaatggttttctgtctatgtcttgtacatttctatcatgatcttctaacattgatttatctttcctttttttttccttcttgtttgttacaggtgcgtataatgagaaagaggttggtgcgaaaggcctttgatatgatacttggcatctcttgtagcgaaaacagagatgtaagttgtttactttccttttgtgcatgatgcctctgttctctcccttatccttcagtagttcagttctcacctgaaatttactgtaggactatgaaaggttctgggaaaactatggcaagttcttaaagctgggttgcatggaagacaaggaaaatcacaagagaattgctcctttgctccgattcttttcttctcaaagcaatgaagaattaattagcttggatgaatacgtggaaaatatgaaacctgagcaaaaggacatttactacattgctgcggacagtttgagtagtgcaaaacatgctcctttcctggagaagctcaatgaaaaagagtacgaggtatgtactgtgaatagcttaccatgtttgcagacacatgatcatatttcttaattatattttgctattggattctgggctttattgaatgcattcattgcccatgcaaactttgccctgaaaggcaaatatagtttactggccttcagggcctgttgaatttcatagttgagatgccttatattttcccaaatattggaacaaacatgcttgtttttgctactatctcactgacatctagccatctagaaggcttaagccggagaacccaatggcaaaaacagtgttgcagtactgctgaatggcaaaaacaaagtttctgtatttgtttacatgtcttactgattaatgcttttacccagaaatgagttgattcacttcatcacttgtttcctttttgtgacggttctaacttgtgtatattttgtaggttctatttttagtgacccaatggatgaagtgtctgtcacaaatctgaacttcctacaaaaggggggggggaatagcgttcgtgatttagcaggaagactggactttgtatgcatacacaatctttgaaacctncttctactgctgaatgagatgagtttgaaaatagttgttgtgctcgcatgagaattatattgtccttcattatggcaagacttgtttatatttcacccttttaatataatgaatagagccctgtatgtcttgtttggatggtgggggtaggcaatgtcttaaccttgcagaattgggacaattacctcatttcagtcgtgtaaatcttttttcctgatttctgattttcatctataatgtaacttaggtgataagaatgaggaaaaagagaaggagatcaagcaggaatacagccaaacatgtgactggatcaagaaacgcttgggtgaaaaggttgctcgagttgatatatcaaaccgtctcagctcatcaccatgtgttctagttgcagctaagtttggttggtctgcgaacatggaaaggttagtctctatcatgttgacctttctagcacataattcttgtaacttaaagttcttaatagtattgttgtgttaacaggttgatgagagcgcaatctatgggtgacatgtcatctctggatttcatgcgttctaggaaagtttttgaaatcaacccatagcatgagatcatcaagggcttgaatgtaagtgttcggtctgctgtttgcacttcgcgcttgtaatttcctgatagtccttatgggttcctttttcctcctcaatgcaggctgcctgcagagccaaccctgatgacccagaagctctaaaggctgtagatatcctgtttgaaacttctatgatctctagtggctttacagtaagtacacctgattgccttcttttccatcaaataaccctggtccatttgatatgataggatattccgccttaccgttgtgcatgttttctatactgaatgtcgtaatctgtttaaatttcatcaatttgtgtcatctcatttgtggtatcatattgcagcctgacaaccctgccgagctaagtgggaagatatatgagatgatgagcacagctatggccagcaagtgggcctcgcacgctcaacccgctgagatgaacctgcagcgagactcacctgtcagctctgagccgattgaagccgaggtgattgagccggagttggtggacgatagccagaagaaataagggaatcgtcgagttttccctcaagttctataaaccttaggttctttttcggatccatttcatacgattatgccgtcctcccagaatattgtagcttaattttgttgccgaaacgctgagatttttttttttcagtttggttgagcggccagtgcaatgagctgtgtgttaaaccaataggattgtgttatgttaggaataatggtttctttgctaggaacaattactttgaaacaatcctttgctctccaatttttccattgctcacttatctcctgcgcaagtaaaacatgatcaagtattagtataaaattcaagcaatattcgtcctgctctaaatttcttattggtatatattgcttgaatttctattaagtaatgcaaggaatcgcctcttaaaatgatttatggtcagatttgttttttctctactttgtctcttagtgtattgtcatattgctcttctagcattgacattggtcatcaaagaaagacacttgtagactgtagtaaagatattccaatccagtatgtactgtccattttaaacgtagtcattagacttttgatcgttttgttttttttttctaactttgatcatttgtcttatttgaaatttgtttatgattagtatttttattaaaattaaatgataaaacatgaatagcactttagcgtgacttatttttattttttaaaaaaatttcaaatattagtatttttattaaaattaaataataaaatataaatataaatagtactttaagcgtgacttatatttttctttaattctaaaaaaatttaaataagacgggaaattaaaattggatatgaaaacttatggccgagcttaaaatgaaacggagggagtatctgcataggacctatagatgttctacagatgtttattgtcatataaccagcaaaacattcattaaattgagtgatcatctacattcatcatgtattaaaaaacatctttatttaagaagccaaactcacctgagttggcctggtttgataggcttgctcaatttgttgcccaaatcaaccgtatcaaaataattttagtgcgatgtttctcttgatataaatacaagtctatagtcttagaagacaatagtcagaaaaagaaaaagacagtcgccccaagtgtctacgactggtcctgctattaaaacagaacaagcacaaaacatccctaaaaaatggtcttctaagcgatgcctccaaggaggaaatgacgctagcgcgccgccaaggggagaatcaggatgtggttttcacctaaagaaaccaatgagagataagagaaaatgtggcaatgccccaaggggaaagtggcgcctcatctgtgacggcctatagtttaggcccgattgagatgagagtcatccgtgacgggctataatttaggtccgattgaggtgaaagtcatccgtgacggcctatagtttaggcccgttagagatgagagtcatccgtgacgagctatagtgttggcccgattgagatgtgtgtcatctgtgacggccggatgcccgattgagatattttaccatattagtgacctttgctctgtgacgtgggccctacccgatagagatgaggcttgtcgcccgttacagatgaccgaacccatgctagtggctcaatctttctctaaacttgaaattgtaccggcgtgaacgtagccgccaactcccgcgccaatggttacatatccgtttcagcagaaaccactagctaatcccctttaatgcacagctaccgcgtcgacgcctcattgctggccagccttcagggtaggatctcaacctccggcgcactccaattcgatccacatagttgggttggagagggatagggtgtgagagaagtagggctggatgtcgagctggctcggctcggctcggcttggtctggctcgttaggataacgagctagctcggcttggctcgttatcctaacgagctagaaacccagctcggctcagctcgtttgaaagctcgagccagctcgttaggctcgtgagctttgggggcagccgacgaccatggaggcacggaagcaactcaacctcgccggcaccttgatagcttgccggcgaccacggggaggagcttgacggcagaggaaacgagcttgagctcgccgacgaccacgtggaggagcttgacagcggaggaaacgagcttgagctcgccggcgaccacagggaggaacttggtggcagaggggatgagctcgagctcgccggcgaccacggggaggaacttggcggtggagggacgagctcgagctcgccggcgaccacggggaggagggcgatggaggagacgagctcgagcttgccggcggcgttaggcacagggggagggacggagagcggcggcggcgcgtgggacgagctcgagctcgagctcgccgatggagtcaggcgtgggggcaaggagaggcgaagagcggcgggccgacggcgtcgggcgctggggttgggtagcggcatcggtcactggggtggaggcccagagcggtggtgctggggtgggggagacgaggagctcagccgccaccaccagggaagggggaagggaagctagggttttggtttttggtctattgggccttctaaataaatgggcctatgggctttgtggcctagcagcctggctcgttaaggctcacgagcagctcgcgagccagctcgagctggctcgttatctctaacgagctaaacttccagctcggctcgttaggaaaatcaaacgagccgagcttgtcacgagccgagcgagctaacgagccacgagcttctcgtgaacccctagagagaagaatggatcccctctcccccgcattcactcgtccaacgtgtccatcttgttgcggcaagctgccgccgcaaaaggactgactcctgaaaataagcttgtcgcagccttcaaagcctacatcatggcgctaccgtcgttgccgcctcaaccaggctgtccgtgttcgaacgggctgcctggccgtgtcgccgtcgccttcgtccttccaccgcgacagcctcctcaccgctgtgccctcccaccatggcaggctcgccggcataccgtttccacgccgtgctcacctgcctcccgccgtcgagatcacccacgcctgctgtcgctcgccacgactcctccctctggccgactactgccgtcgcccacaccggcctcttgccgctagttgtgctggccggctgctgccatcacctatgtagacccctgccaccaaccgtgctagccaccacagccatcgcccgttcttcccgccggcctatcgtattaccgaaatttgatagtgttggttttgtttggacttatgcttttatcaatttttgatagagttttaagattgaacttttagaaatagaaaaatttaataaggtagcaatgattaaagtgtgtttagtttgttgtctgactaaaacttggtaaggttaaaagtatcaacaaactaaggttaaaatgtgtttgatgtttgggttctatattgccacgctcgagatttgattcaaacacgcggttaatccacattattttcaaacggaccattcgaacatcggattatcgtacgagcaatgaaaaaaaaatttcaagccctttgcagaattctcaaaaaaaaaaaaccctttgcagaaaaaaaagaaaaagaaaaacccatccaatccaacgaacagtagtacatcctcggagacggagtcgtgacggtcaaatctgcaaaagcgaaagccgcccactgcaacaagtccgcaaccaccaatgccccacccgtgggcccagccatccatccattccgcgttttccccgcccaccggtcaaaccggtcaccctccccactacagccggtcaccccactctcccccacttgataataataattactccgtaattaaataatttcgttttggagctcgacctggactccattactcgcagaaaagtcaaatccaatcaaatcaaaatccaacccaactgcgccgaggaggacggaccaactccggctactccccgccgccgccgccgccgccgccgtcggcaggaggaggaggagctaggtcgccgccccgccccacatcgaggtgagcttcttctgccaaagctctctccgacgaggtctccgcccgacggatggggttggaatggatccggctcgtcggcgagcgagcgagcgagattcgtgattcgatgagcgattgatgccgcctacttttgcaggattagggtttgctttgtgtttgcccgacgcgaggaggatggggacctcatcgggagccaacttccaccagcagcaaccgcccccgccgacgtcctccgccgcggccgcggcaggagcagcggcggtggcgcaggggatgctgccgccgcggaggcccacggggctgcagacctcgctgtcgctagcctcctcggagcaggtcggctcgccggagatgcaggagccgggttcgaattccgaccaggggcacgactccgccaccgagagcgctagctccagggagacgtggcccgccgagcccaaccacggtagtgcggccgccgtcgtggccgcctccaccgccgctagcggcggcggtggtgttgttggtggaattggtgttggtgtgaggatcgtggacaaggagaaggaggtggggaatggtatccccaagctgcaggtgatccgcgggtcatcccgccttgatcggatgtcgctgcgggaggttgcccgggagagggtcgatctagttgctgagaaaatgaaggtgatgccggaggagcacttggaggacatgaagaacgagctcaggtcgattctggagggcacgggtggttctcaccatatcgaggagttcctgtatctccagaagtttgtgcagagtaggggcgatctcacccagaccatgctctcgatggcgcatcatgtgcagctcgagatcctcgtcgcgatcaagactggaatccaggcgttcttgcaccccagcgttaccattcctcagaaccgcctggtggaggtcttcttgtacaagaggtgccggaacatcgcttgccagagtgccctccctgcggaggagtgtagatgcaatgtttgttctaacaggaatgggttctgtaacctctgcatgtgtgtgatctgcaacaagtttgatttcgaggtcaacacatgccgctggattgggtgtgatttctgctctcactggactcacacggactgcgcgattcgtgatggccagattgggatgggtcaatccattaagagtggtactggtcatgctgaaatgctttttaggtgccaggcttgccagaaaacatcggagctgttaggttgggttaaggatgtcttccaacaatgtgctcctggttgggacagggatgctttgttacgtgagcttgagtttgtctgcaagatattccgtttaagtgaagactcaaaagggaggaagttgttcaggaaatgtgcagatctgattgaaaggttacggaatagccccgcggatgctatcaatcctcggatgatactgcaggtgctccaaggtatgaatattatccttaactgagacttgcattagcacttgatttgctggtatcctattagcatgtatctgcttcttcatttactaaattctccatataagccttcttaattctgtatattgattagtggtactgtacacatgtattattgtaggcttctattaccaccctcttaattcagttgaaagcttatacattcctgtgatataggtggtcagcaaaatgtatttagctattcaaattatacagcaatatgtgtccacccttgtttgcagatctattgctctacattacaagagcatgtattctgagggtctgattgttatttgcttcctgattttgttttcacacttacatgtgcttgtttatcaaaataaactaccttggtctggttattgttgctaccttgctggggctaatttcttataatcttatttgtgtcttttgtgtgattaatccctttgtaaacgattcagaacaacgtattcatatgtatgctagcactcagaatgagtgttgacaccatgtaggctggcctagttctatttaatattattttcccctcgagcctgttatggccatgactcacgaaattgtttactgcaaatatccaggcaaacagcccactgtaaaatcctgaactatgttctgtattgtttagaatgcacgtatgcttcagatttgtgtctgtactaagtcaacctgcactccaagttgattgtaaagctatttattatgccattgatgtggggctggaatttggagcacatttatcttgtggttgaatgatgacagaaagaactagttgttgcatttagaattcttcaagttcattgccatgggatgttgggaaactgtgggtattagttgcttgttgaactcctatgtgaaatgcgtgttttggccaagcactttatggatcaatacatgccttttgctcttgctccacacctagaatcctatattgcacagttcttgttacttggtattctaaatttttatgtgcatcactgattttggtttcttagatttgattcattaacactgaactatgcttacgttttgacagagctcgagttggattcccccaagagcacagaaaatgaagaaatagggcgcttgatcactcctcaggaggcctgtaatcgtattgcagaggttgtccatgaagccgttaaaaagatggagcttgttgctgaagagaaaatgcgactctacaaaaaggctcgcattgctgtggaggcctgtgaccgggagcttgacgagaaggccagagagcttcaggagctgaaggccgagaggctgcgcaagaagcagcaggtggatgagctagagagcattgtccggttgaagcaggccgaggccgagatgttccagctgaaggcaaacgaggcccgtcaggaggctgacaggctccagagcatcgcgcttgccaaatctgagagggccgagcaggactacgccagcctatacctgaagcgccgcctggaggaagctgaagcagagaagcagttcctcttcgagaaaataaagtaccaggagacccagaggcccatgcaggcgagcggcagcggcgccggcgattcatcgcagacgcccatgctctccaagattcacgacctcctcaagaacgtccgcagcataccgccgaagacggaggggcatcaatgaaaacaaagagcagcagagctgcatacgattcaggttggtgaatcttaggtgtccttgtgctgatgtactcctacgctgatttccttcggtgtaaattgttagcaaaagtcgttgtaacaatattattggagctaacggtgtgctatcgtaggatccaatatatacttagcttcggtgtttgcagttgagcatggatgagaaatagctgaagcaccctgtactctgtaatagccaaaaaaagaacttctatcatgtatgaccatttctgacattgttagatcgaataatttgtataatttgtgttgtaacttctgtacgtaaccctgtcatttactatttggttaaatgtgaaattgtgaatcttcatgaggagacatacttctggaaaagcctgcgtgatccaagagaagtgtcagtctgtaccacactgcactggcaacttccatggctgggctgtgtttagttcacactaaagtttggttgaaattggtacgatgtgatagaaaagttatgtgtgtatgaaagatttgatgcgatggaaagttggaagtttaaaaaaaaactttggaactaaacagggcatggtccttagggggtgtttgggaactagggactaaactttagtccctctcacaaaagcataagtcagggactaaagtttagcctctctctcccaaacactctcttaaatggctggtacaaggagagtagcatccaccatacatacaatcctggaaatgtgaatgaagctaaacttgtgagatttgtctcttcttcttggtgggcatgaatgtgatcatgtgatgatgacccacatggcttttgtgcaaatgtgaaacctagaattgtgttctgcccccatattcctacccttgtgacacctaatattccactatctcagccatgctcctctgcctctcattactccctttttgacaacactcaccagttttctgctgatgattgatagtatattgacaagttctatattgttttgaaattcagggactgaaattgatcttttttaggggacaaattgaaaacaaacaaattcagggactgaaattgatttttttttcaagagttaacaaaacaaatggaaccatatcaacagatcaaatatagatttgccattctacaaattaatcagctgtttctggatgaatcattttgtggcacatgtcaagcaagcactactagatctatgcgtcatttccactttggcatgcccaaaatttttctgatgtatacggacatacatttgaaatattaaatgtagtataataacaaaacaaattacataatccactggtaaactgcgaagtgaatttattaagactaattaatctatcattagcaaatatttactgtagcattatattatcaaatcatgacgtaattaggctcaaaagattcatctcgcaatttacatgtaaattatgcaattgatttttttcgtccatatttaatattttatacatgtatccaaatatttgatgtgacggaatttttagaagtttaaaggtgactaaacacagccagtccaaagatgtagggcatatggcaatgacacgtcgcccacgcatcaatgtgacattaatcacattatcgccttgttttgagcgtgccctagtgctcctactcctattgccctttcaatctctcttctgcaaacgcacgcattcgctagctgcatttaacacaaacctaggagagttagtagctcaaagctagcatcatgcagtgcagggcacgtcttggcaaagcatgcgagcacgcgacacctcttactcgtgagtaaatttactctttttttttgcgaaattcaatgtgatgacacgttggatcagccattaaattctaatcataatcgcaggatcagcgcgaaatctgaaggcgacatgatcgcacgaaggttctcgtgcaggggatttcctgtgcacctgtttcagttgcttactttagaagataaatttcggccgaatagggcttcggtaaatcgacattggatgcaatttttaacttgtttttgccttttgaggtttatgttcttgttaatttgtccttgatgaggcactattttttttctataataaattattcaccggattattttctatgcttcgaaaactacgttctcttaaaaaactttcttctactttattgctattagatcacttgacttgagctatttatttagtttatttcttataaattatataacattcctataatcaagcagataatttatgcaacaatacaatcaaaaatctaaatcaaacaaaggcagcatttcttatatgtcgatgcgattgataaaaaccctactcttatactacattcgttccaaaataatttcatttttagaacgaaggaagtaccttttattattttatttttttgaaaataaggttttatgtttcgagtactaggcactaataataagcatgctgcttgtagttaaaattcatgcaacttgaatagcaaatccagacatctaaaaaaagctattccttctagagataaagcataatatacaaacatatgtggcctcatcctttcgcttatatttatacctatcagctaaaaattaaattttcaaccttaagcttgaagctgattttaggttttttcatcaaagtataaaaattttatttacaaattacttttcgtttgcaaatatatcgttttacttattccacgaaaaaaccaagctatggggccagatgtagtttgttgggagggccatggtgtgaagccattttccaccaaattaaagctggtcttggcgtgcacctgtaaaatatactattgctcacttgttgggaaagaacactttctagtgatgatggcaataataactagatgaattaaaaaaaaagaggatgcaagaaagctacaggcactgcccacagatcccacattcccactactgcatgcttagttgattactctctccattccattttaagtttttatatacaacgtttaaccgtcttatttaaaaaaattataaaataattaaaaataagacacgtctaaaataatatttatattttattatctaataaaaatactaatcataattttttaaataaaataaatggttaaacattgaacacaaaaatttatggctgtaattaaaaatgataaaatggaggggggggggagtactattttttccactataaaatggcccatcgatggcgccatcttatcgctcatgtcgacgacaacgcaactgaacaacctcgccggtgagcagctaaagctaagctgaggttagccatggcggcggcgatggggttggagaggaaggcgaaggtggcggaggtggcgctgcggtgcgcggtgtgcgccctggcggcgctggcggcggcgctggtgggcacgggaagccagacgaggaccttcttctcgctggagaagaaggccaggttcacggacatgaaggcactcgtcctcctcgtcgccgcccacggccccgccgccgtgtacagcctgctccagctggcgcggtgcgccgcggccgcggcgtggaaaggcggcaccaatgccggcccgccggtggtggcgtggtcggtgttctcgtgcgaccaggcggtggcgtacgcgctgatgccggcgacggcggcggcgctgcagtcgtcggtggtgggaaagcgcgggcagccggagctgcagtggatgcctgtctgcggcctctacggagcgttctgccgccgcgtcggggagggcctcgccgctctccgtagccgcgggcctcgccgccgtgctcctcgccgccgtctccgcgttcaacctgttccgcctctacggcggcggcggcggcggccgcaagagcagcgccggcgccgtctccggcaatggcgcgaacacgtggtaagcaaggctagtttagctgcttcgatggagtttaatttctttgtagtttcagaattaaattaagcgagactggctcactgacacgtaattaagttcgttaaatcgttggtaataactgttatgggcttatggctgtggatgataataattaagtcagatttgccgacgaccaaatcgcctgtttaatactccctccctccatcctaaatataaataattttggttggacgtgacatatcctattacaataaatctagacatgaaagctgtccagattcactgtactgaaaagtatcatatctaaccaaaattttttatatggagtactggttaatgacgtattaaggttggtgtctttttttttaaaagactattaaggttggtgtcggcgtgaatcaatcgatggacaccgtgtgagtgcggcaggcacgtccgcatgcgtgagtccactcaaatcgccttctgttaatgggtctcaaatctggtaccacttcacgtatacttcctccgtccaaaaaaaaaaagacaaaccttgatttccgtgtccaacgtttgaccatctgtcttattttaaaaaaatatgaaaaaaattaaaaagataagtcacgcataaagtattaatcatgttttatcatctaacaacaatgaaaatactaattataaaaaaattttatataacacagacagttaaacgttggcacgtaaacccaacgttttgactttttttggacacaaggagtagctcctaatctaatatactcaaaatttaacaaatgtttatatttgagtatgtaactttcgcatactacaacaaatagttatatttcaagaaaaacctatagatcctcaccatcacggtaaattaagaaagacacttagggcaaccacaatgtatgaaaaaggtgaccttaaggcaatgattgcacttgtaaagtgagccatatacattgtggaaagtagcattagcttaggatgcagcttatgcttaagttctcccataagcaaaaagaaaatattttctctctcattcacttcatgaacaagagatgaaacaattatttttccattctatgtgggccatcttgtggctaaattctaaccatagcattatgggtatggctataacaatggctcactattcataaggcccaccttaaggttacactacaccacaaacattgaggatgcccttgtagatagtggtggacctagaaaactttccaagcacaggaaaactcaaatatacctaatatttgctataatatttttaactttaattctttcaaataaaataaaattttaacagtgtatttgacagtgagcccggatggtggatggtggctccacgctgcttatagagcaaaccaatgtagatggacgaagcactaaactacggcaaaggtagagaaaaaggaccattcgagtagctaattaattatatgttggatcgtagtaagatattttcatgtaataccatggtctctacatgtttagtaggtttagagatcaattagtttttaaaagacgagatgtactataattgcacttgaacttaagtctgtcggttagaccatgtggccaatgccgatcagattgtagaccgcccatttgtgacctggtcggatttttaggttgttgatcaaaccgcccctacatggatagctatactggcctcactacagaagctctaacattattttttttaaaaaaaatggcttaatcttaccatgggctattttgaattgatgacaaaatatgtcctactattgatagcttgaatagtaatattggctattcgatttgaagccaaataattagtaatgcctaaaatcaatttgacttcacattggtagtaatcctctgccaatccaaacattcgtactacaactctatcctacttaaaagaaatgaaatgatagtacataccaatacttatcaagaatttgatactatcaaatatttagtatgttaacgaaccaaacccaccctataacttcatcccaatgccaacttgtcctcctgcatttttagcaaacttgaaagctaaaacactcgtaaatttaagagcgatggaccgttactggccatgtaaaaactgttactctattcgtcacaaaatataacaattttaaactacaaagttgtcttaagctataacaatttctcaagcaaatgagggaaaaaagtacatcgaaggtccctcaacttgtcatcgagttacaaaatcgtccccgaaacacaaaaccagatatccggcatctctcaactaatcaaaaccggtaacattaggcccttcgatggttttgaccccggttttgtccgacgtggcggttgagtcagcgtgggacccacgtgggccccatgtgtcagtataccacgtcatcatctctctctctcccccttctctccggctctcccttctcctcctctctctctctcactcttcttttctctgggcgagctggatggcagctgggaggaggccgccggggcgaggcatgaggcggcggttggcggctgcgacgtgggagaaggccgtcgagcagggagcagcagaggccgagcacattggcgcacacgcgcagctttagcgcgtcgcgtgggctcgacgacgacccggtgctgggtgtcggcgtcggcctcagcgggcagttggagccacaggcgctcgccaccacggccacggtgaggaggctcaccgccagaacaagcaccaccagaacaagcaccgccttcgccgccattgctatcgatcgagctttgctaggctgctagcttgtacttgtagctagctcgagcttgccgctgctactgctgcttgctgtgtgctgggcctgggagtgtgcatggcaaggtgtattgtgtatttatagtggccatggagaagaagatgagaggaagcgacggcgcgggagcaccagaccaggagggcctcccttcacgccgccccaccgccaccgccactgccaccgcaaccggcaggtggggaggaggccgacggggcgaagcggggaggctggcgattctgcaaagtcgcggatgatgccgccgtgatgaggtgctcctcatctctgacagcaacggggagctcgcccatgccatgggagtcgatctcgacctctccgacaagcccgccgggctcgacgtccggtctcaccgctacacgttcctggcaaaggacgacgcccgctgggtctagccgacggccgccactgccaacgccaagctcctctccgtcggccgctgcttctctccccactcgtcttcgccagctagcgtcgccgccgccaacgagggacaatgccgccaggtttaggaggacgtgcgggcgaccgctggagtcgcctcccgtcgagcagagcggaaagcgagatgacgcaaggcgagggcgaggaagaggccgtcgctggtggcgccgccgccgcgtccgtctccacctttgttcctctcccctccaattgttagcccagccccactccttccccgccgcccgtcgcaccggccctcctctccgctgcgctcccccccgccggccgccagacgcccccgccgcatgcgctgggccagggcctcctcccatgccggccgccggccgtgcccgtcgcgctggccctcctcccctgttggccgccggacgcacccgccgcacccgccccaccgtaccttcctcttcggccagccgccggcactcctcccctaccggccgtgatcctgcagaggagaagtgagagagagagagagaaagtgaggaagggagaggagggggaagagagagtgtgtttacatggcgtcctaacatgtggggcccacgtgggtcccgcattgactcagccgccgcgtaggatataaccggggtaaaaaaaaaaaccactaagagacttaaaatgaacggttttgtgagttgagggacgtcagatacttagatacttggttttgtggttcggggatgattttgtaactcgatgagaagttgagcgaccttgtactttttccagcaaaggaggtagtaccgtcgcaggcgggaggcggcatgccaaatttgggccggctcaagaggttgcgtcacggcccagtacatcaaggcccatccaaggaaacttctagaacgtttgccttctacgtcacgcccccgccacccccatccccggtcggtcgcgtgcacgcctacctatcctatggaccccgcccaccgcaccaccacccaccccacgaatctcgaggcataacgggtggttcacatcgctccggactatggaccaggtccagccatatcccaccctcccccggggaaacagtccagactcccacaaagaacggttcgattttgtataaaacccctcgcaattttttttctcccccacaaaactcccgcatcgccccacactgctcctgctgcctctctctctctcccctccggcttctccgccgccgcgaacgcctctcgactccggcgagttcatcaccggcgttcacgaggatggtgagtttggttaggggggcagagccccttctcaggcctgaaatgtttttaccctcggattgtttaggatttcgcgattcaattcgcgctattttttttttagttttagttttattatttcgtgtgatctgagaggctgagatgtgtggatgcgtatgtgtggttccggggtggagcgattttggtcgatccgtggggaattgatcggtgggggttgcgttttgaaatgaggggatttgggccgcggtttggatatggatctgcgtgcgtgtctgcgacatctgacctcgaattttagccagggttttgttgatttctcccgcttcgttggggtttcgtatcatccacattatggaattatggaatagagatgatttaggggggaagacaggagcggtgatgtctgtccttcgattttttttcctgcttttggttgattgctgttgtagattttgctggataggcacgattcagggggtggatctgtggtttcgtcgatatgtttctgagcttagtgtggtagattttatttttgcggagttcagttgtgtgggttgaactcatgcagttgtgcagccaatgaatacgatctggtaggaaattatttcgattaagcttttgaaaagaaataaaaattgcactgctgaaccgattataatgaattgaaaagaaataggaattgctgtggcatttatacaattaagctatgatgtgctcatctccaaaaaaatgaattataagaaacggatgcaatatttcagtaccatatatcggccatgacatgcttattcctgcaattttagatgagaaattcatataagccttgaaaagttgaaatcttagcaggaaatgttgtttggtgttagaaatgagaaatgcggagcagtctgttttaagaaaatagggataattctggatataattgggtcctttgttgccaccggtcacttgtcttgagttgtgggctcgtacttattactgaattctgtatttctgatgagtgctacaatgatatatataatataataatcagtgttctccttgggtttagttattttttctatggtgagaattgtagttgttgaactacttatttatatatatttgtttctaattaagacaattgtggtcttcaacagctcctttgggtcattgagtagttatgttagagggaaatgataaaatttattttgttttattagtaagcattttcaggggtagcttaccagatactctgaagttttatcattacttcattagtaatgatagaagtgatactaagtttgatctgacatcattcagctgttgtcgtttcctcctacgggataatgtcactacctttttatgttatttccttatggttagcagaatgcaaatacgttctgtccttatgttatatttgtccacttcaagcaatttctttttactgtatcctaaactatttcattgcattcagactacctcaaggcgtcttgctgacaggaagagcgcaaagttccagaagaatatcacgaagaggggttcagtgcctgagactactgtgaagaaggggaatgactaccctgttggacccatggtgcttgggttcttcatttttgtcgtcattggatcatgtaagctttggcccttcactttcctattcctgtctgtttgatatttcagtatcccttgtggtgtggttcgcaggaatgcacatgcacaaaatagtatatatgcatcttcagctttatgaaatcaatctgactagctttatgactgctgagttagcattttgcactgaaggcctcctgtaacatttacttaccactaggttgactttgtacctccttaggaaaggttctcttttccactgtccatgttagctgtctgacttgttgaacaagatatttcttatcactcataagtttgtggttgaggttttccaaacatggttggccaaggtgtcttttcgccgctagatggctggatatttttcatttgatagtgcattgtaaacatgttggttgttgaaccatatatagtgacatatttctgaactttcttgtagtgttaaccaccataaaatctggagtattatccatgatgaatagaaagtacattcattcagggatgttgtttgtttttatatgttaaatatgtggcctgtgcttaaggaaatgtaaactgtgactactatcacatttacaatgtgttagaactgtcaattcaacaaattaatttcctgagtaatgcctatttcctttcctgccatggtccaaatgttaaattgttaataccctctgcaatttttcaagcccccatctaaaatataatggaaaattgagctttttgcttaagttcctcctaagatacatcaattattctcagctttcacttcccatatttcccaatacagtatatccaaagaacatatgtattgattgttgatacagttcattttgtacaaagtccttttctggcctacatgctataacagttgaaattaggaaatgtaaagctgcttctctcttgtgacttttcacttacatgtttccctattctgtgtttcagtagaattctgtcatacttttgcttcatacacgtgcctgttctgtctatccgtgtacaatatgcaacacaaacttcatttatcaactctgtgttccttacaaagttgtcaaaaaacggatggaaatgacagtctctaacatttggttgtcttgcagccttgttccagataatcaggacggcaactagtggcgggatggcttaaattggagctaaattcagttatttatgctgtgtctgagagagaggctgtacctgtactttgtagtgaagtttgttcctggatgatatcgtgtagagggtccatgttgtgtccgtttgcattttactaaatctaaactagatgttggtacctgaatcttacagactttaaacttaaatggatataattgaactttgatctggagactaataattagcattgttctttgttattttctgtagtattctgttttcctgcagttacgcaagcctatgcagtgattttcagttgatcactacgagttcctcttctgcatttcaatatgcaccttgagcaaatgcatatgtaatacgaaaaactagctattagacaaaacatcatgatggtttatgccatcaaaccttctctgtttgatagggtatgcaaatgtgttggctcaagttttgataagttaatagttaacaaaaattggtatgcaaacgtgttgttaacaaaattatccagaatatttatatatgatccagataaactgttagggcatgtacaaaggtagagacgggtatgagctctacgctatttagagtctaatgtcatacaacagttgaagacaatatggtctctactattaatgtatcaaaaacaattttcttactcatctttcctttctttgttatgcataataaccatatttctcattcctcctttctctttcttacatatcatcaaatttacttgcgcgataatagagagaccagtaataaagaccatcgtacatgcccataggctgttaaaatctggaaatgtgaatgtgtctgtcttttgggcatgaaagataagctggtttgtattctaagcatatgtcatgatactccaaggctgtaattcctgggcatggctctatcacaatcatcttcacaggggcgcaaaaatctctggaattttccaatggatctcgaatctctttctgatctgtgatgcttctgcgtagttcttgtgaacaatctcatcaggttcacccaaaaactaatggtccatgcagtccttgtgaagttagagatattattgccttgcattgaaatcagaataggaattctattcttgtgaatgcaagttagcttacgccatgtctagatcccacctcaaatttttttttccctgtcagatcgaacgtttgaacacctgtatgaagtattaaatataggctaaaaaacaactaattgtatagattgcgactaatttgcgagacgaatcttttaagcctaattactctatgattcgataatgtggtgctacagtaaatatttgc

SEQ ID NO: 25697 - DNA, 18587 bp, Oryza sativa
ccgtttaattgattattgctccctccttccacaaaagttatactctacctattacttttgttaccaagattaaggagaaattaactcatgttgcaggtaacaaaaaagtgtatgcacgtttcaaccaatgagtattaagatgactcctcggattctgatcaaacatttaatttacctctccatttaagtcttagatgtatatagacttcaaatataaataacttatttggaaaaactaaaatataaaatatgtccaactcttttggatggagggagtaattattacaaacttaaaaagatggttttatttaagtttttaaagaaacctctatataaaatgtattttaaaaaacacattgtttagaagtatagaaaacatcatcacccctaaactcattaccgaacgagcctaattgcttgcttggtattttaacacggaccctatgaaccaattaaatccttatgttgactagattgctaaatcacgtttcagaggagtaggttggaaaatgagttttgttctcaggacattatactccagatttgattgagctcctgcgttcgtacctgaagctccccaacttctctatctcgttttccgtgcgcacgcttttcaaactgctaaatgatgctttttttaaaagtttttatacgaaagttgcttaaaaaaatcaaattaatctatttttttaaaaaattagctaatacttaattaatcatgtactaatggactactccgttttccgtacgtagaggatggattcccaacccattctattgaacgcagccatattgacttgtcatagagagttcattttgtacacaaagtccttttctcgcttacatgcaagaacatatcttagtttgcactgtttgagtactacaaatctttcaaggacaataataataacacatcagcatcagtgaatggtccacactccacacaaccattttgtttaatcaagagcacacccttaaatttttcaaagatattttatggatggtgagatctcagcaagaaatggacaagaccaatcatggctcttttatgtctccaaatagatggggtttcttgccctggctactcttcaacttcaagtggacaaccataagtaaaaatgctccacaataatcagtaaaaacattcaaaaatacagaaaagcaacaggaacgacattcagataaatacagaaaagcacccgttatagttcaaaaggaatcattaatcaggtcaaatggacaatcaaatagagaactaagccctacaaccaaaatacatagtactacctgcgtctcaaaataagtgcagccgtcgatatctgtgtccaacgtttgaccgtccgtcttatttaaaaaaattataaatatattttttaaaaatagtcacatataaattactattcatgctttatcatctaaaaaaactaattatataaaattttcaaataagatgaatggtcaaatgttgaacataaacagtgcaaaactgtaattattttaggacggaacgagtagttcgttttgatctattgctagatggattctagtacagatattagcagttattacctattccactagacatggatactcattaaatccatggtgatgttaggcagcttagactattcatcaaaataatccaattgcttaaggtatataaattaaagtcatcttgcccccaaattagcacttaaccacaactacccaaaatggccaaatccaacaaattaacaaacgaaaatcatttccatcatcatcaacaaacagagttgtacaaataattcaacatgcatctaaagaaaagaggaaccttcaacaagcatgtggttattccatttctcccatacaacaaaacaacaaaacaaatacattcactgaccattcctgttctcccatgtgctttgagttcaaaggccaaaactatacacatcatgagcatgtggcaagcaatccaagtaccaccctagcacataggaaactcctatatccctacgacaagtaaaactcgtcattttccaatttaataatctacatagaaatgattttgtgaaggtgtgtgacattttgtttgagcgacactcaaaagtactatctcttaatgccaaataaaaagttatacaacctccgtccaaaaagaatacatttctggctgcatgcacggatgcacctggattgtccaggtacgcacaaatacattccttttggacggaggtagtagttttatgttttaatgacaaacaaaacagtactccaactgtaatacaacaacacaagaacatggcttgtgatatgtgtccgatcaacacttacattataaaccatactctatcacaacaaataaaaactatagttttcctaatacaaggacttcaaattttcttttcgaaaatgttattcaatcattaatgactaataacaactataccccgaaattaagcccaaaacaaaaatcaatcacaattgctacgacatttctcctacggtccaagaatgaaaaaactatgaacctgcgagtgcgtgcaatatgccatctaactgatattgccaaacaaatacttcctctattccgtgttgtaaggtgttttagctttgagtcaacttgttttaagtttgatcaagcttataaaaaccggtcatatttctaacataaaattaagatacattcgatgttcgatttaacgaagcaaacttggtattgtagatgttatgttttcctattaatttgatcaaatataacaagtttaagttaggagttaggacaaacttaaaacaccctctaggagtaaattttttttttttgagggaacactaggagtaaaatctgatgtgacactaccatgacatttgaaggtgtatcgctagccaaaaaaactctcacaagatatcatcacctattccttttgttattgcaatccacatcttttcctctcatggaccatgtggttgctagcaattttgtctagtataaatcaacgccacaccacttgcctagtcatcaacacatcaaaaatattcatctttaattttttttgaattcatttcttcacgtaaacatcctactccatctctctcattacactcctttcaaaaacctccaaaacaaaaagaaaaaaaaagaagaagaagaagaaaaaaaccctccaaaacaaaagaaaaaaaagagaaaaaaagaagaagaaaaaaacatccagatatatatagccatactgcatactgttgtagctaattaagctatagcttggtaatccgcagccatggcgccggacgtcgaggcgcggctgctcgccgcctcctccaagccggccaccgccgccgccgcctcgctgccgcgccgcaacaagtaccccttcttctgcgccgtcctcgcctccatgacgtccgtcctcatgggctacagtacgcacgcacaccatcgatcacaccgtcggctagcctcgccgcgcgcgcgccgccgacgccgccattgacgttcgttgtttggttcttgcagacgtggcggtgacgagcggggcgcagatcttcatggcggaggacctgggcgtgagcgacgcgcagatcgaggtgctttcgggggccatcaacatctactcgctcgtcggcgcgctgctcgccgggtggacctccgaccgcctggggcggcggctcaccatcgtgctcaccaacggcttcttcctcgccggcccgctcgtcatgtcgctcgccggcgggtacgccgcgctcatggccgggaggttcgtcgccggcatcggcgtcggctatgccctcgtcatcgcccccgtctacgccgccgagatctcccccgcctcctcccgcggcctcctctcctccctccccgaggtcacccccattcatatcccaaacttcttttaatttactaaatttcgatcgaatttgggcaaaatagctttgaattttgtgatggtttttgtgtttttttgtttgttgaacatatttatcaatgggagagtgatttaattactaaatttcgatcgaatttgggcaaattagttttgaattttatgatgattttgtgttgtttttttttgatttttgaagatatttatcaatgggggagtgatttagttactaaatttcgatcgaatttgggcaaattagttttgaattttatgattgttttgtgttgtttttgttttttgaagatatttatcaatgggggagtgatgctgagctacgtgtcgaacttcgccttctcggggttgccggtgcacctgtcgtggcggctgatgttcgccgccggcgtggtgccgacggtgttcctggcggcgggcgtgctcaccatgccggagtcgccgcggtggctggcgatgaaggggcggcgcggcgaggcgagggtggtgctcgaccgcacgtccgacacgccggccgaggccgagcagcggctgcaggagatcgaggacgtcgtcgccgccgccggctccgttgccggcaacggcaacggcggcggcggcgcgtggaaggaggtggcgaccaagcccggcgtgcggcgggtgctcgccatcgtgctgacgctgcagttcttccagcaagcgtcgggcatcgactccgtggtgctgtacggcccgcgcgtgctcgccgcggcgggtgtggcgtcgaacaccctcctcctggggctcaacgtggtgttcggcgtcgccaaggcgagctccatcctcgtcgccatggcgctcaccgaccgcgtggggcggcgcccgctgctgctcgccagcacgggcggcatgacggcgtccctcctcgctctcggctcggtgttcgccgcgttcggcggcgcgagggacgacgcggcggtggcggcgggcgccgccgtcgccgtggtggtggcgttcgtgtgcgcgttctccgtcgggatcgggccgctggcgtgggtgtacagctcggagatcctgccgctgcggctgcgcgggcagggcgccggcgtcggcaccgccatgaaccgcgtcgtcagcggcgtggtcaccatgacgttcatctcgctctacggcgccatcaccatggcgggggcgttctacctctacgccgccatcgccgccgcctccttcgtgttcatctacgcctgcctgccggagaccagggggcggagcctcgaggacatggaggagctcttccacaccaagtgatgatctcatcttccatcaatgaatcaattcacatatatatgcatttgggttgttgcaacattttgaatggaaagtttgattctttcttggtaagattatcaaaggtttttcatgttcatttggctgattaattggtatactataaatttattattactgttgaaattgacatgtaaagatcggtgggacagtggatacatactggctgaatatggggaaaagagaaaagtttagaacggagggattttgtattatagaaagaaaactaaaacatgtgtgtttaattttgtaaaaatcctgtaaattttcttgacgagcctttatcggttggttttgctatttatcaggcgagccatatctcaagttccaagttccaatctctactactagtctagtgggtacagaaggactattttaatgggaggttaatgggaggcctaatttgggcatgatttgctatttgctctgctaaatttcggctttggtccatatagcctgtttatccacctacattcagcctaaaacaagtatactagaccattgaagctagatacgacaaaggcctaattttggctcgttaatcctctcaagtgggccaaatttcatttagcacgttaaatatcagaagcaggcctaatatgggaaaaagtacaccgaaggtccctcaacttgtcatcgggataaaaaacatcctcgaaccgcaaaaccagatatgcgaggtcccttgactatacaaaaccggtcacccaaggtccttcggtggttttgattccagttttggtctacgtgggccccacatgtcatgtgtccacgtcagcctcctctccctctttcccctcttctcacccttcctcatctctctctccccctcccttcgtcatcttcgtcaatgtcgcggcgaacccgcggctcggcgaggccgcgctccggcgggtcggcacgtcggctgcggtggtggaccagctggtggagatgctcagctggaacggcgccgccgaggccgccgccagggcgtccgccgcgctcgtcgtgtccaagctcgccagcaagaagcggaacacgctccgcgtcgccggcttccccggctccatcgagtcggtgttgttgctgctctacatcgccgacgaggagtgcaacctcctaggcctactcatcatcaagaagctggcgcgcgaccacgacaactgcagcaagattggctacgcgatgtatttgataggtggatgcacatgctgtcaaggaaaaaaccaagttccatcacaattgagttctcccgtgggaattattaaaagactccatcatgcctcttctctatcagtgatttggaatatctacagatagaaaagatgcatcatcagcttgtctcgagagtttgaaggttttaagcagctaattgttctgaatctgaaatatttctcctcaacaggcagtgacataaataatctgatctcctcatgccctcggctgaacacattgcgtttgaaacattttaagggtatcaatcgtctccgaattcaagctcaagcactacaggtttaagaggttaaagggtcctttgaagactttcatctgcatgcacctaacctgtccaatgtgtatgttacacttgacaaaacaaaagttgcagataggagtaaaaactatatgatgcaagcttcgttagactaactggaatagaagcacttgttatgaaaagatgtatggttgcgttgcctcagacgtttgaaggtttcaagcggctatctatcttgaatctgaaatatatatactcaacagacgcctcctcgacaagatcattgacttctccgccatcggcggcggcgccagcggcgccggatcagccgtgatcacgccgtcgtgcgccaaggccgtgaagcggtcgctgcaagtgatcaagatgctcgcggagacgacggggagcaccgggaagctgctccggcgggaggtcgccgagatcgtgttcacggtgagcaacatcgtccgcgccgtgctccagcacgaagccgggcacctcgagctgcagcggctcggcgccgaggtgcgccgcggccgcgtggggcgtagcctgccgccaccgccacgccttcgctttcactccactccgcatcgttcacacgccgcctccgccggcctcatcctcccgtccccgctgtccgccacggagagatcgagtgccgccgcatcctccagcaagtgccgcttcgatggtggctacgtcacccgctagccgcccgtgcagctgcggcccctccggctgcgcccacccacgcgccgttctgccgccccgcggctgcgcgcgccgggcgccgcccgtggagaagatagagagagaggggagaggtgaagaggagatgagaagaagagactgacacatggggcccacgtgggtctcacgctgactcagccatcgatggccgtggtcaaagcgccacgtaggacaaaaaccgggatgaagggacctcggatgaccggttttgtatagttaagggacatcgcatatctagttttgtggtttgagtatgtttttttatctcgctgacaagttgagggaccttcggtgtactttttcccctaatatggtaagcctcattaaaaggcccataaatagacactgaaggattcggcctgctcaaattagtaagcaggccaaatttcagcccattgtgaaatgtgaacaacgtcgtccgaaggccgaatttggctcaataagttcactttatgtctcttaatttgtcaccgagttaaaaatttatccctccaccgcaatatagggggggggggggggctaatgggcgatcggtcgcagggcgatcgcccagcgatcggtcccgccgccccccactgccttcttccttttcttcctccccttcttttcctattatagtacaccacaaaaatttttttaaaaaacaaaaagatagaaaaatttatgtataaacaaatttgaattcaaattcaaatttgaaatcggctatgtaaacttttgacttataaactttggatatataaactttaggtgtataaactttagatgtatagaaatactatatatgaaaaatatttgaattcaaattcaaatttgaatcggatatataaacttttgacttataaacttttggtctcaaactttagatgtgtaaacttgaggtgtataaactttagatacataaatttattaaaataggaaagtaatgcggtgctaaaaacgaaaaccagaggggggggggggtggagaatcgatcgctcgcccgcccagtagcatttccgaatatatgaccgtccctggacttgtaaaaccatatctactttcatcccaagataatatggttgccagtttcgttcaacccgtgctaaatcagcgtgggacttcctctcacctcgctcgcctctcttccctgtcctcaccaaccggggatgccagggcgcgcgccgcgtggatataggggtagcaccatgccaccatggcgagcttcctggtggcgtgggggctcgccacacggcagcctctcttcgtcaccgtgccactcggtttgcgtcgagttcgatctcgcacgggaagacggagttacaaggcgtcggcgccgcccaagaagaacggcgcgggagacgacgtggacgggtaggaactcgatcgacgcgcgcacgataagatcaagatcgaggcgcagtgtcgttcttgttctcgtagacgccgatgaggaagacgaccgtaccagaggtgcagaagtcgccggtgggcggtggggtcgaaccggtcttgctcccggttgccgatgccgtcaatataatgtacgtagaggttggtctgcacctgcaggtacggttcgccggtgacgttgcccaggaaaactcgaagtcgatcgaactcgtgtgtgcttgtccctgccggatgacagctgcgagccaaattcaatcacgactaaaatttagttttagctccggtttttaatattgcaaccgcagtaattattaattaatcgaataatcaggtgattagtgaagagcggctatctttaaagaaaattgtcttactgcacgagttcacctgctgctgttctttgtaaattggtctttggtagctttcccccgacagacatggctagctcgaggaggagcttaaggaggtcgctctcatacaagtgtcttgagctactaaaaattttagcgtaaaatttagatatcaagaggtactttcgtaaattttttcctacttcatttatattatcttttataattttcaatttatcaatttattttatgttaacataacaataaacactaactagtaaaaacactaaattcgaataataggaagtactaaatacaaaaaaaaaagatcctattacaagaaaattttcttggcagccaaaaaccgccaaggtaataatttttgtcagccaccgaccaagcaataaacaccaaggctagagaggcagggatatccagatttcttagctactaatcatgaggaaaagttttctcagtggtcaaatcaccaaaaaaaaactacagagattgcgaactttccaaagcgccaagaaatatggccttgacggtctataattgtactatatttatatgataaatttttaggacaatatttgtcgacaaatatatagatagtcccgatggggggagaggaaccattatattccaagaaacacccacataatcaacggggaaatttgaaggagaattcaaaatacgaagtaaatgctgagaattcaaacctttagtctgaacaatggcattctgcaggaggtggaagtgaatgcgaagaattcaaaatacgaagtgaatgctgagatgctttccttggcggtttgcgttcgaactaccaagaaaaatatagatttgtttgtcggttaggacaactcacaaggaaatcttccgaaccttggtggttctatatagccgccaacaaaatatgtatctacttggtggctagttttagccgttaagagttaagacaaagggtaaagttggcggttattgtttgaccgccattgaaatcagctggctgctaagaaaatctgtacgttttcttgtagagttgtagtacctactatactagtgagctcaatgattatcttagcttacttggtagttttcgttaagttaaaagttcaacttctcttggttcattataacaatgtgatcgagtcaagcttcttgtttttcatcactaatagcatatgtggcgccacgtgagatagctggtttgataaattatgtcagcttgatcattgcagcatttttgttacaggatgccatgctgttgcttattccggtaaacaacaagacctgttcaagctgtgctctgctggccatctatggcaagctcatgatctgtgtcaagtacgaatgtacaatccgcaaataattatcgagctggccctaaaacaatgtccagtttgtgcttcttttttgaacggcaacaacgtatactcaacacacccttttgtttttatttcaaaacttcaacgcttctctgagcatttccaaacatttacaatcggcaaaaaaatcgtcattcgaatcctaaaatgtgccgttgatgcaactacaaggaaaaccagctgagcttacacttaagtaatccaccaatggtagtaatgaacactgcaaaccaccggtgctgtagctgggcaaatattcctcaactctctctttttttaaaataatggaattctattttaaacttaatcaactttagcagcatttgcacgccatcaattttaatttccactatgatgcttatgatcactacgtaagtattaagtaacatgcatagtataaatataaaggaaccatgcaaacgatactaatatccatcaaagcagctagctagctagtgtaaaattataagtttgtaatcctgcttagttgcattctctgcctgtatagctttttactgtagtccaccattgcgatggaagtgccggagatcgcagtcgaagtggcgccggagatcatcatcgccgtcgaaatgccggaggcgatcaacaccaccattgtgcggctccccatgtacatgcaggaggcgaacaagggcctgttcaagccaagggtggtctctatcgggccataccactacggtcaggggagcaccctcgacatggaaactcacaaggaccgatttcaccatgctttcttccagcggttaggcaaccatgtcaaccatcaagacttgatcgctcagtgcactgaaggtgcaatgcagtgctacaacggcaatgttgacttcaggctctacaccctggagaagctcatgcacgacgggtgcttcattcttgagctcctcatccagtgggaagagggagagcatgcccatgtcgatgatcacatgcgattgatgtccaacagcatatactacgacctcctcatagtcgataaccaggtacctttcttcgttctcgctaggctgtttgaagaattcaggaggtacaacggtgaacatcctatcgtcctagtaaataccccgttggttaacctcatcagcaatttcttcaactatgatggccagttttcctgggttcattcaaacctgctgaatgaggatctccctaatgcaaaccatcgccatttgcttgagattcaatacaaccttgtcatccgcagaaacaataatagaaataacaatgatgagcagatgcattattatagttgcctgtgtggtttgtgcagcagaaacatttgccataaatcacctatgccgctaggaatccctggggcaaacgagctgcaagactacggcgttaaattccatcagaaagagaatcaccggatcaccgacatattcgacgtgacattctcgcataaaacgatgagcatccctcagttcaagatcaacttcggctccaagatcctactggcaaatctcttcgcctacgaccaaatcgctggccaacaagggagaaataataacggcgtcgtcgtaggtcccgtaacgagctacgtcgcgctcatgaacgcgctgatcaacacgaagaaagacgtgatggttctacagcgggagggcatcctggacaacctgctgtcgaacgaggaagaggtggcctccttcttcaacaggctcggcagatgcgccttggtggatgtcagcaaccaccgttacactggcatgttcgaagatgtcaacaggtactggaggtacggatgttgctgcaagcattttgtcacctttcgcatgaagcattgcaggaacccgtggacttgcctctcgctgatgggtgctattttgctcttgtttatctcattgatctccatgatctacaccatcctccaatactacaaccgtcggcagtaggattggcacttcgtgtgtctatgatcgcagcaatgcatccatggtgggagaatttactatttgccactctatcaaaataccagtgctcaaatgtcactctctcaaattttcattcccaaacgccaatgcgatccctacctgttgtgttatttattgccgttaattaaatgtctagctagtttgatcaagagacgacacgtacagaggagaactctcaaaattcagtagccatggaggaagaatcagctgattaatttgatcgagattgctacttggttcatcgcatgttcctattttaatttgtaatccatgtgtgagaatgtatttttaattcctgtttttacagccatgtatacatgttctatctgcttgtataaaagttgctcagttatggatcattaataaaagagattttctactttccatgcctaaaattttgtaaattattagtcacctagaattgcacattgcgaaatctaagttgcagcaatgtgcaattttattgatatacatatatgtttttactttattttttaatctaagtttgatttttgttcatgctattttgtaaattttcatgagttataagtttatttcatgtaatgttgtaattttttatgtgttaaagtatttattgttaagccattggggagagataagtaataaataataggggagttatgagaaaaattaaattatcatccagggaaaaaaataatgaaactctttaaattttcaagcgcctgaaaatttggcacccccatctgcatatatatgcctggtcggctgcgatcttttaagatcattctcgaattaatgagaattggtggattatctatttatttattgactgtaaggaagaattaaatactatctgccctatgaaaaataagtgatctaaaatcatatttttaaaagtctgggggtatataatctgataaataaataaaaaagtaagaacagtgacttaattattatgctaggctgattttaattattccctctgtccaaaatataggaacctgcgttcgaatagtttttttagtttttagacttttttattttttaattttattaatagacattttccaaaagtatttttaaatatgaactttttggccataccagcctatctggcgtggtcaaatagctttgtcacgccacgcgcagctagcatgtcggctggggtggccaaaaggttaagtttttgaaaataatttttgaaaatgtatgttaataaaattaaaaaatgaaaagtctaaaaaataaaaaaatttctgttcgaataagacatatcctagtaatatgaatcagacaaactatctagctagattcataatagaaaataatcagaaaagtaagaatggtgacttaattattacagtaggcttattttaattactccctatgtccaaaatataagaacctacgatcaaatgggatatatctagtaatatgaatttagacagactgtctgtccagattcataatagaaatgttccatctgattttaaatttttatattttgagatggatatagtaagctactcgcggcatgccaattttgtaaagggagtatcaaattcgacatatatggcacaaatgttccatgatcaatgcctgcaaattttgcttacgttggtttatcaaaataattgaccaatatgtgacgtcacatagatatagcgtcttaattctgtcagctaataatcgttcaccaatgtgtgagaggatacatgttcttatttatttttatttttctcactatggttgcttatttcggacaaaacaacaaaaacttagtattcaaaaacgttatatatatacatgctgacatgttgtgctctgcagcaccattcctggcaaacaaatttactatacgtatcaagtacgaacgtacggtcagcaaattattgtcgaatgtattaatttgactattgcagcacctggttttgcctcttaattttatcaaaagcaacaatgtactcgacgccgtgttgtcgttgttactcaacgcttgttgtttcgattattgcacaggacacaccacaacaacatttcttattcttctttcaattacacgtaagtgtgtaagacatatacatgtatacaaaccctgttaaggcgtgcacacatccatggagcgatccctaacacacgttgaaaaaagacaacaacaaaggaacaaatccttgatctcactaaataactattaaaagtatatccacatgcagtagtgaacacaatatgattaatttttaggaggtgccaatgcaaacataatatatatgtggtgggcaaactatatataagaaaaatataaaaaagataaatatatgaaagtatctgtttagaaaaaaagaatagaaaaataatggtttttttttacttctttatctttttcttccatcttgcaaacattctatttacaaaactgaagtgtgtaaagaatatacagtgggtttatccaacagtaggaggggctcaagcccaccttgctccttctttgggatcgtcacttcccatctacacgtgtgtaatattttggatatcagaattgaaatcaaagtaggtaaagttataacatatggttaattgcagaccccatgcatgcaacttatatgcttcactagcaaacattttaatcatatacaaatttacaattagcaaaatgaaaaacctcattcaattcaagtcctatcatgtacggttggggcaacttggccgcttatcgataagaggaaggatcagttgaccatacgcttgagtatgtactttctccaatggtatatactacctccatattttaatgtatgacgctgttgattttttatccaacgtttaatcattcgtcttattcaaaaaatttatataattattatttattttaatgtgacttgatttatcattaaatattctttaagtatgatataagtacttttatatttacacaaaaattttaaataaaaagaatggtcaaacgttgatcgaaaagtcaacagcgtcatacattaaaatacggagggagtattaatcaatacccgaacacatccagtggcgagcttcagggtctacagctgggaaaatatatattccttaacaaatttaatttgactgacttttgtagcactatcacgccataaattctattttcctctatgacacacacgattatgtaagtaacatgcagctctagccgtgtagcaccatgcagtgaacattaatccatcaaccaagcacatgttgcctgtttggctagctacctgggtacgtaagtttttagttatccaccattgcgatgaatcgagaccaagatctgaatgatgctgtcactacaacagaaataatttttccgggcgatgacccctgtacattgtagacaggccataattatgtaaatcgttccacgggagatggctcaaggacgcatacgaaataggcaagcgataataagtgcatcatcacaagctagagggaccaattaacggggctgtacgtgaaaatatattttcacaaagcgggcacatggaaggcacgtgggccccatgctttttctcgcaccatttttcttctctccatctttctctccccctttttctctctctcttctcacgcggtcatgccataactccttcgatctctcccactccctatcctcatgtctgcacccttcccttatcttctccggtgaccgaggtggaggcggcaatgacgaagactacgacaatggcaggcctcgagagtggtggatccaacaccgccaccatcgggaggggcggatctattgtcctcggcctcggtaggggcgatgatgatggggagcggtgacagtgaagctcgagggtggtggatcgagcaccacatccatcgggaggggtggatccatcaccctcggccctgggagaggtgacgacagcggcgagcaatgatggtgatcctcgaagtcggtggattcgaaaccgccgccctcgggaggggcggatccaccgcccttggacccgggaggggcgaagatgactgcatcgacgaagtcaagggggatgggaagctagagtttcggccgaattttgttttttgattttatttgccaaaaatatttttagttggctggcttaagcacccacatgcgaaaatccaattttcgcagacacctgggtacacctaggccacccgcacgcgtgcgaaaattgattttgaccgtatgaaaaaattgtttttgtagtagtgtatccaagcgcatcctgtggaggagattgctgtccaagtgaaggagcacatcaataccatcgtcaaggttcttcaaaggctaattttaaaaagtatgtactgggatgtaccacctttttcattataaaatttggtatctccaggtattaggtgccaattttttttataaaattaagatatcttaatatgctttctcaatgatcataaaatttctcctccaaatacatgcggaggcaataattagatctcttcgatctgagtctagggtgatctgcatcggcccctatcaccgcagtaatgagggtacccttggcatcgaagattacaaggagcgctttctccagggcttcttccagcggtttggcaatgtgaattttgttcactacactgaaaatattgctgcatattatattagcccatgcgtggatataaatggccaaacaggccgcccggcccggcacgaccctggcacggcctaataaaactcgaaccgtgccgggccgcctcgaaggcacgacagcccattggactccaccatggattaagtctatttatcatctctcaactctttgggatgtgttttatatggctgaaaataagcatattttgtatttctcttgtctatggcctttcttatatggttgattaagtctatctttgatccctctactatttttcttcgaccatgccgtgccaggccagcccaccgtgccaaggcatcggcccaggcacggcccaactatcgggttgtgccgtgcttgggccgggccaaatagtcatgcctttggccgggccatcgggcgttatgaccatctatacgtgtgggcgacacggggtctcaatattgaaagtttgatgctaatttacactttttatattggttatttatatattttgcgagaaataattgttttataattaacttttggccctttcgtcgttggcgaaaagccaaaatcaggtcctttcacataggacaatagccaaaatctaatgtaagtatgtaacgtaggaaattagaagtgcatattatatctctgaactttaagtaaagtctaaaattcaaccaattaaaagcttctagtccgtatactgcatgcaacatcaaacttctgttgaagtgcccggccatcgaaccatcagagtgataaacaaagtgcaaacggtttgactggcgacccaattagctagattttggcatcacctaacacgtttcttatatttcgaaacagacgtaatagtagtttataaggttcatgcgttgactggtcacaataacgtatcctttccaactctagtaaataacgtatcctttccaactctagtaaactactccatattaggttacttcatccgtctcaaaaaataaatttatttttcacctatctcacatatgccaataaaaaaaaatccctactttaccaaatcctaataaaactactttttactttatctatttttaatataattacctatactttcatagactctgatgtaatgattactctaaaaataaacttattttgaaacaaatggaagcagctaaaaataaacatattaaacagaggtagttggatttagggtgtgcatgtgtgttgactgttgactgcaagagcaaatctcccccattttaatttaattagagggaggatagagacaacaatggatatatataaggtaggtagggtggttaggtgacgaaagagctacctcagctttagagacttgagatcctaacttaatatcaacaagaagctagtaattaacaagatgaaaggggaagcaacaaaaacaaacttgactgttatcaacctagtttcccgtcacgttagcacgggcactaatagagtcggaaaagacgatgaaatgaagaggttggaatgtgaccgatcgcgaggtagggagagagtggg

SEQ ID NO: 25698 - DNA, 25152 bp, Oryza sativa
aaagtactagcgtatgtgatgttacatgatagctgcttgattctgccatctcataaatcatatgtaatgtccagttcatcccgtgggaaacacacgtgtttttgttaactttttattggagactaggccctgttgttgcttatttcagaataacaaaacctgttcaaacaattggcaaatatttgtcgaggccctaagatgtctgtcagcatctacttagctgtgcttcttataggatcgaatatggtatttcccaccttaaaagctagccaataactaccagacttagcagctaccatgtaggcacgaaacccacaggaaaatacgttttaccgtcagagattattaacctgtagaaaaatgaccatggagaaattccattttccttgtagttttccctacagaaaaacaatgagatgagggattccccacttatgtattactccaggtcctctgtgcccttccacaactaatatgggactattcaacacttcttttctgagaatcaacaaacatattcgataccctaccgaatttcgccgttgttattttgaaaaaataataatcaaatgctagttaactgttcttattgaagttgcatggcacattagatggtttaattatagtatagctaaatgctagctacaataattgacatgcacatatataatcatctacaaccaatgtagtagctcatctatacaatagttataaatatatatacttacgccattagtacatggcacacctcattgttgtctcacaaagtgtgtgttacagccgaggcctgtgttgtagccaggtacaaatttgttgcccgtttctcttctcttcaacttatcacaaatatgatatgcaattcttatagtccgcttttacatacttgctctaacaacaaacattttgatcaactacaaatgtaaaatcagcaaagaaaacatttaaatcctaaaatgtgaaataggtataggttggccacataaagtgagagactgggagttactctaaggaaaatctgttaagcctatgtttggttggagggaattgttaggagagaataaaagtttgagaggtgggaactgttaagtttactatctattggttagtaggcataggagttttagaaggtatttagaagtgaagtttaagagcaaatgtataactttttaataattaggtaggaggagagaataaaagtttgagagctatttagaagtgaagtttaagagcagattctaccttttcaattaggtaggggtggtagttagcagggaatttccatgacgaattaatctaagccatacattattacttataattcaactcccacccgaatttttcataattctcgtttgtattaccagacaagggatgacggggagtaaaactaaaactccgatgaccaatcactccaccaactccctcgtctaagagcatgccgaagagaagtctaaaaattcatcccaaaattatgatattgggattccaaatcatattttaagatcgataaaattgatttttctctccgacaaatatatcaaaactgactcttaataacaaaaagtgagctcattctaccaacaaaaacaaaaatccatctcccctctcatgggcgcacgccacatgtttttcttcccccctcccataggggaacacagtaggattgggagcgaacatatcccttagtagaagtagagggcgaaaattccagagttggggattccaagttctgctttctatatatgggtacttttggatttgatattttccaccagagatcaaataatttggtattgaggttgatgtcctcttactaaaagttgccaaacgcacgctaagattaagtacttccccaatgggtagtagtaatattaacaccgtgaactaccaatgctgcagttgaacaaacattccttacttttttagcagcatgcacttgcacgccatcaattttaatttccactgtgatgcgtaagtaacatgcagcaacacttagcagcactgtatatataaagcacaacacagtggtactaatccatcaaattaaagcagtgcgaaaagttatagctatagcttgtctatctatccctaaaagacacaattgtctgcctgtacgtctagctagctctagttactagactatggcaatggagatgatgaccaacaccaccatcgtgcggctgcccgcgtacatgcgggaggcgaacaaaggcctctttgagcctagggtgatctccattggcccctatcaccgcagcaacgagagcacccacgacatggaagcttacaaggagcgcttcctccggcagtgttttgccccgcctctaggtcatatgaatcttgaacaatgcattcaagacattgctcgtaattctcttgcagaagctctcgagaattatagtggcaatgttggcgactacaccgcggagatgctcaccctggacgggtgcttcatcattgagctcctcatccggtggaacatgggaagactcaaccatgacagttacgtgcggtcgatgcggaacagcatatactacgacctcctcctggtcgataaccagatacctttcttcattctctctaggctttttcacaagttgaagggggatgaagagctcgacaacgccgatgttgagaatgagttgctcacacttgctaagaaattcttcaaccacgagggtcaattctcttgggctaagtctccaggcctgttagatctttctaatgcaagtgaggttcgtcatttgcttgaccttcagtacaagcttatcatcagcaccaatgacacgacgattagtattgaccagacggacaatagttacctgcgaggaatccctggggcaaatgagctcgaagactatggtgttaaattctaccaggatgaggatgaacacaccaaaatgtttgacgtgaaatttgagggtacaaacatgatgatccctcgctttgaaatcaactttggctccaagatactattggcaaacctcttcgcttatgaccaatcaagggacaacgtacgacctcatcaaggggaccaaactgaggaccaaccggacaacacagttggactcgtgacgagctatgtggtgctcatgaacgctctcatcaacaccaaacgtgacgtcatggttctccagcgtgagggcatcctcgacaacctgctgtcaagtgaggaagaggtagcatccttcttcaacaatctcggcaggtgtgccttggtggatgtgacaaagcatcactacactaccatgttcaacaatgtgaacaggtactgtaggaacccattcagtcttggaaggcacttagtgatcttacgcaggaagcatttcagcaacccgtggactttcttctctctggtgggtgcacttatgctcctaggcttttcattcacctccatgctcttcaccatcctcaagtataaacatcgctagacactagcgttacacctcacgtgttcagtgttctcacgttattttatgatctcgcaccaaatgaatatgtgaccgtgctatctatttatgttattactataatattttgtataatgtcaccaaaaaatatcgttccatcaggagacagaaggatctaaaaaatcagtggccaaccactcgtacacatgagtggatataggaagaatccaatcgagatgactacttggttaatctgttctctcatgtaattttttttttcatttcatacattccctgatcatgttacttcttttagtttgtaatccttgtgtgtggattttatttcctgccttaattcctgtcatgtttgtacttctacttgtgtaaaagttgttccccatctttatcatgaataaaatctgtgttactgtcgtgtactgttttgcaagagcacttatctccctaaatattttttgaggggttcactgcactacacaaatcctatatacttatatagttcatccccactaagtgtagttaatgttatttctctcttatctcattaagccacatcatcccaattatttctagcctttgaatgataaatttatggtctaaattgtctcttctttcttctcttataaaacatgtaatcccaattatttttgggcccaaaattgtatcaaattattttagttttgataatcaaattacattttatttgtacatattatgcaaattaattttccgcagcaacgcggtggggtattcatctagttacaaatacaaacaagctcagttaacattctccttattttttctccatgtatatataagtcatgtttcattgaatttttgtgaggtggtggatggcgtggtaaagtacattacaaaatattaccagaaatataatgtatctgttttttttttgtcttttacggtaacttttacaagtggtatatatagtacatacaacagtatagttaataaatccaaccactcattaacagggtaatttgggcctttaatccgacaacgatattaggctattctagggttagggtgtgtttgcaagaggaagttgggaacctatctcacacggaaaatgaaacgatccattagcgcgtgataattaagtattagctattttttttaaaaaaatagattaatttaaattttttaagcaactttcatatagaaactttttgcaaaaaacgcaccgtttagtagtttgaaaaatgtacgtgtagaaaacgagggagttgggttgggaagcaagaggtccgaacacacctagcagtttgacatgctccttccatccactcggcctcttgggactagctccgctaccgccacttcactgccagctatagcagttgcgaaatttggcccatacgaactcctaaattcggcctaaacatgtgcaaatttcacccgaaaatgttgctgcgtggatatatattatgacagcgtgcggcgccgctggcctcctcctccatcgctgctcgccgcggccaggcttgggagcagcggatatgccgccgacggcgctcccgggcctagggcggccagatcacgtggcggcggtccccaggtggctcggcgatggcgtgcggctgcgtcgacggcttgcagcggcggccccggggtggcttggcgacggcgtgccacagcgtcgacggcttgcgcagcgccagccttctccgccgcggcaggcctagtacggctcggtggcagcggtgcagcgacgacggcggaggcgtcagctgcgtcattcgtgagcctgagttcttgagcaccgaggtaatggtcagcctgctcccctttgatcgggtctcatccttcgcgagcctaagttcttgagcatagaggaatgaacagcagcagtacttggtttggctgggttgagagcagatcttggaattgcatgatttgtagagggatggggagcaacagtctcatccattttgctatgcctgagtgcctgactcaactttctatgcctaatccaacaatcttgctatgtagaagtcttactgttttgctatgggttacattatgattttattgtgcctaactcatgaattttgctatgcctataccttagttaatttcatgaataatatgctattgcaagcactaattgagatgtggtcagatccaaggcgcaaaggtatagacttggaatgttgttgaaatcatgatactgttccaaaatcttactactttatgtttaagatccatgtattatatatgtagtcgtgcttacatggtattgcctactataagatccatatattatgtatgtttaagatccatgctgcatttgatttcgtttagttctacacgttctttctcttctcttcaattctcaacttatgctttgtaggtgttgatccgaccatgttggttgtctactccaataggtgatggtaagagcagatgagaatggtgaaggtaaagctggcctaggtgagacctatgcaattcattcttcaataatccgaaacttcttgtgttgttttttcttaatcctggtcacatgaacatatagcatttttatccattaaaggggaaatttaagtctagtagttagcagtcattttgtcatgcgatttaaagtcagttttgtggttttgtttgaagaagagtacttagcagttacttgctaaaatcgactctgttatgcatagtattaaagtagaattggtatatggatggtttttgttcaacgttagtacaaaactagtaaagctcaggggataagagagctgttgacgcaggaaagttgtgtgttgcgcaattaacaggtgtcggtttaaatttaaatttatgttctataaactggggcttaattcctaaattttgttgtctcacagatgcctaagaggactacatttgaggttgttgcagagtatggttggctgagttggacattgattttttgctgagttacatgtgggtggaactagtgtggacttagtgaatctagtttgctcttgtggtcaggggcgcagctgtggggggtgccggagggggccaacaccccctatccgaaccatccccacaccccctcctctcattcctgttgttgtatggctgtacttacaatgttacttctaaaaaaacattagcaagaaacatgattacaaatttagtttatgatttctcatcttttttcaaagtaaaatagaagatacttatttgtgtgattattcagtagtttagattgaaaggatttagcaatagagcctagttccaaaatgtaaaggactagtttacgcattgatttttattgatggtgactatttggtctcctttgctatcttttgagattagcggggtatggagtggttgttcgttcttatagcttatcctcaccccacacccccctaatatcaaatcctggcttcaccactgcttgtggttgtatttggtaagttaacctaggaacttattttgatatctaggatttagtgaagatgtactaaacttattattttgctatggtctatacagagatcacctgtatatgtgaatgagctttgattgtatgagactaggctttacctgtatgcggctgggatgataaatggacttgtgctatattgaataataattgggcttatatatattatgatatatgggttctttacatctcgagcttatatgggcttttgtaatgggcttatatggtcattcctctatcttatcggacctacaattatgcttagcccataaacatattgctccatacatggaccttaacagcccataagaaatttcatgatgattcaggttgtcacaattaacatgccatgtcagctccatgtggcattgtactacaattttatgatgtttcttgtcctacatggaaactgcatagtcatccaggctttgtgatttgtgacgttttccggcttcataatgacgaacatgagcgtcataactcaatgacgaaagaaggatcgtcactagtttaatgatgaaaagatatgattttgtcacagaacatgattagagacacatgataggtgacgattgacttttgatcacgcgatcgtcatagaatttgaaatgtgacatattttgtagtttttgtgacataaatgaaacgctatcataagatcttttgtagtgtacacacatgctaaatcatcattttcaaatatttcaatccaaatcatttcatcatttctccaatatctaatatatagcccgtactaaagcgcggggcatggcagctcgggatcttggggttcctggcccaactaccctagggagaaagcctgctggggaaacttccacgggataaactgtgcctttggaagcccgcgaggaggggaaaacctgggccaatcaacgtcgtttccatgggaaacaatcctggcctcacagggtcggaaatattttctccgtcgcttcctcggttggttcctccacctcctgccctctcataaagtcgcaaggccatcaccgcctctcctctggcgagacgccactactgccgccatgccttcccctctggtgagatgcatgctacctccgcgcttctccctctcctgagacgccactgccaagtctcccttcttgataccccctcgcgatttcaactactgtcctcttctgttccaaattgtttgtgaattttctgaacttttattgaattctgtatgtattttccatatgcacacttaaatatcccgaaaaaaatgttgatattctgaattttctatgaactttcagatttctttgtcacctgattttttcctgctaattagttattctaatttttgttttactatactacaaggcatttctatcatgcgagaaatcagtgggtttcctgggaagctaggtcgtgcgagcaatccaaatgacgcagtggattttccctggaagcggaggggcttcatatgtcacagggaaaatccctgtgggggagctatttccctcggtttttttatttccccttagctcccaaaggagtcctaaagagacgatgcgaatatgtgatgtgaactacccaacgtcaaatacaaaatactggagagagtaaaaatagtgaaagaggttgtcgggtgatgtttcttgagcctctaggtttagtaaactaggtcaaatcacgcgcgttgttgtcagagtttcatatgataatagtagaaaaaataatgtgtaaaatagctagacgatatgagcttatataatttgcttatctaatcaattatttcaaatgctataaatcattaggtttatgataatttaaataatatgtaaattgatgatccaaatataaaaataaggtggtatgagtttaggagagaaggaaaaatgaacaagacaatttggcccatggattaataataacaattgatgtggtgtggtttaatgacagaagaaacattaagtaagtaaggaagaactatttggatatatatatatatatatatatatatatatatatatatatatatatattaaatttgtttggtgctccatggtgcccgggcaccatggttgaaattgagtatatacccaattcaaatgagtatgaaactttttcaaatatttaggtattaacattaactactttactaactagttcaaagcaagtttgaactgaatttgaacttgtttttgttagattttgattctaggtatatagcatccaaatatataattagttagttatgtaatcatggattgtgaaataaagttaaatttgagttatttgttgataggtataggtatgaatcgaattcttataactaggtatatactcacaatttgaaaattttaaaaaatttaagtgattttgtgcatttgataccatggtgccccatatgagtgtcatatatatatatatatgatatatgatataataaaaaaataatggatatgtatatagtaaaatactatgtaagttatgggggataatgattcaacatttttacattttaaagctctgaaacatagtaaagtattcataatatagcatgtaagaatgaggtttaatatgatggtgtgatatttttgtattttgagttttagaatgtagtgcgctgtaataactatataaaaataatatatgttaggggatcaatgaccacactctgttttttctttaaaggaaaagaccgcactctgttttcactctttgaatcagtttgttttacacacaaaaaaacacacacacctggttttgcttcttttcaattgaaagtaacatcgtatgtgacgccctgtcgttattttcaaggccatgtttagttgttttggaaaaaaaaattgacgtatacggacacacatttgaaatattaaacgtagactaataacaaaacaaattatagattccgcatgtaaactgcgagatgaatctattaagcctaattaatccatcattagcaaatgtttattgtagtaccacattatcaaatcatggcgtaattaggctcaaaagattcgtctcgcaatttatatgtaaactgtgcaattggctttttttttccacatttaatgctccatgcatgtgtctaaacatttgatgtgacggaaaagttggaagtttgaatggaactaaacacagcccaattcaatcactttctatgcttactgtagacaagttacattaagcatttttaatcaaagcaaaactggcaaattctcattcaaatcctaaaatacaaagttgtgcaagttgactgcaccaagtgggaggcaaggagttgctctatgagggaaatccgttgaccttaagatcaagtatttcctcaacagtagtaataaatacaaaaaactacaggtcctgcagctgggtaaacatttccttaactgatttaaacttaaactaaatttagcaacacttgcacgccatcaattttaatttctgctgtgatgtgtatgactacgtaagtaacatgccgctagccatatatcacgtatcaccatgtatatgtgataactatatatataaggcaccatgcactagtattaatccatcaagttatacaagaaatacacagtcgtttataaaaaaatacaagaaatacacaagttctacgattgtcttgtctgccgctattgctatggagatcaacaacttggtgcagctcccgacatacatgcgggaggccaataggggtttgttcgagcctagagtggtctccatcggcccctatcaccatggcaacaagagcaccagcaatatggaagttcacaagaaccgattctgccgtagcttcttgcagcggctgggcaatgtgagccatcaagatgcaattgaccactgtatcgaaggagctttccggtgctacagcggcaatgttggcttgtacaccgcggacatgctcacgcgtgacgggtgcttcatcgtcgagctcctcctccagtggagagagggagaccatgcccatgtcgacaatcacatgcagttgatgtcgaacagcatatactacgacctcctcctggtcgataaccaaataccgttcttcgttctcgacaggcttttcaatgaattcaggaggcacatgggtgcaaatcctgtcttcaacaatgactcccagttggttgacctagtaaccgaattcttcaacaacaggcagggtcagttttcctgggctaatttggaccagttgaggctgccagatgcgacgaatcagcagattcgtcatttgcttgatcttcagtacaagcttgtcatcaacaacaacatggggattgaaccaaataatcgtaattgtccatttagcctgtgcatcaacatctgtcccaatacgattgtgccacgaggaatcccagcggcaagcgagctacaagacaacggtgtgagattccgagtgaggggattgagtgagcaggtcaaaatgtttgacgcgacatttcagggtaagatcattaggatccctcgttttcagataaatttcggctccaagatcctactggcaaacctcttcgcttacgatcaaatcaagggagaaccagctgacaacggtgctgctgtcggacctgtgacaagctacgtggtgctcatgaacgcgctcatcaacaccagagaagacgtcgcggttctccagaggaagggcatcctggacaacctgctgtcgaacgaggacgaggtggcctccttcttcaacgagctcggcaggtgtgcgttggtggatgtgagcaatcaccggtacactagcatgttcgaagatgtcaacaggtactggaggaatgggttttgctgcaagtacttcgcgatctgctgcatgaggcattgcaaaaacccgttgacttgcctctcgttactggctgcattcctactcttgagcttttcttgtacctccatggtcttcgccattctcaagtactatacacgtggctagcatatgcattaccacctcagaccattaatttcattcctcctgaatcagatgcatgggagtgccagtgctagcgtacgtattgtgtagtgtaattactgttagataatgttacccggccacaataatagcattcaaaaatcagttgccgtaatcctatccatgaacaaattaaagaatccgatcaagatattgctacttggttcagcatattctctatgtgcatgtaaagtttgttttatttcacatatttcctggtcatgttcctgtttttaatttgtaatccttgtttgcgagtatatttttatttctgagtttcatgtcatgcgcgcatgaatgtgcaagcattgttatgtacgaactgcttctgtaaaagttgttactatatatgtatgaatttgtgcttttgtgaactatggtagtattttgcaagggcacttagctcgcgctaattaaactttttacgactcactttaccagaactaataaaacaaaattgctcacttaacatttctcaatgaacaattccaacaaaatctttttatttcttgtttaattattttgaattttaaagtattcccctatccgatctacattttcagaccaaaataggcttatttgggaccgaatggatgtggcctcctaagccaagttaacaagcactattgggaggctactgcaaatcaggcactcgattttaaaaattgtacgttgtttcggtatttgtagaaaaatatttcaccactaacttaacacatgtttcagactattaaaataatgaaacacggttaaatcatgcatcggaacactttgttctgaaacacaaaacataaataaactattaaaagtttttatgtgaacttatgcttttgtaagagttctctgtttcactctcatagactattttgcaagggcacttattagctccctaattaaacattttagggctcactttaacagaaaccaaaacaaaattgcccacttaacggctgaacctctgattaaataaagatagacatttgcttctcttcaatctattgaacaagttaagcgctcccttcgtcccgttctactcgctaagatttaaatatatcatatactatgatatttgtagcaacaaaattataatcatataataataaattaatttataataaactgtttatggatcaaatatttaaagagttaaatattaaaatacgtgcgcgtcgagtgaacggagggagtactttacgcaaactgttggtctcaattgagccgcacgttcgacccaatttacccaaattgttgggccgaaataaagcagacttgtggaccggattgaagcgtcgtacattgcttacgtacaggccgaatttgctcttaccattaggctgaacttacgaaaaatttcagggtgaatttattcatcacatattcaaatgaacaaaagtatatagtatataaaaaagggtgtagttttgaacggagggagtatatttttgggctgtgcagacgccgtgctcggcacactgctgcgcatgaatgatagaaaaaaaggtggttggtgaaaaaaaactattcatgcatcttcctgcagctgactccaagaaaacgatttccttcatactccactacagcatgctcaccaagaccagttgttttacattaagaccataaacaaccttgacgactgctgaaacattttcttcacttgttttcaagcctctcgtgggagaatcggcataacaattcaaatggtcaagcagacgtattagaggggtttggacgactatcgatcctacctacgattatacaaacctgttacatgaatcttcgatgcaacctctctctcctttgtatatttctttcttgactacgttgaggggctagattcctgaatcagaactaagaaatattaatgtaattacgcacgagatcgctaattagcgatcgatagcctgagacgatcaatttttttttcgccatatagtttttttcttttcgagtaagtttatatatctaaagtttacacacctaaaaattataggtcaaaagtttatatacccgattcaaattcgaattcggattcaaatattttatatatagaatatttctatacataaagtttatacgtgcattattttcctcttttagtaagtttatacacctaaagttacacatataaagtttatccacgtaaagtttgtagagcgaatgtttataagtcaaaagtttatatacccgattcaaattcaaattcggattcaaatattttatatatagaatatttctatacataaaatatttctatacataaagtttatgcgtgcaaagtttacagtataaagtctatgcacatgaatgagagtattagattttttaaaattttttttactaactttgttttttttttaaatttatgatgaaaagagagaagggactggagtatagtggagaggggcgggttgatcgtagggagcgatcacccgcccattgggggcgcccaattacgcagcagctgagtggtcgaccaagtcatcaatcggtcctgcattttatattacctctattttctaatatataataccattgattttttataaacgtgtaatcatttggctcccgataaaaaaaagtttaaccatttatcttattcaattttttttcaaacataaaaaaatttaagctgtgcttaaagaacatttgataataaattaagtcacaataaaataaataataattacatatttttaaataagacaaatggttaaacgtatcttaaaaaatcaataacatcatattgaaaaatggagaagtactatggtgcagacccagtatcgcgcgccccctcatttgatgttgctctctccccgcgttggctctcctttatataccttgacaagcctagaggcgagaggctagtggatctggacatgcactttaccgtcctttatttgctatataaatttattggattttttgaaacaaatatgaacttgttggaaaatcacatagacttccacaaagtgcactgctggctagtacaaggatatatgtgtacttgtgaccaataatataacaatgggcctgttaggtgtgactagataacagccagcagctacagtagcaccatataatttttaccatagtcgcagcagcagcgccgcacaaccactgcaattggacagccgaacacacccaatgtaacccatggagacaagtacagccatgtcactcaattactgtaacagtaaaacaacatgcacctcaccttcatccgaagagatcagaaatagcacctaataagctcatcaacgacacatgtgacatatattcttgttcaactctatgttctacatccgctccagcatggttgatgcccctttgattcaaaagaaaattcatagtaattttagaggatttcacttttatatgattttttttctacatagccctttgaatgaaaggaatgaacctcatggaatcctatgaaattccaatggaatgcctctttccacgtaagttttggagaaaatttaacaagaggtagaacctcatggaaagaatcctttgagtctttatctcttttcaaatttctgtgtttttcttgcggcccgatcaaacaatcattcatatgttttttctatgtgttctaatcatttgttttatacttgtatttctatcggaatcccatattttttctattctttttttttcattcctgtgatttaaaatagccacaagtcttgggccaagaacatgtcgccatcaaggtactacgtacctgactcatcacatactcaggccctgtttatttcgcgaaaagaaaatttttgggtgacgtttcaccggatgtcggaaggagttttcggacacgaatgaaaaaactaattaaggctaattaatctgtcattaacatatatgggatactatattacttatggctaatcatggactaattaggctcaaaaaatttgtctcgagatttccatgcaaactatgcaattagttttttcttttgatctatatttaatgcttaatgcatgtgtcaaagattcgatgtgatgtttttgggaaaaaaattgggaaccgggcagtgttccgtgcactggaagcatggtcccacacacagtaatctaacgacgtggtgtgaggcggacctcattgcgttaactgacgtgagaagtggccgttgcgagacaccttttccgtctggaggcagcgcatccaatgcgctttccctttcttcctcctctcgctgctgctctcccagtgcttcggcggtcgtcgatgcgacccaggcctgtggcggagaatcgattcccctcgcctgcagcccccatgctcccccatcgattctcgctcgcgtgtcatcttgcggcaacggtcaggtaaatgtgccggaaacgggcggaagtggagaagccacactgctctcgagttgtctacgtcatcctcgagggcggtaaaagccggccggcgtgctcgatgtgtgcatcacgcatcggcgctcgtcaggccgcccagctttggcagactggccatgtttgtgctcatactctcggcctctcgggtgacacagcgctggcgtgaagagtcgcatcaaggcgtccaagctggcggagttgaggagccacctctatttgaggccgagtgtgtgcatggtcggatagagatgagagcgaagaagcggaagcgagagcgggagctcttgcggatcgcattggagggggcgattgttgaatcccctcaagccgtgccgatctctgtccgtggcgccgatctggagtccggcgagggttcctccgactctgtcacctccgacgctggcagcgctaaggctgcagctgacgacgtggttcatatcgcgcatgccctttgtaaggtttgcgccaagtctcctaaagccgtcaacgagtttgttcgaagagtgagccctgccaccgtcggccgttcaattgattgggacctcgtccgcgacaacgactcatcgaaggtattgtggcttgtctacattttttctttccgattcaatttgggttgacttgcatgtagtagatgtccgataggcgtcaccgctggaccgatatggaggttcgtgtgtttcttgagagttgcttggaggagatggcagcttacaacatcacctccaactcccccaagccctaggcatgggagaatctggcgaaaaaaatgtacagcaagtgtaggaagagggtgaacaaggctcaattggagtacatttgggggcagtgtaagaagcggttccacatgtgggtgtggttagaatcgcaggctaccgggctgggtcgtgatccccttacttcagccattgtcgctaatgattcatggtgggaaagcaagaatgcggtatgtacactacatgaccgctggagcaggtcgccggagggtgcaggtccgctgggttggcggcaaggcttcctcctcagtccccttcctagagagggggcggcacggtgggtctcgcctggctccggcgagcgacgcagtggaggtgatgccgacggcggtagcggtcgcgcccggtggcagtcggcaaggcaggcgcctatggcgtcggttggccggggggtggtggcaacggtggaggttgccggttagtggggcgctccggtgatgggcatggttgctgtgtggcggcaagttctccatcaccggtggtctcaatgggcggcggtgataggggctagcacaccgttccttcctttgtcatcgacggcgtcgcggacttggtgggtagctgtgctggatggagatggagctaatcctctatcccctccttcgtcactggcagactcggtgggcgacagcggcagacttggtgggcgacagcggcgcaaaggtggcagcgggttgggagtccaagaacggaggaggattctgaagtcaacggcagccctatgggcggcggaggcttaggaatccggcgaagcaaacacaattgctttcaactagcgtctggtcggctagttttgaccggaggacgatggatgagggtgggcttcctggcggccgtggcatcggttcacttgaagcggatgaagatgacatctatggagattcgcagagacaacacactaggggtggtggcgtctagatgatttccacttgttgtttttggccgtttcagttgaggatgtcaggatgcagggatgtaccgaggttgtaggttttcttgtttttttggtttgttatctcctctttgttgaggtgtgagtttaagtactcttgtatccttttggctgtgtatatcccttgtggatatagaggccggattaatgaaaatccattatctaaaaaaaatggtatgaactgcaatttattatatgcatatagttatattttcagtttgtcaggacaaaaatcagtttctctccttgtgtttgtcgaaacaaatgaccagctgtagtaatggaagcattgtgctcatatatgctttatagttagaactgtgcatacatgttgtagccagttgtgccattcccttttatttagagcagttggtaagttaaaaaatgtttaattcatcaatggtcgagcataactatgaattcagttgatgggcactgattgcaaaaagttatcagtaattgatattgtacatgtgacagttgaggaacatgttcaatttataattgagtgcatttcacattgcaccatgtattatgtgtttgcactagttggcagtagtttgaaccatgcattatgtattagatgttcaatttaaaaggtccacagcaatcttttaacttacaacatagatgtttgcactagttggcactttggactagggttgatcacatgaaatgaagttgtcagagataacatagttgacatcatcaattctactgccatagtaataagaacaatatatttagaaacaagtagatgttatgtttctaaagagatgtatagtttagaaacaagtagaagttttgtttctaacaagtagatgtttagaaagtaaaaacttatgtaagatttatagtttgtagttactacattgacttaaccctagttcattgtacaacgtacctttgtcaaaatctgtggcccattgtaaaatgtactctttattataaaaatttgtagcaatatacacttggactgctagcattttggtagtaatgcacttggacttcatagctgctatggtttaaacattcatcgatgaatgtttgccctagattaatacacctgcacacgctagttatgtttatatggatcggaaacttaatgttgtgacctgtctccagcaatctcatgctgttcatgtgaaatgttttcaatcaacaaacaagtgcagtttcatgtatggcatcaaatcacataaatcatgacagtttaatttcaaaagggaccatgacttttttttagaacatatggctgtaagatattcatggagatttttgtcaaatgtgacttactacctgatccctttttcttcttcagaatctagataaattatgttggtacgatttcactgatcaccattaattgataatgttgacaaggtttatgtccagatgactatttcagcatagcttgtcacttcatatcccctttatctgttttaaacaacttacctttttgttttgggtgtagagtgttggaattgaaaattgatttgacttgaacttgtacaataagtggttttggttcactcatgtttgcatgatttttccccttcagtacaagttgccttaatagtccatatggtagtaatgcacctggactgctagcattgtaaaacagaaagtagtaatgcacttggactcttctggttcccagtaaaaacacactgttgaagtattcatgcatgggattatgggtgtgttgtttctgaacaaacagagttgattgcatactctgttcttcctttataccttcctgtaaacagaacgttatgccctgtccagtgccattttttgttccactgaccaatctgtactctgcaaattggccctgttttgtcatgcataatctgcctatgttcactagtacaagtagtgcatttgtgtgactgcttccttgctgaaatttgctactcaaaatctgggtaacttcactctgaaactatgcatattgtgttgagataaatatgtattgtgtctgaaattgcagcagcaggtgttgtatttcacagctgcactatatatttgctgtcatcatccagaaaataattcattttgtttgtaacaaggctttgcttgcatcagtacatatcatctgtgcattatgtaacttcttggtgtccacttctgtcaccggtcaagaaaggtgtgatcagcttcaaaaatgatcctctcaagcacattgaccttcaccacgtggtattcagcaggcgcaccgttgtcggaaaccactcggccatcgtggcggctgcaccagccacaccgcaaggagcagttcagtggtagaccattgacgtgacgcagctcgcagcagcttaggccattcacagtgcgccaccaagttttagcgttcttcgcatgccacatagaccaagaactgtataagctacatgcttcacagtgcaagccacagctcaagttgcatccaacggggcctaccatgtctcctttactccactctctcttctctctctctttaccttttcaccttttcatctcaacgctctctctctcttctggcatggatgaccagcttttctgacctttttctgaccgagtgcgaggaggttctcgtggccaaacttggtcacgcgaagcaatggaaagaacggtccccactgccctctctcctccacgtaagcgatttgtctagctggtcaaacattgccacacgccacgtgtgtgcactgtgaatgcccttatagaccaccaatgccatctccaccaccactggctgcagataagggtaagggaaagaggggagaaagaaacagacagtgttgtctcagggagttcttccaagaagtcctgaagcgactccgctaggcgggcactggagaggcttgcggacctccgagagctgtccatgcagagccgtgcaatggaggcagaggcagctaaggctacagggcttgaggcttgcttggagttggtggaaaatgatgggcaccctactggaggcccggtgtcgtcttttccgtgacccattccactaccgttgtttcgttcacctcaaggacgccgccgctcgcctggaatatagtatcaccactcgtggaaatggagctgattcctcttctggtggcacacagtagtttgtacactacacttcaatttgagtcctgttgtgtgttgtttttacaaataaacctattttgatgtttataacctcatgtgtgctaacatttggtacgatgtgctgagtttatgcaacagttgcggctttggctttattactccatttgtgcaaatttatatatcattgcatagcaggctttattactccatttgtgcaaatttatatttcattacattgctatgttgtttgccgacatatagtagtatggttacatttttcattgcaattaattttttttgatgcattcgataatgacaatgtcttgtcatcttttcgggttgtgctggtggatcgagctggacgggaggtcacacaagcagcgacgaggacgatgccatcattgagatagtagctactagttttgatattaatgagagagcaccaaggagaatactggtgtaaaccggaatcagttggacagtggaaacgttggtgaatcaaagccaatgtcgggaaatgttcagactcactgcaaaacaaatacacaatttacatgatctcctggtcacgtcgtgcagactccgaggaatagccagggtatgttcactagaaaagtttaggattttcttgtacactatgggtggaaatcgtccatgcagaggcgcgaacaatcggtgggtttgctacaactcaacagtgtcgattcacttccaccaagttttgttggctatgaacgacctggcttggaaaatatcgaaaccagtggatcccaacttcattgaatatcacccttcaattctgaatcaaaatcctttcaaaccattttaccagtcagtgggtgttgttgatggcacgcatgtttcagttcttactaattcagctagcgctatccaacacaggaaccggcaccacataacaacaaaaaatgttctagtgatatatgatcacgaggggagaattattttctgcgatactggatggccagatcagtttacgaccaaaggattctgaacgagacagtgcagtattaccccgatgattttccatgggtaccgtttggtgacttcaatttttccatacaatatttgtgtggcatatgtcattacatttgaagcctgacgtgtgaactaaaatttattttatcacattaaccagacaggtacctacttgtagactctggatttcctagtaggatgggatttcttgcaccgtacccacatgtacggtaccacagagatcaacttgctgtcaacggagcgctgccacccataggacgtgaagagacttctaaccatcgacactcgtcgttgcgaggtgtcgttgaaagacaatttggcatcgtcaaaaaaatgtggaaaataataaaagaaatagaggaggagatccccacacgcatcatacatgctccttttcctattcacaatttcaggttggatagttatgatgagaactaccgtcaaactaatcctctgtacaacggctatcccgtgccgctgcagaacgattcgctcgatcaaatgtactattcaacaaatagcgaggcagctatgagcatgttgcgtgactgcattgcttatgaggtctactatcactatcactagatgctgtgatccagccatgttagccataatgcgtgtggcatatgttgtttattaaattctttgagtctgtatagtttaaccagtactgatttatatacgatttacattaatatgtatggatttcgccagcactgattgaagagagtctgtacggttttacttattatgcatgtatttcgcattttataacttagttatcttattagttgggagttgtattactctgcgcaatttttttccatattattagcaaaattacagtacgacctcaattttgtgcggtgattttcatagtaccaccggaagagagggtacaaatttatgccatcactttcacgataaatttgattcactcattattgtatgaattgtttgataattcatttcttcttaatggtcaccctagtaatatttctggcaacgaaaataatcatcttcttctcaatatattcctagaactcatcaaatcttatgaaaaataatttcttaacaaatacctcctactaatgaaatggtttaagattttacatcgcacaattacgaaactgaatctatataaaatcgatgaaattaaatgaattttcaattttattacttatttcttctcattattttacgacccgagtgtgatgccttgtgtgcgtgtagcatttcctggcttgcatttataccctggtgcaacccaaggctgcttggtgcttgccgcgccgtctcgcctgcgcccgccggaaagtgtcggtagcccaacggcgccgtcggcgccatcccgcccatctgcttctacagtgcacagtttcctaactcccaaaatcgattcccatctgccacatacgaacagagcggcctcacatggctttgccttgcgttgggaagtggatgcgagcgcagaagtcttggcaaggctaaacttgtttaataatacagtcgacttgtaattagttatttatagtattatattagttcacccgtataatagttagctctttactattaatactagaaaaaataccattacattgcaatgggtgcgaacagtggcgaacctagaacaaaaattacccggggtacactacataatagttatctaattattcacaagtatactaatcaaaatagcataaattagttagaatttaacaattttacccggtgtcctgtgacaccggtaagttgtatgtgtgcacgccactgggtgcgaaggctattttaatcatattactgttagattttttttctaaaaaaatatatatatatgggatttttattttgatagtattgatatctaatttggaattcttattaggatgaggattataaagcaattgggagtccgactttcgtcccaagttagtatgtgagatttttaaaagaatttcttatacgattccttatgtatttccaaaagtgaacgaacttaaaaacagactcaaatatatggacgaagtatcaaagtattggcggaaatatgcatctttaatttttataattaatagtagaatgaaaatattttcaacttttataatataagtagagatagagataatacaagtagagatagagatagagaaatatatataaattcttttcttgtagattctgttgagatgttcatatggccacgattttatctcccacagtccatctatctagtgtctcatcatgtgcggcctattgcctggttctgtcgctgccgaaataaaaaaaccagcatgaacaacaaactgaatcggacgtggataaaatcatgccaaagtaaaaaaatcacgtgctctacgggatcgaactgaactgctcgccgacagacgaaaatctgaaaaaacctttatttttatctattatttttataatagataaaaataaagataggacatacttatctctctcacagagtttcttggttcttctcctctctctcttctcttctctcctccaccttagcatttagtcaacttacagcctactgttacgttgccgccggctgcatttgatcgatggtcaaaagatcctcatatccgttgccagcggctgcgtttcaatggacaaagattgtttggctaaattttttttacgtatacggacacatatttaaagtattaaacgtagcctaataacaaaataaattatagattccgcctgtaaactgcgagacgaatctattaagcctaattaatccgtcattagcaaatgtttacggtagcaccacattatcaaatcatagcgtaattaggctcaaaatattcgtctcgcaatttacatgcaaactgtgcaatttatttttttctacatttaatgctctatacatgtgtccaaatatttgatatgatggaatttttggaagtttaacgggaactaaacatggctaaaagagagaagatcgatttctctcattcttcacccgcaccacacgattcttgaattattaaacgcactgctacatgattgattttcttggacgcctcccccttttgtttccatgcggtccataagtggaaccgcacaggaaaatgggagggaccggcgccagaccatcgcccgcacaggaaaatcaattttcgtgtgcag

SEQ ID NO: 25699 - DNA, 26822 bp, Oryza sativa
tctctcccacctcactctctcactctctcccttggcgccccttgcccctacgcacgcccactccttttctctcccactcctctcctctctctcccggccggcccgcggtgacagcaagtggcggcgggtgatacagcggcggtgctcggcccctccctccctctccctcggctgcgagcgggaagaagggcggcgacaacagcagcgcgcccctcccctccctcaccttgcagatccggtggaggggaggcatgggggcaatggatccggcggcgtgcggcccctcccctccctccccttgtagatccggtggaggggaggcaggggcccgacggatctggcaaagccaggcgagaggcggcaggagggatgcggcccacacccctcaacggcggtaggcggtcggacagaggttcggcggcggccggatctgaaggtgcggcggcatcagcggccggtgtggaggtgcgacagcagtgtgggccatcgatgcatgtgagttgatgcccctcccctccctctcccttggctcccctctcctcccctccccttgcagatccagcggaggggaggggcatcttcggccgacgactacggatttggtgctggcgacaggagcggccggcggatccatagttgtcgaccgcgggggcgacggcggcgggcctcggctagggcagcggcggcggcggattagggttagggttttgtttttcttttttttgtttcgattttttattttctcgtccagacggcttaagtgcccgcacgtgaaaatccgattttcgcgcgtgggtgaggcactcagtacacgaaaatcgcgattttcccagacccctgggtgcgtgcaggccgtccacccgcccgcaaaaatcgaattagccgcatgcaataatcggttgtgtagtagtgacggtgtattttttagaaaaaaaatctattgaaaagttattttaaaattcatattaataaatttttaactttaaaataattaatacttaattaatcatacactaatgactcaccttgttttacgtatttctcaatttttttctctctctcaaatacttttcctccagtgatcagacaattacatcaactaggaaggaagcccgcacagatgcgcggacaatttattttttgtttattaaagaactactgaaaaaagtcatatatcatcataactaaccatagattacctcgtaaccttaccgtaaaagaaggaaatatttttaccgtgaaatattcaaaggtgggtatgcacacgtttataagcccgcttaggattgccttttacactattagttaaaagaatattttcaagaaaattggcgagggtggcatgaagcagcgccatggcagcgtggcttcttcgtcaacctcgcaaagagtagtcactacatatatgtataatttgagaaaaaactttatggctacaaagaaagaaacaaaaaactgctagatggggtggaccatatatgcactcttcttttttgtttttgacatctcttgtgtatgtacgtgcatagagagggattaggtggttttaggagcgagggcttacctgaataaatctaatttaatggttaaaaataatggattccccggtttaagtgaaaatcgatagcttgatgttttatttttgccttataaattttcttacattttctctaatttattagagcatcacatggcatcttctaagtgtttgtaggagtataggaacactgttactcatactcacaatctacttgtagtcaactattatttgttgtgattttgtggcatcctctacttagtgtcatctttatctttggtgcttgatgacatacgtgcttactggatgtcaaataattattaggtgcattgtgcatgcatatatcataagcaatataacttgacgattagtgacactggtttgtatatagaacttactacataggatttatcaaggacatatgattgatatattatactattcttgattcacaaagtatattatatactacatatttaattttagtacataagtaataagtttatggtaaagttctaaagtgcttatcggattggctactctgttatttatcgtgaccatgtttaccgaattgctaaatggtgtgtgttttacaaaataattttattatataagttttatagaaacaaataaattcattttcaagtttgtaatatctaatactcgattaatcttgtcctaatgacttgtgtctttatgcgtacccagggtaagctacatcaataagctatatcaaatgaaggctaagtaggagaacgaaggctaagtaggagaaaaaagttattgatatggtgtgaaatgaatatatttgaccttcaattttctaataatatatgaatagagtaaacacataatacatgaaaatatatttatgacaaattcagtaacatccttttgccatatcaaggagtgagtaatttttgaaaattctgcacacagttgaagtgtttttattttggaaaatgtaagtctaatttaactatcacataatctatacttttaatttatttatattttttatggatgttttgatgacatgctaataatgtgtttaaattattattttggtttcccatctaatctaaatgagaaaaagaaaagaaaaaataaggatgtaggacccgacgtgtgtatgtaccgtacataggtacatgtttttttcttaaggaggaaacatgcgtacgtactgtacgtaggtatgtacttttcttaaggaggaatacctaggtagctatgtgcatatatattggttggtagtgacattacgacgtggtcctttttacagataaatttaattattaatttttaagatagatctaatggttgaatataatgggtctaccagattaaatgaaaaccgatggtaagatgttttttttcttacaatttctatgatttattagtgcactacgtggcggtctaggaacgcttatagggtactatatggcggattataagcgtttgtaggaagtttatcctcttgattacttttttctctttatgaaaatatttgcaacaataatttttaagcgtttgtaggaaggttatcctcttgattatttttctcccttttctctttatgaaaatatttgcaacaataatttttaaataaccacaaccttccaaattaaatatttatttgtaacaatattttttagatcgtaataatttttaactttgaaatcgtatgttcattctttatctatttggaccattgtgttatttatgataaaaatcacaattagaatttatgacattttctgtctacttcactcgtaaaaatgtatattcttctaagttctattcattcaatcacatatgaaaattatataaacttgtgagtacatattatttcatcatgtaccacttcacttgtatgcataaataaaatagaaagtgactatatatattgttagctagatcgactttttaaagtctcacctgtaagaacaatacccgtgcagctgaaaacatatatttttaaatcatactttttcttctatatttatggagtaataaattttattttctactatagaaaatactattttaaaaaaccatctttttttttctaccggcgtaaatatattttttagggtcttatagcttttcttttttactcgcatatgtacgtatctttttctaggaacagtaccttttttatagattttatcgtacgtacgtacgtttctttaaatgaacagtacatataggtattatttttcaagtctgcatacgtacgtgagatttttccttttttacattgtgcgtaagtataacatataaatcgatgataatagaatttagattgtccgtataaacggtttcacttaaaatgcgcatgatatcaagaggaagcaaatagatctaatctaatggtctgaaataatgggtccaccaatttaaatgaaaatcgacggtgagattgtaaaatgtcacgtggcaacataggagcgtttgtaggtggcttaggagcgttagtaggaagtttattttttttggttaagtaaatccgatggtagaaaatatgggtccactgtatattagtgaaaatcgatggctagatgttttggttttttctaatttgctagagtgagacatggtgagatgagagcatttgtagaatgccatatttttaatggtttaagagtgtttttaggatgtttaatagacttttaatatataatagattatcaaacaactaactattatatatcagccccatacgtcgtgatgtatttaggaacacaatataacttttataatttaattaaagtacaacggaatcacaaattggatatataatttaaaaataatttagaagatagttcaagcaacattgacaggatattttatattattattatagatcttagtttaactatatatatttatatttgtgctgtagtttttttagaaaacagatcatcgatttttatgatgtattattttattgtcttttctatgtacgtgcgtactgttttttcttttctttccagtgaacagtacgtaaactatttgttttgtttttttaggtaagtacgcatgggagaaggacgtggtttgcatcctatcaacttgtacgtacatggcaacaatagtagtgcttaaatcattaaaaaagagaaagttattattttttaataatagatctaattcaatggtgtaaaatggcgggtccactaatttattcgacagcctaatccacattttcccttctcttgctcaatcggcctccacccacaggcgacctctagaaggaatacccgaaaggcaaacaaaccggtaagtagatggggctcaagagtgatcgagtggaaaagctcaagaggcatggcttctgcatcaatttgctcagacgttgtagatagtgttgcgcaaggtcaggaaaatgccctgctttaatttggtaccagattaatttggatttctgaattgtactaaggtagtttaagcttttctttagctttttggtggcatgtaaacgagataattcatttgcacataaataattaaatattaactattataaacttttaaaatgactttatttgatttttaaaagattttttttgaaaaatgtgttaacggaaaatgagaaagctggcctaattaaataagatattttcgtttgattttcccttgcagtaacgcggtcaagggaaaactctcacttggctggtgtgtctagcccatttcaaactttttagtccatattacatcggatgtttggatgctaatttagagtattaaatatagactaataacaaaacaaatttcataaatgagagctaatctgcgagacgaatttttaagcctaattaatctataattatgaaaaatttactatagcatcatattgtcaaatcatggcgtaattagacttaaaagattcgtctcgtgaattagtccaaggttatggaatgagttttgtaattaggatatgtttaatactccaaattagtgtcaactgatgtgacaggaacttaaataagtccctcttttccaaacaggccagctaccaactggaaggaaggtatggatggaatggaatgtggtcaaggacgaggactttgttgcgctgaagtatggacctgactgctgactgaggagagtgatgaccggtaaattcttagactgtcaagttgttgtatttcctccgttgatttttctattagttaaatttctttaagtttgattaagtctatagcaaaatataataacattttcaatacaaaacaaacattgtatcaaaatatatatattcgactccctatggaagcgaattttccaggatttaacggcattgtactttcagtggtaggcggcgtacccgtcaacagcgaggcgcctgtagtgacttcgtcaatctctaggatttgccggcctagtcttcgaaaatactcataggggtagggtttgcatgcgtgtgttcacaggggtgagtacgcgtgcgttgtactgtataattctaaaaaaattcaatattaaatttaatgaaactaatttggcgcatatatgttgctattttttttataaacttagtcaaatctaataaactttgattaagaaaaaaaatcaaacaacttataataaaaaaatgaacgagtacttgacttaattagctatgtgttggatgtctcaacggtgagctcgtagcgatacgtgcctttaaatagttacgatgagatgtgtactcggcacgtcctctcttccgttgttccttttgcccaacatactttggaatataaatcacacatacacgggctaagctgaagaagttatatagttgtccaaaaaataatcaatggcgatctcactgatcacctccctgctcttctccctaccccaacaatggcagcccgtcgtcctcacagggctccttcctgtcatcgtttccctcgtgctgctggcgaggaaagggcgcctcaagatgccaccgggcccggagcaggttcccctcctgggaaacctgcaccagctagctggcccgcagccgcaccgggccctgcgggacctggcccgggtccacggcccggtgatgcggctgcggctcgggaaggcgtcggccgtggtgttgacttcggcggaggcggcgtgggaggcgctcaggggccacgacctcgactgctgcacgcggcccgtgtccgcggggacgaggcgggtgacgtacggcatgaagaacgtggccttcgcgccctacggcgcgtactggcgcgaggtgcgcaagcttctcatggtcgagctgctcagcgcgcgccgcgttaaggctgcatggtacgcacgtcatgagcaggtgagtgtaacaaaaccggttgtgaaattcgatttcatccattactgttgtatggttttatctagaggatggtttcttagtaaagttatcttttatatatgtcacgtaagtttgatatgtattaagaaattaatatgaggtatcagtacttcacggtaccaaatcaattttgatcgttggatctaataatgtccatcctgtttaggtagatctaacgattagaaacgatttagtactgttaggtactagtacctcgagatgcctttttgctagaccagagcaaatctcacgtattttactacttcataattaggtggagaaactcttaagcactctacgccgcgcggagggaaagccggtggcgttggacgagcacatcctgagcctctccgacgggatcatcggcacggtggcgttcggcaacatctacggcagcgacaagttctcccagaacaagaacttccagcacgcgctcgacgacgtcatggagatgctctccggcgaagggtcctccgccgaggacctccagctccccgccgccgtcggccgcctcgtcgaccgcctcaccggcttcgccgcccgccgcgagcggatcttccggcagctcgactccttcttcgagatggtgatcgagcagcacctggaccctaaccgcgcgccgccggagaacggcggcgacctcgtcgacgtcctcatcggccactggaagaagaacgagcctcgtggcacattcagcttcaccaaggacaacgtcaaggccataatctttgtatgttaccccttccattttaaaatataaggcgtattaggttttcacacgagctccaacattttactttgattattagttttccttttcataatatattataattttaaatttaacataaaaaatattttaaaatataacttatttttagatactagtacattcataacactatacatatatttttatgtttaactattagtaaaaaaaataatattaactttccataaagcaaggactttttatattttcaaacggaaatgtcaaggctatagtatatagaaattaattcaacacttatatgtacagttcatgcatgaatataggcattcttaaacaaaagaaaagagttatctaaggtatagctagtacgtatatacttctagattcattaacatcaatatcaatatgatgtgggaaatgctagaatgacttacattgtgaaacagagggagtatttgataatattaatcaccttatgatgtgcagtcgactttcgttgctggtattgacacgaacgcagcgacgatattgtgggcaatgtcggagctggcccggaagccgcgggtgctgaagaaggtgcaggcggagatcagggctgcggtgggtgtaaacgggagggtgcaacctgatgacattacgaagctcagctaccttaggaaggtcgtgaaggagaccctgcggctgcacccgcctaccccgctgctactaccaagagagaccatgcggcacatccagatcagcgggtacgatgtgccggccaagacgcggatctacgtcaatgcatgggcgatcggtagagatccggcgagctggcccgatgagccggaggagttcaaccccgagaggttcgaggcaaacgagatagacttcaagggggaacatcctgagctgatgccatttggcactgggcggcggatatgcccaggcatggccatggccatggccaatgttgaatttacgctcgccaatctgctcttcgccttccagtggtcactcccggaggggacgacgccggacaatgtgtgcctggaggaagaagggaggcttgtctgtcaccgcaagacacctctcgtgcttgtgcccaccgtataccgtcacggccttgaatagaaatcgagcgatcaattttgcaattatctacagatcctataaaaacaagttatctacggatcttacaatggttggtgtcagcacactgaaagaaaaaaaaaagagtcgtgtgcatccgcgatggaccaaccaaaatttggagattaatttaaactacatagaaaatgtaataatttggattgatatattgtgtgtgtaaaaacatatgaattatagtgtgtaacataccacgaaatataccttgcaaatttgtgaatcaaatgtttctatcaataaagcaaaatccccccctatgtgctttactcattgagatttgttttttctttcttgcatctcatagtaagttttatatgcattaaataaacttagcaaaatttacacaaaaatcttgattgtcaaaaactttggaaacatttccaaaaatactaaacatcgcacaaaacatactatatttgtttttcataattttatcacttgatctagtacctcaataaatccatatgcaatttaattaataaaaacaataaacctatttcacaatttcactacattttaatcctatctccttttctagtgcattttggcccaagtactaaccaagttttcatatactactagtaattttttgctcaatttgaatccagatgtaaccacatgaaatgacactgcaaaacccctaagtgataaaacacaacagctgaccttaacaattagagaactttacagtttcaccactaatcaaccctaacacctctgcctgtgcaatttttccataatgctaaccactgcaccagtaattttgtcacaattttaaccattttctaacttggtgaaaacgggcgaaaacaactaactgaccacatcatgacacttaggctgcgttcaaacattctgttcggccgagctgatctgtcctcgcaaaatgagacaactcattagcgagattgactaagtattaactattataaattttcaaatatatttatttgatgtttaagaaactctttgtttttgtacgaaagacaccattttaatttgaaaagcgtgctccatggaaaaaataaaaatagcccagccaagtagaagattcgatcaaacccagccttagcctctagtcccattccccactctctttctcactactactgggcccaagtagccatggaccccgccaatcaacctcagaatgcgcgcatgccaactcaccctccttcgtgggccgtgcacacccttgcgtcgatggtgctttgccgaagcaaccaaagtgtgtcccaccaagaccgcatggcagacttgatgttttaacctcctagcttcgccaaacagcctctcctgcacgccctctatctgttccaaatgtgaactgaggaattcatactctggttcaccgggaaatggatgcattgccctcaatgttgggatcaagaaaccccttgattggtgccgcgagattggagctcggtgtcatcttcttcctcccaaataatttgccgccgccgtcgactaattccacaatcatgagtagtttaatgcacatgttatattaatgatgtttttaatgctatagtcatttgttaccaaagctatttggcaaagagaaaaatgtaaatgagttttgaaaatagttttgaaattaatggattataagttgagtatatatgtaatctaaaaggggtgtttaagcacgtttgatttgatatttatattgatcaagtttaacttgcatatatctggagtaataatttttgttaaattttgttttatagtattgaaaatcctattttgaagaccaactatatctttttcgatggttctactttttggcttttatagcatctaaattaacccgcaaagctatgggattataggtgaactggcgacggtcgtactcattgtcgtctgacaatactatttggtacttcctccgtttcacaatgtaaatcattctagcatttcccatattcatttgatgttaatatgtctagattcattaacatcaatatgaatacagtgaatgctagaatgacttacattgttaaacggagggaatacttgcttgttttggatttctaaattataaggtaattatattttaagacagacaagaagagtctctttgttagcatcggaataacgcggtctaagaggccaagagaagaccttctttgttggcatctccggcagccgccggcagggaaaactctctcttggtccacggacctgtcgattggaagacatggggtcaaggacgaggactttggtgagctgcagtctgggcttgactgatcacttgtgagtagtgacaataatgcaatcaatgcatattgttttttttttccaaatttggattgttttttctccaaaattgttttttttctctccaacagatttgcgcgtcgacctgcagccggccggagaaaactagactatcaagtcgttgtcgttctacttgacttaattagctgtgtacttgtacactgtcaactgtcaagaatcgtcgttcgtccgtgtcgatttgttgaggaattccagctcagaaatattttagtcaaaaatgtatactactatagttgaaaattttggctacattttcaactgtaatagtagtatttttgagctgggcaaacgccgtgccctgcactgcaaaactgctccgccgctgtcacacagcgcatgcgtggtaaaagaaagatggttggtgaaagtaattaaccattcatcttcgtcctgctgactccatgaaaaaacgatttcatatcatgctagtcaccaagaccagttgtttacttgttttacgttaagaccataaatgttttgaccactgctgagacattttgcagtttttttcaagcatctcgttgagagtatcggcatatcaattctaatggtcaagcagacgtatcagaggggctgggctatatacgaccctgtacacatgatgcttcgatgcacctttctcctttgtatctttcttatgaatcgacatctggggttggattattcctggaccagcactttcagtcatcagtgctacttctaccgtcccataataacttcatttttatcatattacttgtcccaatataactttatcttttaaacaattattgtgtcggagtgattactcaacaactgcatgtgaaaattggacggtcggcgatgaagcatttgtatctagtcggccaaaggtgaaaacggtgcaaatagcgtgtcgctgtgcatggggggattaaatttgaaaaatatattgttcattttttttttctcataaatatcttggatgtaaatttttcgatacaaatataccatcaatgctgctgaatccagtggcgaagctatattatgttgggggtgcacatgaaccctaaattcctaatttttcacttaaaaacattagaatgtacagtgttgtactgaaaatttctagattcttaatggtagtgcaccccttattttgatgctagcttcgcccctggctgaatccttatgtaaaagtgacatgtgacatggatgtgatgacgtaggcggtctcgcacgatgaaaacgcgagaccgcacgatgtcgcgtggaaacggcgtaagaccgagtgctctcgtgcagtaagcgtgcgagaccgaactcgtgcgactaccgtgcgtttgaaattggatatttagcaactaattaatattacctccatattttaatgtatgacgccattgactttttaatcaacgtttgaccattcgttttattaatttttttgtgcaaatatgaaaatattcatgtcatgcttaaagaacatttgatgatgaatcaagtcacaataaaataaatgataattatataaattttttgaataagacgaatggtcaaacgttagataaaaagtcaatggcgtcatataattagtgattaattatattaattattaattaattaattaataatttctaattagcataattaatccctgattagcggcaggaggcagcatgatgctcggtctcgctcgttgggcatgcttggtctcgcagcctggccacgcgacaccgagcggtacgtcttgcgccgcaatattgatggtttatttgtgccaataaaattatatcccgcataaaaaataaatagtatatttttaaaaaataaatttaatagtatacccctgaaatttagctaatctcttttatgcccctgaattttgcttactttcttgtatacctcttgacggagcgtgggggctcctcaccgggagaccgcgcaggcccccctttgccggttcggccgggggctctgggtgaggttctaagctcctagtctgtggaaggttcgcgacaatggaaaaagcacaagacacgggcgatgtatacaggttcgggccgctgagaagcgtaataccctactcctgtgttctggtggatctgtgtatgaagaagctacaaagagctggagagccagagagctcttactctagaaaccctcttctcccttttttcctctcgtgggatcttctcctggatcctccgggagtccccaatcctaagtgggcaaggtcctccttttatatctcaaggggataccacatgcaccacttctacctatctctcttttgtgtcgggacttatcctatctttactcaaacttggcttgtcttctctagaaagctaaaaatactgcttgtttttgagtgtggccacgcgtcctcactcgtctgacctcggggatcaccctgtcatctcttcataaatgggcggagacttgcaatggctgctgtccgaatgaccttctgatgggacggcccatacctacctccacttccgccggaagcaggtgagacgtgggaacatggttgtctgccgatgacatgaccagtgtcagaccggtcataaatcggtcattcttgtccaccacgtgtcagtctagcaatctgcatgttcgcccttcttcatacaatatcttgcttgtaatggttgggatgaagcctggcatatatctgaccgggaccaacgtgccatctccaggagctaacacgccggctccggctagggacgagtgcttggaggctcttatcctgacgggatggggcgaggcgtgtgtcagaccgcctgttgccacctaacccacgatctgaccggcctgtgactggtcacagaccggataaacgagcgcgctgcactgcgttacatgcgacgtgacgctttcgtccaaaccgcaataaatgcggttaggtgagccccgccgtgctcacctaacctatacacgcggcgcaaaacccacaaggggtcggggcgcctcggccctcggggccgaaacgggagtggtccgatccctcggggagacaaagaggggggcggccacatcaccctcgggccagacccccccccccgagggggtcaggccacgtgggtgattgctcctgcccaagcctctagtcatgatactcccggtcccatgtcaccgacacctctaaattttaattttgatccctttcataccccttccgtcagttgaccatttaatttatataaaaatgactattctaccctttggataaacatagaaatttatgaattacattattaaagatgtaaaagcttctcgcatgaaactattatagttatgaatttattgtgcgatgcattatttatcccaaaaaatatttttagataatgaaataaaattgtcgacgtttgatgtcgcaattctggtatttgcatggtatggggatcgtcggtgctaggatatacgcgagactgaggtaaaagagatggagacagggatttttatacaggttcgggcccctaaattgtcgggtaatagccctacatcctgttggccggagccgatgttgctttttattcaccataatcataccagtacaatatgtggggtagcctatctaactgttgtcgacatgtcggtctgaaggtctgactcgtagtcgacaacagggtagccttcctcctcgagctcgtgcccgacggaatcagagacagtgctagatccctacggccggcctctgaaggtaccggatagggtcaatccaggcgtatctctgatgtcgatatccggcggcttgtcttggcgtatgttggcttctatgttgattgtgttgggagttgattgtctcgtggtgggtcttgatcgtggtgaccgtgttgatcgtgtcccctctcctcctagggggtcttgtattcatacccataggtgtccccttgtctgagtagaactagagagaccaatatggatacaatccgagtagtcctggtcgtttccatgtagaactctggttgtctttccttatccggaactcctcctatatccgcaggttgtttccgtataggacatggtatgtggtgggtcctgccaagatgtagtcgactactattaggtatgtggtatccataaccttgaaaaaatattatgtatttatttttcaaaaaaaggcataaaaataaggagcattcatttaaagataggactaccaattttcacaataattttatttatgaatgctcccgataaaaaatccattgtcctattaaaatttcaaataaaaattttaatttattatatttgttttatttctaaaatttatgtcaaaattttctgcactaattatttagtctctttagtttcataaaatacacatactgcgcactcaaacaaagttttcaatcgtttttaagcttacattgaaacctaaaacatcaaggacaaaaaagacatttgcaaccaaacgtaatagtgaaatgatagaaaatgtaacggtaggagcataaaagggataagttgaaatttcagggatatagaagggatcggataaatttcatgggtatgaaaggattaagtgagttttcatagataccaaggaatttactcgataaaaagagcccccaaagggaggcacagggggcagactgcattttttttctaactcccagacctcttcctctgtcagtttccttgtgtctttcattcctctgcctcggctgctccacctatcccatgatacccttccccaccaagctctggagcttggagacgaacccagagatgagcagccaccagatatggacctaccgtcctttacttgctttatccgaacttattggaaattttcaaaaataaatataaacttattggaaaacaacgcaaactttctcaaagtactggttacaaggatatacacttacttgtgatgaataccataacaacagaacccattagagacgagtacaaccgagtctaacacaaatatttcaacacaacatgtatttcaccttcgtctggagaaatcataaatgatatccaattaaacttgtcgatgacacatattacattatattattgtccaactcagtgatgtacatccgctccaacatgtttgagctaaggtatgccggtaacaagtttgggggtatggagcatgtttccgtcaaggtactacatgacctgttgcatgggtaaccttgcattaggaagtgggtatgaccatgtgagatagaagcccgagttttaacactagggaaacctagtcaagactacacctatttagaatcctcatgtctgctgccttagtgactagatcattacgccaatgttccacaacccaatctaggagaatgatgctgctgtttcccttatctggctcaattggcctccgctcaaggtgatccccagaaggaatacaccaaaggcgaacacattgatggatggggtagtcttgctggtctgtcctagttcaggagctacgtatcccagagtgcggaccatgtgtgtggtttgcatatctgtcccatgatcgtaaagttttgctaggacaaactcccattcatctggtcatcgaggagtacgttacctgctttaatatcttgacggaggacaatttgctcccaatcctcatggagtatgataaccctgaagctacttccctgatggccaatccaatgtacccttgctacaatcatataggtatttatccatgctaccatttggtatgtaactatagaccaagagaagtacttatccctttcgctagcaactgcacgaggtcgtggtggccagtggcgcagctatggggggtgtgaaagggtgccaacacccctatgcaaacactaccaccactaaacccccatgtttttactctatattaagattagctaagataagtatttatctagtttattttgtatagcttgaaagtattattagtttagttagttagcaagtctaaaaatattagcaagaaacatgatctacaaaattagtttgtgatttctcatctttttcaaagtaaaatagatgaatgtgagattattcaatagtttacattaaaagaattagcaataaagactagtttcaaacttccaatgatattattaaacagctaaaattcaagtttttcttaaaggactagtttacgtattgtttgttattgacggtgactatttgacctcctttgctatcaatattaattattcggtctcatggtttatcttcaccccacacccccctaatctcaaatcctggcttcgcccctggtggtggtgcaactgtcgcatgcttaacctctacaatgaactccttcatcccatctcccatgccatgattcatgtgacatcctctttacagcgaccttgatggcggacttgtggagcacaccctttgtagacgctacctcgattcaccaagatgtttaattttgtcttggagtaactcctatgtggtcaaggacgaggacttttttgttgcactgcagtatggacttgactgctgactggtgtacttagtagtgagagtccaatcaatccgttgtctacataagacatacagatgcttaattagactacgcaaggcaatttcgcaaaggcaagagagaggtagagatgagctcatcatcatcacaccatccagaatttgcctcttgtactgcaaatgatgatgagcaccatctcgatgagttcgagttagaattggtagtgcaagatgtgcagcggcagcagaataatggtagtgcaaacactgatcagcatgagcgtgagaacctgttgctgcttgatgacagcagcaagtcgggagctctgaagaggcgtttgttcttcgacaatctgctgaagaatgtccaggatgaccatatccgcttcctgcacagacagaaggaaagaattgacaggcacgtttttagttcttttttcagcacaccgtttatgtgtatgtctggatgaagataaaatctctgtttatacaactgttgttttccttttccgagatacagtacacactcaccttataaacatacatgcacaccgtgttccaatgagcatttttgaacactgcgccaacatattttgagattaatgaagtcacctcgtatatgtgtttctaactgttgtttttctatgattcatatccacagagttgatgtcaaattgccagcaatagaggtgaggtataataatctgtctgtggaagcagagtgcagaactgcgaatggagatcatctgccgtcgctatggaatagtaccaagggagctttctcagtaagacaattctgacatgattgattctgttatggatcaaatagcggcatctgaagcaataactattcattgaatatcatttaggaaattcatacacttttactcgctgtcaatccaagcgttgcatgggttattattatcaacactataaatattataattctaatattgtgtttgatatgttgattatatttgacattgtagttgttccacttaaaacaagagcctggatcagttacaacttgctaacattttttatattccttgttaaaatttatttaataaaataataaattaagagtatatgtactatacaatatttattaactacaaatttcgtaactattaattctcttcttaattgcatgatttcgttaacacggaatctcaacattctgctgtcactaatatgatcctttcagttacatgagagctattacaaaatgcccaattaccatatgtatatacataaatagattaacctaccttaccagcattttgtttgattcatatagggccttgtgaagttgctaggcttagaaacagaaagagcaaaaatcaacgttctagaagatgtgagtggaatcatcaaaccctgcaggtatgtgccatgtttcaaggattttagttaatggaaaaaaaagaccgtaaacataaaaaatgtgttaccagttaaggtgatccgacatgctcccatgtttgtagattgactcttctattgggacctccaggatgtggcaaaagcactctgttgcgagctctttctgggaaactagataagtctctaaaggtacccacatcatcttcctttcataaataagaagagagtaaatttcatcaatggtctgagttacacaaaactacagaggttttaagatgtgacacataaccccagaaattatgatcataaaatttcacaaaaccatactattgatcattttggtttacaatcataatatgtgggcttatatgccacgccacatcagcgaaatcactttataaaacatctagggagttattttgcattggttttaatagttgagggggtcaatatgtctggttttgtggttgacagatacaagtatatgacccatattgaggaagttaaattggactgcttccaaaaaggtttggattggatttttattattgtgaaatagaaatccctcaaatgtaggttgaatttgatttgtatctcttaatcgaagaatagatagaacaactcctccaactattaaaaccatgcaaaatgactccctcaacagtattgatgatagtatttgctgatgtggcatccacgtggcatcccagtcatcctctatccacgtggcacatacgtggggcttacttgtaaattacactcagaaacctcccctcccctcctgtactgtctcccgccctcctcactctcccctcgctctccctgcctcactcactggccacatgattattcccatccaccgccgacactatctccccgccgctgtcgcttccatcccctcactggccgctgctgctgcagcactagcagcccaagcccccctctcccaccccgtcgccaccaaccaccaccatagccccacgacacccatcttggacttggtcctccttggcacgatagcgagtgccgtggtgccatccatctcctgtaccactgggagcagcagtacgggggacaaggctcgtctacaccattgagcttgaatcgtcctccatcgtcgctgtgatagctatgtgggcggcaggcataggagcggggaaaaggattgaggcaggagctggagcgagtcgattggtgcggcggaggaggagcaacagtggacgccttgaccttgacctcctggatccagaagccaaagcaagagcagagaggcgcaacggctgcctcggcgggtactagcgagaagcaacgggatgccatcttggcagaggagcctcatcagggtagcgactgaggtttccgtgggtattggcagaggagggagggagagaagaaggtaggagccgccagtgcccttccctgctttggctcaccgttgccgatgccgccctccagacctctcgatgtactgtttgtgcccaaccgctagagctagaagtgtgtgaggggaggaacagggaagagaagaagcgaagggataggtggggaagaagatggggcaaggatttacatgtgggtcctatcgtctttttttttttccttaattataatccatgtagacgtcaacgtatgataaaggctaggccagtgtgtgccacatagaacaaaactactattcaaacagcttgaggagtcaaattaaattggtattgatagttgagggagtcgttatatccgattttacggttgagggatattaaatccgagctataacaagggagtccatttggaccttttacttgcgaaatcacagtcccaaattggattcagcccatgggctggattgtccccaaatcccttcgtacactttctccagccacagcgccgccgcaattcgctcgccgccgccgccgccgccggtgggcggtggcttgccacctccctctccgcctccggcagccttctacgctgcccgtctccgtctcttctcccttcacccaaatccccagacattcggccatggccccccctgactcttctctcttcttggccgcccgccgcggcgctgcctgacgaggatcggcggctcggggcggaggaaccccgagcttccggcgcgagggggtggcctcctcctcctcctcatcctcatcgtcgccgccgcccacgtcgtctcgccctcggccaacgcccgagctcgaccacaaactaaaaatcaagaacaagaaagttttatgttctgacaaactgaatgtgaagatgcaaagcttttacaggtaacaggggatatctcttacaatggctatcagcttgatgaatttgtgcctgagaaaacagccgcgtatatcagccaatacgatttacacattcctgagatgactgtgagggagactttggacttctcatcccggtgccaaggtgttggaagaagaccaagtaagtgtaatggacattcttcaccaaaattcttgatcagaaaaagaaaaagttcttgattaattgcaataatttcttactcactgattttgtttgctcaaagaaatactcaaggaggtgagcgcgagggagagcgcggcggggatcatacctgatgcggacatagatatatacatgaaggtaaaagatgtgttatccttttatgcactggctggcattattcttcctcacttcacaaaaaaaagcaacacctgattatttgaggtaatactaacaatgtaacctttcttgctagaataatattgggttgtagtaaaactaaggcaaagctttcagtaatcaacatttctatttctatttctataattaaacattttggttttcaaaagcaaagtggctactgcaggctatatcagttgaagcttcaaagagaagcctacagacagactatattttgaaggtacatttccccaaaacatacaagtttaactttcagatagtgaaaatataccaacaagaatcacagtgccgcttgaattgtagatcatggggctagagatatgcgcagacacgatggttggggatgcaatgataagaggactatcaggggggcagaagaaaagattaaccacaggtatggtaaagctgatcgatattacttggaaatacattcttccaaattaaggcgatcgatcgattaccttgtgtataatcttaaactttcaccttcttgcaccagctgagatgattgtggggcctgcaagagcatactttatggatgaaatatcaaatggtctggatagctctaccacttttcaaataataagttgtttccagcaactgacgaacatcagcgagtacaccatggttatttcacttcttcaaccaacacctgaggtatttgatctttttgatgacctgatattaatggcagaagggaaaattatataccatggccctcgaaatgaagctctgaatttttttgaggagtgtgggttcatatgcccagaaagaaaagaggtagctgactttctccaagaggtaattttcctcaatcacaagagcagctgcagcacctgatttatatataaattgcatgttcatgaaaacagttcttttttttctgattccgaaaccattagatcttgtcctgcaaggaccaacaacagtactggtctggtccaaatgaatcttacagatatatatcaccccatgaattatcaagcatgttcaaggaaaatcacagagggagaaaactagaagaaccaattgtttctccgaaaagcgagttgggcaaggaagctttagcattcaataaatattctctgcaaaaactggaaatgttcaaagcctgtggagcaagggaagcactcctaatgaaaaggagtatgtttgtttatgtcttcaaaacaggccaggttatacttcattctaaggccctctttcctgtacgaagtaaattttgagtcctaactgaggtttactccttactgcagcttgccattattgcactcgtaacaatgtctgtgttccttcgaactcgcatgacaacagatttcactcacgcaacttactatatgggagcattgtttttttccatcttaatgatcatgctaaatggcacaccagagataagcatgcagattaggagactcccaagtttttacaagcaaaagagctattatttctattcttcatgggcatatgcaataccagcttcagtcctaaaggtccctgtttccatattagattcacttgtatggatatgtatcacatattacggtattggttatacagctagtgtttcgaggtaaataatttattggagatttggcaagttttcaacgataagaacaaacattgagaaactctttaacacaatttatttatacccatttgtaggttcttctgccaatttctgatgctttgttttgtccatcaatcagtcacttcgctgtatcgatttattgcttcatacttccaaacacctactgcgtctttcttctacctttttctggctctaacattcttcctcatgtttggaggcttcactcttcccaagcgtaagataaccatcgctcattgtgcatataaacctagcaaaaataaacatattgtgttactttgtttttccagcctccatgccaggatggttaaactggggattttggatttctccaatgacatatgcagaaatcggcacagttattaatgaattccaagcgccaagatggcagaaggtgaaatatgtttttttttcaaataaaaaaaaatgagttatcagctgctttcaagcatttacatcattgctacttgtattattttcaggaaactattcaaaacataacaattgggaaccgaatcctgattaatcatggcctatattacagttggcacttttattggatatccattggagcattgttcggatcaatcattttattttatatcgcttttggattggcgctagattatattacatgtaagtttgctaccattgaacaaagtgcatatttctcagactcgagctccatggtactcaggcagcataatttgacatacagtgaacttggggtaatgcttttggaaatctctattttagggaatacacctggttgtgattactgggcgtaatttctgaaatatctactcgatttccgatgttttttgaatatattcacatagcagatttatatacataatctgcagatacctacaatccaataataaatgacaaaagaaaatacaatttgaaattttgttcaaacttgtttggagtggtttatgattaaattagaccccacaaaattccatgccatatatcgtgacaagactgcagatatggggatgtaagagctggggcactatggagcaccagttaatttgactttatatacgcatattatttacttgagaaacaaattataaatttgcctatttcagctatagaagaatatcatggaagtaggcctataaagaggttatgtcaagaacaggaaaaagattctaatatacgaaaagaatctgatggtcattcaaatatttccagaggtaaagacataaacatctcaatatcaagtaatagtaagaaatgaaggtcccacaaaaaaaagtaacaaaccaagttagcagagttgcgtttcgaaagcaaaatgcatgcttcttcaatgcattgatctttttgcagcaaagatgactatacctgttatggaacttccaattacgttccacaatctgaactactacattgataccccaccggtaattaagaaagctccctatgtatttgatttttacagtttttgtgtttctcgtctggttcatatttgaagataaaggtatgtaagaaatgtactctcttgtaggaaatgctgaaacaaggctatccaacaaaaagacttcaactacttaacaacataactggtgcattgcgtcccggtgttctttctgcactaatgggtgtcagtggagccgggaagacaactctgctagatgtattagcaggaaggaaaacaggaggatatattgaaggggacataagaataggtggatatcccaaggtgcaagaaacatttgttagaatcttaggttactgtgagcaagccgacatacattccccacagctcacagttgaagagtctgtaacttattctgcttggcttcgtctaccttctcatgtcgacaaaaaaacaagatctgtatgtcccttggaagttggaacaacacagacatatactgattttaataacagatagataaacaagaagcttacctaagaaactaacaatgttgtttttgttcctttgggtaggaatttgttgctgaagtccttgaaactgttgaactagatcaaataaaagatgtcttagtggggacaccacagaaaaatggattatccatggagcagcgaaagaggctaacaattgcagtcgagcttgtttcaaacccatcagtcatactaatggatgaaccaacaacaggattagatacaaggtcagcagcaattgttattcgtgctgttaaaaatatttgcaaaacaggaaggacagtagtgtgtacaatccatcagccgagcactaaaatttttgaggcgtttgatgaggtaatttaactttcgcaatgtgttatatatatcaaacataatcaacacaaatatttttttattgaacatatcaaacatgaagaacaaaaataaagttatcttttatgctggaaacatcaataaatctagtttcaaagctattaggattaaaaatagctcgttccttcaacacggacttgagctaaatttaattaagatgtacattttcagttactgaaaatttgaaacacctatgtgtttgttgcattctccgttgtcttttcagtaaagaaaaattacagaatacaatagtatagaaatttgtaaccttcaaccattttactttgcacaatcaaaccatcaaatttgcaattttgtccccttaaatgatcgattctgtgcaacaaagccctttatattaattttgcttattagaaattttaacacttcaattatttggttttttttcaagccctttttattgaaaatacctaatcaaaccctttgaataatatatctatgttatgatatagatgtttatttgatatataacaactatctactttctagccatttttttccattttgggagaaattttcttacccgaacatttggcttaaactttgtgtacagaaaaaaaaacattgtattagttagcatgaagaataaagtataaacgttcagtgacagtttgttttgatatcttttttgaactaaaatacagtataaaaacatcaatgacagtttatttttatctcttatctgaactaagagttcatactatcacaaatttttcatcgcactaacaaaattggacttaccgggcttaattaccaaactaaaatggtttgagggcttatactttaatgttaccaaacagaatattatgccattttttttgtttcctggactatgtatatcacaaaaagacgtgacgacagacggtttgtgttctgagttttctgattacgaacaaaaaaaaggcagaaagctactttcctacagtgctagtagaaagttatatttgatgcattgagtaaatcttcttgcagctcatactaatgaaaaatggtgggaaaataatctataacggaccaataggagagcgttccagcaaagtgattgagtactttgaggcaggtttcttgaacatatttcctcatatgtatctgtcatttcttgattattcattttcactggtttttctgaaagtgagataagattcatcacttcttgatgaattgatatgatccgaactgccaatgccatgtgcaatgtttatgctattttagagataaattttatctttagaaattgtagccaaaacaattaaatcaattctgagtcatttgtgttcaatatgcaactttgctaacaaatcatataagttgatcaaaatgtcaacgagagtcatgcaattcatatgcccaggttgaaattttggttcaaattctgcaatccccccct

SEQ ID NO: 25700 - DNA, 4674 bp, Oryza sativa
cccccacgacatgaatctattttggcaaaatatttcagattttttatctttttatgaatttaggaagatttattcaattttgatctttgttcaactttttggaatttcggaggcccccttatatagatttgggcataccgaattaataaactttgtggcttgcatatctgtgtactccgtaaatgttacccgtgttttcagagaaccacatttgttgcatggctctgccattttcgtgtcatgtgtcctgaggttataatagattgaattttccttgtctatgatgatagaaaatttctggggtcttgaaagtaaagagtaactgcaatccagctgcttggatgatggacgtaacatcaacatcaatggaggtgcaacacaacatggactttgcgattttgtatgacgaatcatcacagcataggtacatatcttgtaaatttgattaggattttatgagtgaagagaacatatggatagctgaaagaaaataaaattcaactagcaatttttttaaccaaataaaaaaaaactttcatttaaatttaagaatgactaaaagttacttttctgcagagacatcgtagagctagtggagaagctaagcatcccaataccaaattcagaaattctatctttctcccatcgtttcccacggaatggctggattcaactaaaagcttgcttgtggaaacaaaacttaacttactggagaagtcctgagtataacttgaggcgtataatgctgacagtaatatctgccctggtctacggagtattgttctggaagcgtgcaaaaatattgtaagtccactactctcttatccacaacattgcacattattttgttaactttgggtacggtgcttcgccacaaagcattgccttgaagtactcagtagaataacataactttctctgatcccttctaagaaacgacgagcaagacctgttcaatgtttttggtgcaatgtatctgggttccacaactatagggtcttataatcatcagtcaatcataccattcagtacaaccgagcgcattgtaatgtatcgtaagaagtttgcaggaatgtactcatcttggtcatattcattcgcacaggtcaaataatgatcacaagcttgtaagcaaagtaaaatctacattgttgatactaatgttcataatattcaccttctacaggctgccattgagatcccctatgtatttatccaagtggtactatacacgttaattatctatccatcaattggttattattggacaacacacaaattcatatggttcttctacactacattttgttcaagtctctcctatatttatgttgggttgcttcttgtttcattaacccccaatgttcaagttgctaccatattggcatcttttttcaacaccatgcaaacactattctcaggatttattttacctgcgcctgtaagcctttattttctcctaatatcatgattattttctggtgatttactatggcctctaatggtagtagaatcaatctagaccgttcatcttttttagtttaatatatcatatttatttatactatcaccttaactattggtacgtagtggaatatgatctcgttttttttttcttgaatactaccagcagagaatggcagtcagaaattttagacactccaggatctaactttgttcacttctttttgttagcaaaattttgctgctcacgttgaatatataccaactactaagaaaataacaacctacatgagaactgcttaacgtgattttgtagtgtaattaataaattatattgtggaactactaaggaatcactggatgacaatacactgaagcactccaacataagtttaacatcgtagtagttatgggcgtataccattttttcagtcatatcatttgtcttttccatttctattttgctaggttggaaattaacatttgtattttagaagaattgtgttttgtgcaagtgttagggaagaatcctgaaaagatcaggaaaaaagaactgaaaagatcaggaaaaaagaactaacatgcatttcaattgttcgcgttgcagcaaatcccaaagtggtgggtttggctctactatctcactcctacatcttggacactcgatgccctcttgacatcacagtatgggaacatagagaaagaggtcagagcatttggagaaactaaatcagtttcgatcttcttgaatgactatttcgggtttcataaagacaagttgagcctagtagcagctgttctcattgcctttccttttgtgttgataatcctgttctctttttcaattgagaaatttaattttcagaagaggtaaagcatgttctgctgttccaacagacatcaaaatgtaacttgggtgactatttttctccaactgcgaaatgcatgaggttgattgggtgactatttttctcaaatctgatgagtaaacatcgttaattaggaaatacatattattaacttgattgtgctaagtatgcttgtgagttataaccttttttgtttcaccgaatggaatattactcgatggtttcgtgtaacctgctttggagaggattttgctatattacgttatgccttagattattgaatgcatcaatagaaaatgagcacctgatcgactaatgcgtgtacgggtatggattactgaaaagaaaagcagaggagagcggagtatgcaggtaggtcacctggtagtaggagtcacctgcatccaccaaaacctcgctcagctaatggttcagatacatgaatcaattgatcggcttatgcgtagactccatagacatctactccctagttttcaggttataaaatgtttttgactttggtcaaagtcaatatactttaagtttgattaagtttgtagaaaaaaatagtaatattttcaaccaagacaaagtaatcatgaaaatatattcaattattgatttgataaaactgatttaatattataaatattactacatttatctataaacttagtcaaacttgaaacagtttgactttaaccaaagtcaaaacgtcttataacctgaaacggagggagtaggtagttgacgccggagtttggaatccaatgacttcatgtatgggctcaggtagcttgtcaactacataagcacgtatgtaacacattaagtgggtgtttggttggttgcctcgcattgccaagccacacttgtcatgtcataatttcttaggttatgtttatttcgctgccgcgactatgtcttgtcacattttcttagccttgtatccatatatgtcattctctcaaatttgaaacaaatcatatgtggccaactatttcttagtcacacttacgccaccatgctacaaattacctaactttattaattaatggcaaggttaagcatcaaccaaatatcttcacagtgttgaagacgaccgatctgcctagagacccattgtcgctcacttccctggagaccttggaaagaatatggggaaagagaggggagaagaggaagagaggagggagaagatagggcctatgacatgtgcctgattaggatgccatgtcaatcaaaacaattatccatattgttttaggatattacttaattcgatttagaaagatgggttcaatatttctgttattgcagtttgaggatataattcgaacttgacgtcatgatgaagaacctaattaaacaccgtgtttagatcctaaatttttcttcaaacttccaactttttctatcacatcaaacttttctactcacataaacttctaattttttcgtcacatcgttccaattttaaccaaactttcaattttggcgtgaactaaacacacccttaactcattccaaaccgttatgagtgaaaattaactgcaccaacagaccgaaattactaccgcatgtgggccaaaattaccagagtctatggacgaaaattccagccatttacaggctgaaattaccttcacttatgggccgaattgaatactgctagctagggccgaaatggaataagttcacatggtgaccctcaaaagtgattgaaatctaatccgtgactctaaaccataaaaccggataccttggcccccaaattatgaaaaccggtgcaatttgattccctcggcggttttggagagcggttttgctgacgtggcggtattgacctggtctgtgtgctgacgtagcgcttagctggcatttcaattaaaagttatacgtgggacccgtttgtcattcacacacaattgtggggcccactgacatgtgggccccacatggcatcttctccatttcttcttcttcctcccctcccttctctctttctttctccctctcccctacggccgtccgcggggagcgagcgaacggcggcggcgggagctagctggagcggcggcggccgtgggctggagctgaagcggcgggctggagtccatgtcacgccgctcgcaccaccaccacccgcaccacccagcggacggcatcgagacgtcggcggcggccgagcgacggctgtggcagcccgcgggcggcggctgtgggccgcagcgggagggcaggcaggcgggcgggcgggcaaggtcggcggcggctcacggcagtgggaggacgaggggaacggcggcgggcgggagaagcaggccacggcggtgacttc

SEQ ID NO: 25701 - DNA, 4909 bp, Oryza sativa
cgtccctcagccgccacttgcactgtcacgcccggaatttctacccaaaattccaaacgcttacatgtgtgtaaaccctcgtctaggaatcagccgaggcacacaataacaaattaataatagagtgcaattattactctaattaataagcgaatataaagtcattacagagatagatagttcctctcaaacaataaaaatctaagcagcggaaaataagataaacggcacagacgaccccatcccacaagcagcttgaccagggctacgcttaatcctccacaccttcagcatcactgtagaactcctcctctgatgaatgattgcaaggtgagtatatggcatactcaacaagcgacgcagcaaatatgcaagtgcaagggataacaaaggatggcataatatagtctcatttgcataaatagcatttaataaatacttcagaatttaggaaaaacaataaagtatttaattaatcaatattaatccatcgctatacaacatacccgttgcataggcccaaccattctgaataaccaatcccggctgcacagttctatctccaaaccaggaatataccattccaaaccaggagctaaacaaattattatcattatcatttattatggtgagagatatgaaactaatcacgaaagacattgttagacccgcccataaccgcgggcacgactattcgaatagttttactctggccagaggtgtaccactgtacccacaagacacaacctcaacatcatgtcaaccatgcgtcgcgatacttaacaagtacccgaatagagattgtgacaataccctctgcataacacaattcaaagcagtgcaccgttcctggatcataatcacccccttataaacaaggcatggactccccagcgacccccgtgggcttatctccgccacttcacagtctggtgctctacaatgaaccatactatataaaaagtaaagccgttgcctatgctggcttgtggttggcacggttaatgtttcacaaccgaaaatcgtgaaccggtccttaattgtcatgagcacgaccatcaaaaccatgtgctcacaacccaccattatcaagttttagttgacaaattaattaattaaccaatcacgattaaccatcgtgagctatcattaagccatcattaaataatagtgaatcataagttatcccatttatatgagctaatgtctctaagcatggcaaagcatcctaagcactttagctaaaaccatataatgttctagctaatctaattattaaccaaacgacaaagtataggtaatcaatatcaaagggctataacaaaggcaataggttattcccacccaatgacattcaaaaataaatgcaatagttgaatagaaacaatagctttaaatgggatcaacatgctcaaagggttgtttgggatctgtgtaacttgccttgctggccttggaactcttcaaagtcttctcctgcaaattcggactctccgggaacgtcggaatctaagcataaaagagcaaaatcaccaaaacagcacataaacaatcatgaacagtacatgtggatatttttaacatgtagatctcaattttagaaaaatttagagacttgaaccaactaaattcgagctaagatgaattagttatgaatttttaaagattaaatcggattaaatcatttatttagattttaattgaattataacgcaataaagaattatttttgaaaaggaaaaaggatttattgcgtcagcggctcgggttcacggtggaccgggtgcacggggacggtctacggaactaacggccgagatctaatctaatccaaaacggacggccgggatcgaatcgatccaccatgggtctacggatgacgcggcgctaacgtcatcaccggcggcggctcggcaactcacgctcgccggcgaacgacggcgcggcggcgcaaacagagggcacctacgcgtagagggcaacgcggcgaactcaccgagggctcagacgacggcggacggcaacggacagcgacggcgacgaggtcgaagcggcagaggcgttcgggtcgacgacgacggcggtgctccggcggtcttcggcggaaatggaggtcgggacgaggactgcgacgacttggcgatcctgacggtggccctcccgagcgacgacgacgaccggagcggcggcggcgcacggctggactcgcggcggcgacggcggcgcacgggttgtcacggaggcggcgctacaagcggcggcgaactgaggcgagggtggtggcggatagaggaggtcccgggggtccttatataggggctaggaggcggcgacggaggcccacggcggccggcgacagcgatggaaggtttagggttaggaggaaaaaacgaatccgaatcgagctcgaatccaacgatttccaaatgaaattagccgaagattgcaaaagagaaaaggaagaggagatcccgaggatcatttcccctctattgattcgatcagatcgggaaagacgcgggcgaatttggaaggggcggcggcggcttgcgcggctagggcgcggctgcggcggcgcaaggaagacgacgacccaggtaggtaggccccacctgtcagcgggagagaggagagcgagcagcggctcggctcagcgggctagctgggccaggcacacttgggccggggagagagagagaggggggttttgggccgactttcggcccaaagccaaaagaggattttaaaacctttttctttttaaagtattcatgaaatgcaattccatttattaaaaatacttccttggctcaaataaatcccagaaaaatctaggaactatagaatcaagagaagtatttaataatattttatctagcccacttttatattggaatttattatttaaaattaaatcttttcttcaaggcttttaaaatcatttctaataattccatttaaacaacaatttataaatttaggattttcagggtgtgacaaacctaccccccttaaacagaatctcgtcttggagattcggaagagctgacgaaaagatgcggatgagttgactttaattcatcttctcgttcccaggtagcttcttcttccgagtgattactccattggaccttgcaaaaacagataactcgattcctggttcttctctcatctgtctccagaatacggattggtttctcaacatatgttagatcctcttgaatttctatctattcaagattagcttcttcagtgggtacccttaaacatttctttaactgtgacacatgaaacacattatgaacacctgccaaggattgaggtaactccaactgataggcgacctcacctcttctactgacaatcttataaggtcccacaaaacacggtaccaattttcctttggtgtgaaaacgataaaatccccgaagaggcgtgacacgaaggtacacatgatctccttcctcaaaacttaaatccctgcggtgattatcagcataactcttatgacgagactgagctatacgcaatctttcttgaatgatctttaccttctcttcagcttccctcaggatatcggtcccgaaaacctgacgttctcccgtttgatcccacaacagtggagtgcggcacttccgaccatacagtgcttcataaggagccatttggagacttgcttgataactgttgttgtatgagaattccgcgtaaggcagattcttatcccaacttccaccgaagtctaaagcacaagctctcaacatgtcttccaaaatctgatttaccctttcagtttgtccgtctgtctgcggatgataagcggtactaaagttcagcttggaacccatctcttcctgaagcttcttccaaaactttgaagtaaactggctatctcgatcggatactattttcttaggaacaccatgcaaacacacaatccttgccatatacaattccgccaaacggcttccggaatatgttgtcctcaccaggatgaaatgagccactttggtaagtctgtcgactatcacccaaatagagtcatggcccgatgacgttctgggtagaccagtgatgaaatccatctctatttcctcccacttccattctggtatctttaaaggctgcagcaaacctgcgggtttctgatgttctgccttgactcgctgacaaacatcacacacagctacatactctgctatctcatgcttcatacttgcccaccaaaatttcttcttgagatcttggtacatcttggtactaccaggatgaatggagtataaagtgtcatgagcttccttcaggattgcatctttcaactccttgttctctgggacacaaattctctcgcctaaccatatggttccttgctcatcttccaaatacccgatagcctttcctcttctcatgttcttcttaatctcttgaatatcaggatcattgatttgagcttctctaacctagtcaatgagagtgggcttcgcttctaatgctgcaacgaaacctctactgacaattcccaaattcaatttttcaaattccttgcataattcccacggcaactgtcgtccttccgtagcattgcaatagcctttcctgctaagagcatctgctacaacattagcctttcctgggtgataataaattcccatgtcataatccttaatcagttccaaccatctctgctgcctcatgttcagatctggctgggtgaagatatacttcaaactcttgtgatccgtgtacacctccgtacgagtaccaaagaggtagtgacgccaaatcttcaacgcatgaaccactgcggctaactcaagatcatgagtagggtagttcttctcatgcggacgtatctgacgagatgcataggcaaccaccttcccatcttgcatcagaacacaacctaatc

SEQ ID NO: 25702 - DNA, 1423 bp, Oryza sativa
tcatttttaattggttaaaattatttccaaggctctgaaaattccactaaaatcttgttaatgcattggagcatggggaactcaagaaaaattccaccacgccgaattcaattattaattgcatttattaattagggaattagctctaggttaattaagataatttcttcggacgatttatttagccaatttttaaagcaaggagagggggaaacttcagggcgtgacatacctaccccccttaaacggaatctcgaccccgagattcggaagagctggcgaagaggtgcgggtgggtggccttcaactcatcttctctttcccaagtggcctcttcctctgagtggtggctccactgaaccttgcagaatcttattactttgtttctggtctttctctcgctggtttcgaggatacgagttggcttctccacatacgtcaagtcttcctggatttcgatttgatccggacttgcctgttcctccggaactctcaaacatttcttcaactgggagacgtggaacacattatggatgccaagcatgttggaggaaagctcaagctggtaagcaacttcacccctgcgttccaaaatccgatatggtcccacaaagcgtggtgccaactttcctttggtttggaagcggtgtactcccctgagcggagtgacacggagatacacataatcccctacttggaaaacgagctcccttcggcggttgtctgcatagcttttctgccgagattgcgcgattctcaatctttccctaacagctctgactttctcttctgcctcatttaaaacttctgtaccaaacaactggcgttcctctgtctgatcccagaagagcggagtacgacacctccgtccatacagtgcttcaaacggtgccatctgcagactagcttggtaactgttgttgtaagagaactcagcatacggcaagcttttgtcccatgctccaccaaagttaagcgcacaggctctcaacatatcctctagtatttggttgactcgctcggtctggccatctgtttgtggatggtaagcagtgctgaagtttagacgggttcccaattcttcttgtaatttctgccagaactttgaagtgaattggcttcctcgatcagacacgatcttcttaggtacaccatgtaaacacatgattcttgctagatagagttctgctaatttcttccctgagtaggtagtgtgcaccggaatgaagtgagccactttggtgagtcggtcaacgactacccaaatagaatcatgccccgatgatgtcctgggcaaaccggtgatgaaatccattccgatttcttcccacttccattctggaatctgaagtggctgtagcaaacctgctggcctttggtgttctgcctttactcgttgacagacgtcacatagtgctacgaa

SEQ ID NO: 25703 - DNA, 741 bp, Oryza sativa
tgtgtttacctcatcaaaccgttcattaagctctggaagttgtctatcaatgacacttagaaacatgtcaacatggaagcgatgcatattcttgatttaaataaagaacctcctatctcttccaaccggccgatagaaagagtccatatcagggatcttgatcttatgcttcacacaaaaagattgcacttcttgaagaaaatcatcccatccaggatcctcgcgtaattgctgcaattgaaactttgtcaataaaatcagtcctactgcattaacaatgtcttgatccctcttctgcaaagcatgattcaagtcagatgtgaacccaagtactgtttgcatcaagtgtgccataaaaacaaactcaaatgattggaatattgtcaacactgtttgtgcatttgcacattctgcaccaaaagagcgttgacaaaataggagtgatcaaactaaaacaatgcaaagtaaaaaattgccccgcattatgaaacgaagggagtaaaataaattaataatagagcattcaaataaatagccttgtcatttgcaggagtacttgtagtgataaacagagggggggaaatacaagcagtgcatacaaactgattctcatgggataaaaagtagcaagaccgaagaagctaagcagcggtaattctaacgagagactcggtgtagggcatcaaggtgaagtcgacgacactcttccatctcgctggcctaccaccctgatacgggctg

SEQ ID NO: 25704 - DNA, 763 bp, Oryza sativa
tgattgaacacctttacctatgaattgcagcaaatgctggagcaatgatgctggacagctggaggcctggagcaaatggatgttgataaccagattgctaagctgatggtggagctctcccgcatcaagattgtgaaattggggatggtaccactgcgatggtggtcatgtttggatcacttctagaccaagctgagaaactgttagaatatggtattcttccaattaggatttctgaaggttatgagatggcgtcaaggatagtttttgattatctcgaacacatctcccaaaagttttagttcagtgctacaaatatagaacctgtttttttgtacaaacctgtacgataattgacaaccctaaccccatcattatcttcatatgctttgtttgttcaagtttttattttgggtactttcaccccatcattggtgaatctaaccaagacaccttgtgctagctgttagcagaatttatctgtaggtggtttgaacattctgcattgattttgcaggaaacgaaatgattattgaggagaccaagtgaagtattcatgatgctctgtgtggctaggaatctgattcgcaagaactctattgtttatgggaatggctcagctcagatatcatgctcaatctattatattattaaaggaatagaaaaaggagtctcacgttcgctctcatggcctagaaaatctcacattaatccgagaaaaagaaaaagcagagtccatatagaaatacaatttagaaagagc

SEQ ID NO: 25705 - DNA, 731 bp, Oryza sativa
ttgggaagcgtgcgtacggaaaacgaaacaaacaatctccctatcaccccagaacgaacgcagcctaagttacttggttggttaactaaatttggtatctggatggatgcagggagagtggcagcagcagcattagttggtgggggcgtaccactgaatccacggtacccggcgattcctgaagaaccttacataggccggagaggcgatccgtacacaggtcggggaggcgaaccttacacacgcccgggacggggatgcaccgttgcatacggatgctatggaggtcctccagctgccaaaccatgacgatcgacatactactctgctactgctactgcatgctcgcttgttatttcgatcgatcaatctcatggcctgcgtagctcaccacataaacaaataaaaactatgcatctaataattaacccctgatctatcgatcgatcagtagacgggtatgcatcaatcggcatcagcagcatatgcgatgtgaattgtgatgtatgcatggtgtatttttgtggtaaataaagtgaagcagatatctatctagtatatacacatcgttcctgcttctatgttgcctgcgaattacatccccttttgatgttgtacctgttcataggtctagttcatactacttcataggtacagacctcaccattccaatcaagatgacatacagagattatttttgatgtcctgcatattggttgtgcaagcagggc

SEQ ID NO: 25706 - DNA, 3164 bp, Oryza sativa
ataggagtatagtacgtccacagtccactgcatattactgtacgtaggtggctgtgcctgttcggcgctgtaccagcagatagaatttcatcaatattagctggccatgtttattcgtgtaaccatattatttcatggcgtcattgattagcttagagatgggcctagcagcagcagaagccctagaagaagaagaagaagaagaagaagagtgtcatggtgatgagggtggagagtttcggcagccgtagacagcgttgcatccggggggcgttggcgtgtaaggccttccaggaggaaccgatggcctgtagtttggatccagtgacctcctgcttctgtctctccctgcatccatccatcatgctcttacttagttcattaattaattaattagatcagaggtttagtttgtctgtgtatgcatataaaggatgtacagcggctggcctgggatgttttaggagtattattaatatatgctgatgctgcatgaacatggctcaactccaatgataaaacacaagaatgttttaggagtatttgtctgttgatgctgcataaaaaactagaatattagggaaggacctaatatcaaataattaggaggggtgaggctttgaacccaggtcgtctagcccaccaccttgtggagctagccggaagacccctgggcatttctcgatgctgcatgaacatggctcaactccaatggttaaattaattatagggtactagtaattacctgctccgtctacggggacagtgtgcagggtgcagatgagggcgaggatcatcaggagcaccttgcaaagagacacaacagcagcagcagaagaagtgtgttgcttcctcatctctaaccttgttgtcttctgctctcaataatattgcaactcaattggttgctgttttactgttgcttctctaccggctgttgggctcagaatttatactccctccgtttcgaattgtttgtcgccgttgactttttaagcacatgtttgaccgttcatcttgtttaaaaaaatttaagtaattattaattcttttcctatcatttgattcattgttaaatatattttttttgtaggcatataattttacatattttacaaaagtttttcaataagctaagatgaatggtcaaacatgtgttaaaaagtcaatggtgtcaaacatttcaaaacggagggagtatatagcacctgtccgtagtgttgcttggttgtggccatatgacattcaattggtggtagtagctagataacggcttgatggtagtattcggtttctgcatgcatgtattagtgatcgatgagtgggtttttgcatgcacattaatcaatgagtaagtgtgttatggatgcatgagtaagtgcatgcgttctgcttgcatgagtaacaaagtgtgcgtttccatgcattagtaagtctccgttaagtcatgcttaattcatcctccgtacaatctaaagtgacaaagagttgattcctagaagaaaaagaaattgatccctgtgctattacccaacacgtagcacatgggactgcaattcgctttcgtttaattaccatcgtcagcaaccaacaacatgccacttctgttttgtccccggccaatttggctcgcgctagcaattatattcaccatttttccccagggcatccagtactgtctctctctctctctctctctctctctctctctctctctctctctctctggggatggccatggagaaattaattagacgtggatatcatgcattttacacacgagaatcaggagcaattgatgacaactttaattaccacgactcagcaagtcgaattcgatttgcgtccctcaacccaaaaaccagacacaacgggtccctcaactatcaaaaccgatgtagattaggtccctcggcggttttgagggcggttttggctgacgtggcgcttacatggctaatttgactcggtcttcatctaacgtggcattggcgtgataataaaacccgtggaactcacatatcagtttcacacaaattaataaaaatggtgagtcccacatgtcattctcacccttctacctcgtcttcgagtacatggaccatgacctcgccgccacaccggggctgcacttcatggagccgcaggtcaagtgcttcatggcgcatatcctcgtcgagctccgcagctgccatgaacggtgcgtgctgcatcgagacatcaagggcgccaacctgctcatcgacggcgacgggcgtgctcaagatcgccgacttcggcctcgccaccttcttcacgccgccaggccgcagccgctccagccgcatcatcacgctctggtaccgcccaccggagctcctcctcgacgccaccgagtacggcgtcgccgtcgacctctggagcaccggctgcatgcctgcatcctcgccgagcttctcgccggcaagcccatcttgcccagccaaaccaaggcaaataaataaatattataacctcaactctccatctatatatcatgatatcatctatgcgtggatgaaatggatcggcatctgatttgtcattgctgatcgacgcagatcgagcagctgcacaagatcttcaagctgtgcgggtcgccgtcggaatagtattgggcgaaggcgaagctgccggacgtgacgctgttcaagccgcagcggcctaccggcggaagatcgccgagatgttcagggacttctcgccaccggcgctcgacctcctcgacacgctgctcaacatcgagccgtccgaccggggcaccgcgccaccgccgccgtagccgtggacagcgacgtaagcatgcacaccttctcccctccctctcctctcctcctcgctcgcatggggtcctctgctgctgcttagttcttcaggacaaagccgcctcccgccgctttccgccacctttcgccgccccttcctcttccgcccacagccgctggagacgtgcctccgcggctgcacgccactccctcctttcccgccggccgccgcgcaccgctgactctcgatcgtgtctggagagaggagagagagatgaagagagggaaaatggggagagaggaggaggaagaagaagaggggtgagaatgacacgtggggtccacgggccccaccggtttttttgttattttgtgtgaaaa

SEQ ID NO: 25707 - DNA, 10444 bp, Oryza sativa
tgtttctgcgtgtttattaggcccgattggtgggaggagccgaacccattacgggcggcccatcacgcccatgcctctgtttatctggcccaactgggggtcggagatctattctccgaacctccctatcctgcaaagtggaataagttcatctgaggtcccttaattttacgccaaatccgattttcatgcttgaacccaaaaccagatataactggtccctaaactatcaaaacaggtacaaatgagatccctcggcggttttgaaggtggttttggctgacgtggcgtctacgtggctagtttgactaggtctccgtcccacatggcattgacgtggcgcttacgtggcaattacgtctcaaaaaaataataaaaccatgggcccacctgtcagctaaaaataataattttaaaatggcgtggcccacatggaccccatatgtcattccctctcccctctcagctctccctcttcctcatcaagccatctcctcgcgccgcggcgccgcctcacagccggcaggagcatgccgacgaagcggaaaaacggcggcggcggcggcggcaggccgcggggtcggtgcctactcccgcgccgccacatcatgttagatgctgcacagcggtgaggaggagaggcggagttcgagctcaggacagcgaggattagtgtacagatcgagctaaacagccaacaggattagtggcaggcaccaacaagcagttgctgctgctgctgctgctgctcgagacatgcatgagctcgtgttcactacagtgaggccggccatctgcaagactgcaaccatgtcagatttggcacggagacgaaaaacacacatgttagtgacccaagttgttgtcgtcgtccatgctcgccaaggccgccgccattgccgccggtgtcaatgactgcccgactgaccgtctgtcttcaactcgttcttctcgttggcagagagagaagctgggagagagggggacagaggaggaggtacagccgcatcgcctcgctgatggtctcgtgcagccgtgcaggtagtgcatccgcttcagctcgtcgtatccggcgcgcggagatgtcggcggtagaggagggagcggcccctcctcacctgcttcctctccaacctcctcatcatccccggccgccgcctcctcccttcctagttcctccgggctccggccccctcatcttgagcctcgtcctcttgctcttcccttcgccggacgccgtcgacctcgcttcctggtgccgatacacgcctccgcccgcgcgagccaacccgacgctgttactcctcgatgggacatggaagcataccaaggagatgcaggccgccagcctcccgtttttgtcctccttcgtctcgtccccttgtcattgctcgtctactgcgatgtcggcgccggcggggtcgaggtggtggaggatgacgacggtggtggaggcgggttgcggcggagggcgtgcgctgcgccctctctgttgcgcctgagagaggagatggggagagaggaggaagaagaggaggggagtgagaatgacatgtggggcccacgtaggccccactattttttattaattcatgtgtgaaactgacatgtgggtcccacgggtttattatttttcttagatcgaattgccacataagcgccacgtcaaatgaagaacgagtcaaattagccacgtaggcgccacgtcagccaaaaccaccatccaaaccgctaagggacctcatgctggttttgacagttaagggactcgttgtatctggttttccggttggagaatgaaaatcggattcgttgacaagttaagggacctagggtgaacttattcccctgcaaagttgacggtcgcacgcggcacgcctcattccgtgcgtcagaactcactaggacaaaggatcgagtaccaagcccaagcattttattagagccaaggcagaccatgtatgagcatggtattgatttttttttttaaaaaaagcacggtattgatcaacttaaaggagtgatgatatggtctttgattgagatatgcaccttatatggtgcactggtaagggttgtgtaatttcaaccctgagttcctgtgttcaatactcaacatgctcacaatttctttttaaaaaatatttggagagacgtctattcctccaaatctcaatttctttttaaaaaatgtttggagagatatctcttcctccaaatctcgtgtgatgattaaaagtttccgctccaacacccacatctgctcgtgtaagatttcttttccaacctcactttcctccgatccctgtgcaaggtgagcttccccaccttagagcaggtacaatagtaggctataagccagctgcaaatatattttaataagataaaagatgagagagaagagcagcgggctacaaatctgtagccagctgcagcacggattttaagacgcaatgtgtatatgacagcgggaccatatgctaatagtatagtaagtaactattatataaattagctattaaattggctatagatgaattggagttagtagttggctatactattaaccttgctcttagggcacgcgcacacatatgttcattgggcaaatttgccgttgattatacgtagaagaaaagaaaaatactgaacctttgaagaataagtgatgtcttacggaggcttgattagctcttaacgttgaacaactagcaagaattaagcagtactaatgttcatcattcagattaattacaccactaattaaccctgtctagtatagctaacatagttgcaaacattgcatgcatgcagggcagcttaattagttagttggacacggatcaaaaaagttttgatatactactgtatttagtttagtttaccctccgtctacgaaagcagtgtgcagggtgcagatgagcgcgagcacaatcaggagcaccttgcaaagggacagtgcagcagcaacggcagaagaagagctgcggtgcgtcctcatctcgcttaattaccactccactaattaattatcctgttcttctctctgactggaatgtatgcaccccctgggtttaattgttgcttcttcgatcgactacaggccgtgggtttccagaatttatagagcctgcaggcaagcaggcagggtagtaaagtatatttagtgcacttcgctatcgtttactaggagtcaatggctggccgggcctcttgattaatcccaggaccaatttggcactgatcttttccctcgaaaacattttgggtcacttttgaaaaaactgataactgattaaaccctattactagtgaagagccagaggagtgacgtcagtgacacacgaggataggcaagtttaaactagtgacatagagtgaaagggctaattttaagtgacatatgagaaaacaggctaatttgaagtggaatataacgaattatccttataaattacatgcacctcctgagtttagttgttgcttcttcgtcaaaaggccgtgggtttccagaattaatagtgcagttcgctatcgtttactacgagtcaatggctggcccgatctcttacaagttacaaccccatcgtttggtttatatttgtgaaataatccaaacgatatatttgtaaatgaaaaataatttataaataagattttcatatatgtgttcttaacgatctaaaagcaaaatctaaaaaataaattcagataaaaaactcaaaatcagcttcaaatttaagattaaaaatttaaattttagatgatatatatatataagcataagtaaaaaaagttgagcccctaatttcttccgggaccaatttggcactggtcttttccctcaaaaattttttggcagttccctcaaaaaaaaaatttttttggcactggccaacaaattaagtcttcgttttttccacaatatgagacgtctcatctggtagagtaattaatcaatagagaccttatcagctcggctacagcacgactcaggatggcaccagaatctgttgttaattccattattccatcctggagggcttgaccgacttgactactcagtacatatctactccaccatagagaattgagaggcaaaacaaggacaaggacaaacagcatgctctctgtcatataaaaaacaaaaccagcctatacttcgtaatactataatatatcatattcggtactatatggaacgaaaaaaatataccaataggtggtacaagatatattacatgtgccatattatataaaaaaaattacatgtgccatgtttcattcccagcaacataactaggtcgtttttaatcctgtgccgctagatttagtctttttctttaaataatcttcttcggtttggttggtcctatattatgtcttaggccatttcctctcgcattttaaccattctctttaataaaatggatttgcttaatagcattccacaaaaatttaagaatgaaatcttacagattttgaaccgttagatccacgttaagattcatgtctaacaagaagataaagttttcaggttggagttagagttagggtaggagggggatgggatgggggagggagaagatggaacccctagagcttagggggatagctataggtgacggagaaccggaggtgagcaactaagtggtggacacgggcgggtggcaaggcaccggtggtggtgctggagccatagggttggcaggaggcggtgggccggcgttggcggtggggaaaacaaggaggtggcgattggtggtggtgaatgtagtgtcggggacccgccgaagatggggaagatggttcggaggagggaattcagcgcgctcctttggggaagagaacggggagagggaagggggaggaggctcggggtaggggaaaagtttggttttactatttcactttgatagatttttaagcttatatcttttaattttccatccgtaggatgttacgtctaaatttgtgttactgtcgatccaacttataattacacttagttaacagagcacttatactcaggtatagtgcaccaaagttaaattttacattagttttttttcgctagatttacaactttttacattgtcccatttttttttatttcattcaaaatagattgtatccatatagttgcctcctactactgaagcagcgtgctgggtgcagatgagtgcgaggaccttcacaaattcacaagccacagattaatttatctacagccacgtattatctgtggctgtagattaatttaatgccattatctaaaaagaaagataatacgtatcttatcagctctaactctaaacgaaactagctaggtaaggttgaggtacgcagggccggtcctagggctatgcagccgaggtgatcgccgtgggcccatgatgatggagggggggcaacacctaatactagtagtctagtacctgcctatggcttacctgaagcagaaacacccgagaaacgagaggagttgcagcgtcgtcggtaactcggcagacggcatcgcatcgcacaggacacaaccgcacaggcgcacagcgtcgtcgactcgttcttgatgattttgtatcaagaaatacccgaagaagtatcttttcatgagaaatagtgggtatgatgggatgctattcttcattaaggtaatgatattagtttcaaggtacaaatatattgttattttggtcgactttattttttgataattaccagacatgttaaatttaatatatggataaatttattttcatttgcaaataaaattagcgtatatatatcataaaattttatatataacttagagagcccattgcaacgagttcacctaggaccctcaaaatcataggaccggctctggaggtacgtaacagtcatactacatatcacatatgcagatatgctgctgctgcctcacgttcactgcacacatcacactgagcagatactacttttatatatactccaatatggaacgcatacagaggaattaaaagacacctactcgatccatcgatctgcgttagatgcctgctggtttatttatttgtttgtatatataggcatagcatcgatcgacatgagtagatcgagatcgatactttaattttagataatgagatcgagatcgatatggtcttcgatcatgcagtagcactgtatgtagcagagagatggagtgtgggtcatggtcatggcgagcctgctccaggagggcatctgtagggtccgcggcatccccggccgccggtgtaagacccgccgggggtcgtcggcggcgtgtaggttggatccaatactgaacccttcccacccccaccaattgccgcagccgctctccctgcatccatcacaacaatactcagtggcggagccaggatcgtcgtcgagttagatatgactaattaatagtgttttataacgatcgactaaattttacacttattaaccgcgtagttggtaatggagacggcagtgacggagcccgggcaatggctcgacttacccgggagctaccttcattgacaataccgatagtgtaatactaccgatagagagatcagaccactgtaaagcagtggcggctccaggatcgaatcgttgggtggtcctgcttggcgtcccaaattgtcacgatgttataaaatcaagtcaaatatgtcaaatatagtggaaatataattcaaatattgaaagataactcagtacatcacaaattgatttaaaaccaacatttaagttcaaagttacgaaagttacaacataaataattcaaatatcttacaatatttaggtagaagattataatacactacttcttttctactcgccgggtcttcatagacatgaaattctttttaatgtcttcttcgctaacttgagagaagacatcccgctcaataaatgtgattaaacaatcattcaataatttgtcacacatactatttctcagcttgctcttcactacactcaatgcagaaaacaccctctcaacacttgctgttgctacaggtaatatcaataccaacttgagaagtaaatagacccaatcataaagaacatgcttgtttgtttcacaagtttaatagagagctcagcaagagtttctaggcctttgaacctttcatctcttctcatatcatcaataaaagtcccaagttgcatttctagtctgatcaaatccatggttgaaaactcttttggataaaacttggcaagcttaagtacttgttgtgcatcataagaggcaaatgaattgaatggattcaatgctgacatgcaaatgagcaattccatattaacctcatcaaacctactattgagctcttggctattttatcaatcacaccaatgtacacttctcttctaaaatgatcatcatttgtttggtccggataaaaccgtggagatcttccatgtggcacatattttccatctaaggttggaacttggatactatgtttattgcaaaatgaaacaacagttccttgaaaaaattcttcccatccttcagatcttaatttttgcattctttccttggccaaagttacaagtgacattgcattaacaatatcttggtctctcttttgcaagcacaaacacaactcatttgtatatccaagaatgacaagcatcaaatgtgcactaaaaacaaaatcaaatgattcaaaagctccaaccacagcatgtattcttggccaatcatctctttgtgtggggtcttttccaagagttatgagcacctcatgaattgtggggtacataccaataatatgcaatattgttttgtaatgagaaccccatctagtatcacctggcctagccaatcccatctcttgatttaatccaaccccactttctatttcacccaattcaagtgcttccataatcttttgagctctaacatctctaagcatgtcatgacgcttacaagaagtaccaacaatattcagtaagtgagaaacttgagtaaaaaaccatacgcaatcatcatttcccttggcaacagaaacaagaactaattgaagttgatgtgcaaaacagtggatgtaataagctgaaggagactctttcatgatcaatgttttcagcccattaatcttccctttcatgttactagccccatcatatccttgaccacgaatttgagaaggactcaagtgatgatcactaagcaaagttagaattgcctttttaagtgcagcagaagtggtactagctacatggactactccaaggaaccgttcacatactcttccaagtttgtcaatataccgcacacaaagagcaagttgttccttatgtgaaaggtcactacactcatcagcaagaattgcataatgatcatcaccaagttcttcaatgatgcgcttagtagtctcatcagcacaacaatggataatttccctttgtatactagaacaagtcaagatgcaatttccaggagcatttttcaacaccaaccgatcaacttctttattattttcagcaagccatttcaaaagttcaataaaattccctcggttactagattcttcactttcatcatgtccacgaaatgccaatccttgatttaaaagatatctcaaacatctaagtgaatatgtcaacctagccttatagtgaatttcactttcatttgacaccttcacaatgacattatctattgaaggaccaccacttacaaataggttgtatttctcttgagctttattgtgagcacttgttataccccccacatgtttgtcaagtgcatcggctttgttccaatttctccaaccatccgtaacaaaattactagttccactaccaaacaagtaacataccatgcaaaacccagcatcctttgctacactatattcaagccattggtacttatgaaaccaaacaaaattgaagtggcgcttcttaccataaatttccctgactgggaaatcatgtgcataacattggtttgggcctttcagaatatatgcacgccgaactgcgtcttgttcattgacatcatagctcgcaataggggacctcagtcctggatcatattgaagatgatcagcatcatactctggaggtgcatcttgctcttcatttgttgcctcaacaactggagttggcacaggatgtggctcaactagtggtggctcctcttcttcaatttgagcttcctcatcaataagatctgccctcttcttcgcctttgcttcatgtttccgaaaaagcgatgcaatgtctccattccttttcatgtctcactgcaatttgcactacaaattaatgagacactaagttaagttatattgactactaactaagttgctgctaaaaaaaaaatctaagtttcagttttcaatcacatttttcattcatccatgaccgatctattcaaagtaaatactaaagactaaaatgggtaactcaccatctcggtcttcactcttcagttctttcacagaggggcaggcagcagcaggggggcagggcactggaggccggagcaagcaaagccgtctactcgtgactcgtcgagcaggaggctggaaggagagggacccgactccggtgcgtcgtcgctgccgtgaggggtggccgggcggcggggcaaaatggtggccggctagccgccgccggccgggatggtgccgcacgcccacgtcgggcccgggcggccgacgggctgtcgcccgcctcctgcagtcctgctcctgcaggcgtacaggcgatggccgccggcgctggcgcctgccgcagccgcagagcgagaggacgaggatgcgacgaggcgaggagtggagaatcgggactcgggagaggcggagacgagacagaagcgaagcggagcggcgggtgtccctacgcggtgcgcctctcctctgtcatcctaaccctagcgcctgtggtgggcttttttgatttgggccgtcggggggggggggtcctcgtgggccaaaatccagggtggtccaaggaccacccggactacctgctggagccgcccctgctgtaaagagatcgaccctgagggattagaagtgtattttacctccttgcacggaggcagtgtgcagggtgcagatgagggcgaggaccatcaagatcaccttgcaaagggacagagcaccaccaaaactggagctgccatgctttgtcatctctaacttggtattatctcttcttctctcctctataactctgactgaaactgcatgcacctcctgggtttgttgcttctctacaggctgttgggttttcggaatttatagagcctggaggcaggcagagtgtagtgtagtgcagtgcagttcgctatcgtttaccacgagtcaatggacctctaatttctcccgggcccaatttggcactggccagagcaaagtcttggtcttttccacgacatgcatggaacgactcatctaatatactctcatccctaaatatt

SEQ ID NO: 25708 - DNA, 10415 bp, Oryza sativa
tggagtatataataagagtaattaatcagcgatggttaattaaaggataaagagcaacttataaatcgcagacacgactcaatcaggatgacaccagatcgaatttgttggtagtccaattgttctatcctggagggcttgaccgaattgattatacttaaataattaatccactatatatctactccatgcaccatagagacaagacaagtactccctccgtttcaaaatgtttgacacagttgactttttaagtacgtgtttgaccattcatcttattcaaaaaatttaagtaattatttattcttttcatatcatttgattcattgttaaatatactttcatgtacacatatagttttacatattttataatttttttaataagacgaacggttaaatatgtgctaaaaagtcaacggtgtcaaacattttaaaacggagggagtagtatttaccagctactagctcaacatccattatgtacaaaaataaggagcgactagctcaacagcatgcatataccggtagccggtagctaggtgctacaagatattacatgtgccatgtttcattcccagtatcataactaggtcgctatgtcatctttaatcctgtatcgctagatttagtctttccttttatcttcttttgctcggtcgggcttcgttttgtcttaattaggcatttcctctcgtcttttaactattctctttaataaaaaggtcttctttttggcttaattaggcatttcctctcgtcttttaactattctctttaataaaaacggtattctttttgtcttaattaggcatttcctctcgtcttttaactattctctttaataaaaatatacggaggtaatggtaccaaatctcctcacttgtacgtagtttgtgattttcttttctatctcccttgcatgaattttaaagcaaatagaacaattcaaaattacattgtagttgcatgcaaattacattggtggatatatggaagttacaatataactacactatatgattgcactatatttatatacgtcaaatttatagaaaaaaaatatcgacaagtatatagcgcaaaactaactgcaagctttaccactaccctcaggaaggcgcctttgctacttccattggtaaggcccatctgcagaggattcaccgacttcacaggccatcactaggaatttgtttatgaggggtaattaagcctaattggtggtcagagctgtaactgcgtggagcccaacctcttacgggtggctcatcacgcccatgcctatgttaatctggtccaattggggtcggagatttattctccgaaccccccctagcccccgctcctccaaagctgaaggccgtaggcctgttccgcgtgttagaactcacaaggagaaaagatctgaagacgctttagatcaagcattggacgctaacgcaggcatcggatgcgctattccccatcttttctccatgctcactttccccatttccctgtcttcttctctccaccattccccttctctctcacctagcaacgaccaaaagtggccaagtcctcaggaccgaaggaagatgccatcgccggagaaagccgcgatagtggtggctttgggaggagaggtgtgtgcgggtagagtagaaggcaccatggccggagagaatcccaagctcgccggcggcggcaccacgaggaggatgtgcagttattgttgaagacgacaaagctcagcagcggcggtacctacatcgcgcggagattcagccatcaccggttagggccccgagctcgccggaagcagcggcacggccgcgaggaggtggcacgtaggacggagtttgagacgccatcgcctgagagggccctgagctcactggcgaaggtgaagaggtttatggcaacgtcgaggattgttgcacaccatatgttttttttttttgcacatagtgtgtttgtgatgttgcactccgtcttttctagatgtttcttaaatcagtactagatgttgcatttggtttctttgaatgttgcacgtattgggtttttgttgttgcagtcaacattcttgagtattacattcgattgaaacatcttcgataaagcgatgaaatattcttcagtgaaagatgaaacattaagaaaaaattcgtgttgaaacttttttttagcaatgaaaaattgcaacatttcttcatcaacatatagtgcaacatcgtcgagagatttgcaatctctggacatccgatgcgtaggcctctccaaaaaaaatcgagaacttagcaacatattgtgtttttatagtagtagagaaatgggtatgcaaaaatcacaaatgtagaaatggccgaacgaaattaggacccgtttttatttttatttttttgacatgtagaaggaccagttttgctgatgaagaagctggtaggctaatgcttccgtgaattgaccagataaaaatgggcccacatcaaactaaccaaaagggcccttagttttcggcccacatccgagcagcagcccagcattctaagggatcccgtgggccaaatcgtgtgggccgtggctgttggggtcggagatttcttccccgacccttcctttttctcagggcgagatgccggcgtgatcaatccgtcagatccgcacatgaatctggtagtggttgcagagacaccgacggcacggagatgtttgcagttgattatttcgtagagattggaacgatttcaagcatcgagatgcatgatttctacgtgtttttactgaattactccccccgttttaaaatgtttgataccgttgactttctaattacgtatttgatcattcgtcttattcaaaaactttaagtaattattaatttttttcatatcatttgatttattgttaaatatgctttcatgtacacgtatagttttatatatttcacaaattatttttaataagacgaacggtcaaacatatgctaaaaagtcaacggtgtcaaatattttgaaacggagggagtattatgatagtaagctacgttaccccgatacgctgatacggatacggatacgcgatacggcgataccgggatacaccatcttcccaaaaacatggatacggggatacacgaatatatatatatatatatatatatatatatatatatatatatatatatatatatatatatatatataatttaaaaaaattgagtgtggaatatggactgaaaaaataggaagcaaacagcatcaatccaccaatgcatatatgatatctcagtacgacagattcacaggctcacagcatctcaccaagtcaccatttattgaagaggcatacataaataagtgcaagacttacacagtagatgaaatcatgaaaataacatagttcttcaaatagatggtagacattagacaacattgttcacatagtagatgatgcaggatttacctcaagttctcaacgtcgtcgtcgtcggaggtgatgcaggattgataagaggcagcggcgtgacgcctcgtggaggagtctggagctcctggaggacagtgcagaggagggggcgcggagaaggctgtaggccgcggcgtggcgtcggcgaggcggcgcagcgacggcgtagggcgggccggcggcgaggcgacgcagcgacggcgtggtcggggcggccgggcggcgctgcgatggggattgggttttgcgagcggcggcgcgtttggaggggaagaacgggagatgcgttttgttctgtgtgatttagggctccccatatcatgtacgtatcccgccgtatcggaggagtatcggtattttttttaattatctgaaaaagagaaaaatgagggatacatatgggatacgtatccggccgtatcccgcacgtatccgtatccgggcgcgtatcagatactgatacgagggtcagctgccgtatcggggtgacgttgatagtaagtaacatctctgatcaaaactctttgcagtgcgtcgtcctcccagattgatttaagactgtctgcctctcgattacccaaagaaaagatgaaagaataatcagctgtcaatgtgtagtactagcagcaggcaacaattaatgcaacatggatgcaggaacgatgtgtatatagatagatatccgcttcactttatttaccgcaaaaatacaccgttgcatacatcacaattcacatcgcatatgctgctgatgctgattgctgcatacccgtctactgatcgatcgattgatagataatgtgttaatcagatgcctagttttatttgtttatgtagtactccctccgttttaaaatatttgacaccgttgactttttaggacgtgtttgaccattcgtcttattccaaaaatctatgtaattatttttttttcatattatttgatttattgttaaatatacttttatgtacatatatagttttacatatttcataaatttttttaataagataaacggtcaaacttgttataagaagtcaacggtgtcaaacattttgaaatggagagagtaattaagctacgcaggccatgagattgatcgatcgaaataacaagtgaacatgcagtagcagtagcagagtagtgtgtcgatcgtcatggtttggcagctggaggacctccatagcatccgtatgcaacggtgcatccccgtcccgggcgtgtgtaaggttcgccgggaatcctgggcaccgggtaccgtggtggattcagcgctccgttcctaccaattgcatctgctgctcctgctctccctgcttccatcaatcacatcgtacaacacatattacaaattaagtcaaccaaccaggcttaactatctcaataattataagcaggattatcgcatttatcatgcacggtagtcttttcagtttttgaaaccacgatatgtcttgcggttataccgcacggttttcacggtaaccacgtggttaccgcgggaggaaaaaaaagataaggtgaaccctgattataagtgtatttacctccttgtaccgaggcagtgtgcagggtgcagatgagggcgaggaccatcaggagcaccttgcaaaggtagctgcgttgcgtcctcattactatcttattatctctaccttaattctttttctgatctctccctcaaatatattgcacctctttgcttgctggtgtttgtttgcttctcggctgttgggttttcacaatttatagagccagtcggttgggtagtgcatgcagttcgctatcgttgaccaggggtcaatgacactctttcttccctggactaattaggcacctggccaacaattaaagtcgtcattttttccacgacatgcaatgtctcatcatatctctgtggactgtacgtggagtaatatcgcccggtgaattccatcgctggatccagaaatttttacgaacctaggcaagactagcaataggtaaagttttatacagatccatatatagatcatctcgacgtgagcatttgcgttactagtttgtgtgaaacatgttaattaagttgctagtactatacagtactactactgttgtgctgctcatacggctcaaacactgattaagcaaggtaattttgtcttaatcccaatgaatgtgccggccggtcaactatccacggtcgtccggccttcgccactgcactggctgtgttcggaagtttaatagtatagcccattactggctccaattcatctacaaccaatctaatagctaatttatataatagttgcttactatactataaatatattaatattatatggtcccacctgtcatacacacattgcgtattggaatccgcgctgcagctggctatagatttgtagcccgctgctcttctctctcatcttttatctcattaaaatatgtttacagctagctaatagcctgctattatacctgctctgatagaaaccatctcctatgcacggaaaacggagcggtctattagcgtgagattaattaagtattagccatttttttcaaaaatagatcaatatgattttttttaataatttttgtatagaaattttttgtaaaaaaacgcaccgtttagcaatttgaaaagtatacgtgtggaaaatgagaggggaatgttgggaactagctcttgcaagcgtacgtgttgggaactagccatactgtcgagtaatcaaccatagatatatggtattagagcagccctaatactacagtcaatataccagtggtgcacctatacaatagttaactatatatttataatccattattaatacttggatctctccatatagttaaaaaaataatatttacatgtggtccagcataaattcacatatacttttaagcgttaaatgcattatgcttaggaggagatggcattcagacaacttagagcaaggttaatagtatagcccactactagctccaattcatttatagccaatctaatagctaatttatacaatatttgcttactatactataatatatggtcccacctgtcatatacacattgcgtcttggagtccgcgctgcagctggctacaaatctatagcccgctgctcttctctctcatcttttatctcattaaaatatgtttgtagctggttaatagtctgctattgtacccgctcttatagagttctcaaaaaaaaagaacaactttacggtatattttactgtaaattttgtcttttaagccttctcctgtagagatgacgtggaagatactaatagtaagatgcttattctattattatccttaacctcacaaagatctcccacaagcaaattcagctatctaattggaacaatcctacgatggtccatgatatgagtaacggacggatcttgcctctaccccaggggtgccaaagaaagtgttgcgtagccttattctcctagcgtcatgggagatttggaaggagcgaaatcagttaagacaaaaaaaaactatcggcaacatacttggttgcaaagatcaaagaggaggcacagatttgggccatggcagcaccgaatggactatgtaacatagtgccttagagtcttcttttttcttttaaacctgtatagagctactcttgtacagctttttttttttgccatattcaatgaaattggcacattctaagtgccggttcgttaaaaaaaactcatagttttttgaagttcgtgttacaactggttacatatatgtagcttgctttttttttctgtcctcttctctcttaatttcaattcagtacaaatccgatgtgacgtcttctatagcccgtttacatgatcttatcatacatgcatgctcttagataatcacactccacattccaaacagattccattgtcataggtatacagaggaaatgtactcctccccctatcccataatataaggtgtgcacatatttcaatattcaactttaaaaacatttgatcaacaattattataaaataaaatgaattttatttgttaaaatttatatcattggattgacatttaaatttactttaatgtgattataaatttgttgcaataaaccttatagtatatgagaaattttaagtcaaagattagttttgaagattatgtcaagtttgaccatacctcttattatgggatggagggagtagtatacaaagttgtagttgaccattcatagtccttggaaagatatcaagcatcgagattagttcaaggttttttactgaataataatagtgataattaacgtgtatggttaaaactcttggcagccagtgcgtcgttgaagattaatttaagatcactgtcatacaactcttgtcaaacatggacatggacaacgcccaatagaaatctaatatttgtctgcctctcgatttatacagataagaaagtaagaataatgaaacttcaaattcaagaccagggtcgaatgatgccatcacggagaaggcgaacaagcaaaggagccgaagtacagtttctaagatcgagttaggtcttaagtagggctgtggagcagcataaatctagcctctatcttttttattttgtgagagcgttccattcagctttgctcttattttaatttgagttggaactgtttaactggactccagcttttgaaaagaaagaactgaaactgaaaatggcgtcaaacagactcttggagagcagactgtcatggtaagacttcttcacctggagctggaggggcgtcgcactcgtcgatactgctgcatcccacgccgcccctggagtaactgctggccttgttggaacgaggacctggatatcccacggacacacctctccctgcataaatatatccagcatatatatgtatagtccattgatttattcggttaattaattaccaacacaacactgtctagtgagtgatctacagtctttaactatttacctccttgagctgggcgcagggcgcagatgagagccaggagaatcaggagcgccttccaaatggagacagcagaagaagatccccgttgcttcctcatcttcagtttcttcgtctcactggtcgaacttgttgaaccttacctcttggtttggtgctcatcacaacttatagcgcctgcagtgctggggagtgcaatttgctgttgtatcctttactttctccgtccctaaccaaccatttttagatggacacagatatttaaaaagtagaccaaaatacttaaagatatattatgattaattgagaaaagatagtagatgatgaaatcaaaatagaaaatgattgtgattagttaagagaatgaaacatatgaagaaatagttttattttggaaaacgagattttgagaaagaaaagtgcattcaaacttttttttagaaagaaattgtgcgcgcggcggcgtagctcctccttccacggccaatttggcactagccggtagccactcacaggccacccaccacccattctcggcgtgtctcaatgtgtgtgcatggagcaatcaatcatggtggataactggatatatcatggattagtggatgttaaaagaatcttgacaatatataaggcaaagcttttatctttccttcaaaagagttaaaataatcttgacgaattgactttaccagcgtcaaatggacacactagccagcaggaataatggtgctgctacttgtagtggcggctttacaaatttttcgttggatggtcctacttcaggcctttaaaatttcataacacccaaacttagtatacatatataaaatttgttcaaattatcacacacatatagcattaatatcttattaattggccagttttcttaaagacaaagacaacaaaaatatctaccacacatatagcatattgcttataataagaagatattttgtataaacttttttctgaacgaactacccaaaatcaacttgaatattagcaaactacaaaatatgcataattacaaacatggtaaagaaggagttccaaagaacaaatatgagatataactcggatgtttacattccaaaacaaaaaaaaaatacaatcaatcatacgttgtataaaaaattacctgccattatgttctcgatcacttcttactatttctatttcttctgcttctccctcttcctccctgctgcttctgcattatgcaaacaagcaaagatacgaagggaaagggattcatgagagagagaactcaccggttaggcagcaagagaaatcaaccaatccctggatggaataaaaatttatgttctaattctaggccactgagtcggtcttggacaatgcagggtcttgagtgtggcaatcgcgacggatgtgatagcgactagcgaaaggcttgagctcaccaaatctgcaaccatgcacatatagattggccaaacaataaggcctttcaaaatttatttttcaagatatgtatctattgttcacgctagtcaaactagagtggtatttagctggcgtggtaaaacaatactgtcacgccagtctcgttgacgtgacagcgttatttggccacgtcgatctcgctaacatggcaacgttatttggtcacgccgctctcgttggtttagcgggacaaaactgtcgtacccattgcatgcgacttatcaatattgttttggttcagattttgtaaataagttttgaaagggtttatttttaaaattaaaaatttaaaaggttaaaaaataaaaataattcctgtagtaaacagtggagtagtatgtgttgtgtacaacttcctggctccttgttccatgatgtactcatgtatatgcagcacaagcataatacatgggacaaacacttgtttacttagaaaatgttcctatgtgatctgtaatacatgagtaaatttcagaaaactgtaactataataacaaaactatcagtttgctacaacattagtgatctatttcagt

SEQ ID NO: 25709 - DNA, 2882 bp, Oryza sativa
tatagggagattgtttgtttcgttttccgtacgcacgcttcccaaactactaaacggtgtttttttgcaaaaagtttttccagaaaagttgctttagaaaatcatattaatccatttttaaagtttaaaatagctaatatttaattaatcatgtgctaaatggctcacctcgttttacgtatcttctcaatcttctctatctcctcctccaacacagccttagtacttccttcggttttataattcttgacgttttagacaataacacagtcttcaaaatatatctttgatcttgtttttctattataatatatagaataaataaatacatgtttatttttattatagaactttgaacgacaaatacatatatgttggtctagttcttttaaactaaatacttttaaaattttgataattaaagttataaaagtttgactacaatcttatccaaaacataaccagagagagtaattgattaactctcaatgattatgagtttaaatatgtgcatcttctgtcccataaaagccaatttctgagggtaaacttggattggatgaatgtttgttcagattcgtgtattgtagttattttttgtgagacagaggaagtatttacctccttctactgagacagtttccagggtgcagatgagagccaggaccaacaggagcaccttgcagagggacacaacagcagcagaagaagaagatgaacaaggagagcggctttgcttcctcatcatcactgactgaaattttagctcttggtttgtttgttgtgtacgagctagctgttgggttttcagaatttatagagacagctaacttagcaaggcagggtacgtagtgcagttcgctatcgtttaccaggggtcaatgcgctccttttaggacaaattaggcactggccaatatagtggtcatttttttccacgatatgcaatgcctcatcttcgtggaatgttgagtaatcagccatacaggcggattagggatccaggatttggaaaattgggcattgcactaagatctcgctggctatgctgtaaatggcagcagagaacatcgccggataaacgatggcaggggcttaatatcccaatctcccagaaagaaaagaatctggtcgcagtttccactttgatttcggtgggagatgggaatacgacgttgttctgggaggactactagatagatggaacatcgatacgctctttggcgccagcggtttatgctattgtccctgcgcgtttgtggagtcgttgaactgtggccgaggcgctccacgacaggcgttggatacgggacatttctaccgcactgggtgtccaagcaattttggagtacatcaacctttggatgacactcagatcggtgcagctctcagatgagcctgactcattgtcttggagatgggagtccttaggtgagtattcttctcgctcggcatatcaagttatgttcttgggaagaagtcgcttcctatacaaaccaatctggaaatccttgcccctctccctcccaggtgtcattactttctttggttggttactcttaataggtgttggacagcggatcgactttggaaccgtgggctatcgcatcctgaccgttgtgtcctttgcgatcaatgtgatgaaatgatagatcacctcttggtcgcatgtccgaagtcccgacaactttggtggactgcacttcaagcaattgggtatgcagtttgtttgccccacaatgaggcttattttcacttgtggctttgtgatgcccgaaagaaagtgatcaaaggcgcaccgtcgaaggttcgacaccattacggccctagtagcatggacgatttcgaagaagagaaacaataaaatcttcaatcaggaaactcgatcttggacagagattgcgagggtcatgacaaatgaagccgagctgtggtggctagctagggcagcgattcccgccttggttgttcctgtagttggaacggggtcgcaaattcagtcgtagagaataggcttttgatctttggtctttcctgtatcatgtctccgtcttcttttattttcttaggttacccttgtaaataacttttgctcatttttaatgtaaagatgcgctccttacgtattaaaaaaacagtgggcagacccatattcgaaatttttatgagtgggacaagcctaacaatagacagagtccacacaagtttatacaaaatccatagatcattttagagcaccgttacggtgctctctacctataatattctactagcactaccggtagaagtaatctgagccgttaatttataagggtacattagtattttactaattaaaggttaagggtaattttaacatttacttttctttttcttaatagaacgatcagttcgtctgtgtcaccgctcctttcgttctggcgtgcacccaactccggcggcagggcccactccggcaagtgagagctcctccatcgaacaaaactactgaacaaagctatatagtcaaatcgagcagcaagggcaaatgtgctgttataaactccgtcgagcagaattcagaattgttgctacctctacgggtccatcccggaggcttgaccgacttcactaaagtacactatatctaatccatcatatgtgtgaccaggctgtagcgtcgcccctgtgaccaaacaacatcttatcagctgtaggtgaggagaaacctaggtaggtgatagtagatatgtggtgtgtacaactccttgtctccttgttacttgtacatgtactgctaatgttccatgttgtacaagcagcacaaacaaaatacatggggcaacacttgttcactcggaaaatgtttctgtgtggatctgtaatacaatgggtacgttcat

SEQ ID NO: 25710 - DNA, 3239 bp, Oryza sativa
cctttttaaaccaagtgccaggacatctagcttaaagacttaccaatcatggtatatgccaataagacctcgctcgtaaatgataccaagagtgtcttctcagatattgtgggccaacattcattacccaagatattggagaatcaataattgccgcaaaacttccaagccctgcgttcatgtccataatattcctatacctcaaagaacctatcagcttgtttatcctcttgtaagtactgacatacttcttccacaacttattatcctcctcaaaaatttcttctgtaacacctggggtgcgaccctgtagaattctgggaggggcagcaaatagtctctctgggaatttccgtagctgtgcttcttccgggaaaggtgttatacaaccttccattttcttatacctataacaataaaccatataaaaaatcattaatgaaacaacatataaatactgtcagaaatagaaatcttcagataagcatctattcttgattccaccattaagagagcatttgcatatatcagcagcgatcactgtaataagttgcccctgacaaggagtaagggcaatcacctacaaatcctataatctagtggtatatgaaaaagctagctgtttttcttgtataacaaggattttggaattatggcgattataacttagtcgagttgatatggcatgttagaggttaacagcacgcatatagtagaactagatacatagagaacacaccagacatcatctgcatcttgaattttgcacatcctgctaggatggtcatccttattatgacattcatttgaatctgcctttttgcgccaaataacagtatctcccttctcatgaatcttaccccagcacaacatttcagcaattttttcgattacattttgttctgcctctaaatcttccttggatcttttccatgcttggtgatttgtcttccaattgatgggaggaccagacaatatccaatagccaccaggcctcagaacccgatctactttaaacatgtacatcgcatctgcatgaagcgaaataatatagcatatgcaaaaaagaacagctgatagaggcactacattttgtatgcacagttgacactactaaccatttgacttccaggagattaagcagcgtgagcaatgggccatatcaaaagatccagaggggtatggtagttttatagttccaagcactccaattactgcaggaacacctcgctccaatgcaaattgaacctgagcttcatgtgagtctcgaggtgcaaatgacatggttaatacatttctgtccattaggtaagcaccccagctggcaacctacaagtggcttaaattgttattgcagctacaacaggtgatcaagaaaatactaacataaggtcaatgaaactaaatggcctaattatacacatgaaagttcagagaaattgggctaagatgcactaatatttcatgaattactgctatgaggtacatcataaattaaggaaagaagcaactaaaaagacgctaacagagaggctaaaagtagctgctcaatgtttatacatgttcaagaatgataggatctgtttagatgacataccccgcatccagtatcaagtgcagtcctaatggtgccatcagtaaatggaatgacggatgcaagctcatcaatgtaggcatttgctccattgggaaacattgtcccccctcctggaaatctaaacacatctccctcaaactggacccagttctgaacagccttctcaactgtcaaattcttatatggtgcatttgcatatggaacatagtcacggctcttgggccaaggaaaaggggtgacatagcctttgggtgctgggattagacagcgcagtttcttagtctctgtaggacaatgcctctctcggtagttcatattttctctaggaaagttcattgctcggttctgatcctgacaaggagtatagtcactgtatcgaatatggcatggctcaaagactttatcggtcatgaccaaaggattaacaccacctaagctatgatgggtctcaaagtgcaagtttggcaagattgtacagtcggtctcttttgtcaccctcaatgcaatactatccccccttccggtcccacttttctgccaagctcctagtatataaaagaagcagcacaaactcatcacaattacgatggacatcgtgctccgcgttctacggtcacctggattcatcctcgagcccctcatgaacctgaaattgttgcagggaaacaattttgaacgaatttcagaaaattattacaggaaacttagttattctaaatgaatttatgaattgaaatatttgcagaacatgcagagactgggagtttcttccataacccaaaaatgtttgcagtgtatatatgttagtagatggcaaaagcacaaacaggggaaacattgagtcaattcaaaaagtgcttggtgatgcctatttgactcctaaccaattagtatgacgttaactatttccaaaatagcatatacttcctccgtttcacaatgtaagtcattctagcatttcccacattcatattgatgttaatgaatctagacacatatatatctatctaggttcattaatatcaatataaatatggaaaatactaaaatgatttacattgtgaaacggaggtagtatgtaccaattcaaatcgaacctggcatgggaccctttcgaatgcctatatagagttttctgataatggattctcaacccccgaggcagttcatcagcagatattatgctagctaacacgggagatcgaatgatgaaacaaagcaactgaactgaaggagcgagagatttagtcgtgacaaggcataaccaatttaaccagttcccatatctacaaggtcaatggccacctagaaatgaccaaaaatcagcctgtcgcggaagcatcgggggcttcgccatacaactcagcaagcaaaaggtaagaaatcgcggatactcgctgcatagcttggtcggggaatcatcatcacacaactcgatccgcaacaacaaaaaaccacctggcaggtgcagattctctctacacagtagaactagaactagaagggggctaagctctaagctaactcggaatcccgatccccacagcccagtaaagaactacacagagaacggattggattcgagacgaggaaggaagctctcgatcggaggaagcaaaccaaacgaaaccaaaccgatacc

SEQ ID NO: 25711 - DNA, 5347 bp, Oryza sativa
ggtcgctccccgaccacgtccgctccaaccgctgcctgcaaaacaaaaaaaaaaaccagaatattcttttattaagctcacagatctgagattatttatactggagtagcataattcaatgtgtttgaactggtacactgtatgactttatttttctgaactgaagttttattggttagatctagtcagttagagaaacctctttgttttttttttcaaaacatagtacaatgtactctatttttatgaacacatttgaagactagattgatatatttttatcttcagatttcatcacaggtgactccctgtcaaggggtatatcatctataaccaacagaataatatctaatcagatgagttatgctcgctttgcgaaaatctcttatgtgtttgtttacctgtgacttaaatgcattcaacttacttgacactttacgaaatatcaaatcgaggtttaattctaataatgaaaaaaatcaaacagaaacatatatatttttcatactctagtagtaatttattgttatattgacatattcgcatggtagtaactaattgcggaatagctaattgaaagtccgtttgatatctgaatgaagtcatgaaccttgcatatcgttgaatggagagcatagataatagggttttgatttcctatgttagatagatggggttgcgaggtaatggctattttatttatatacaaatattgcgaggtaaaaataatgcttcggtgtagaactacttaacaggtttcagtgtagatcatctacttagttgtgtagttgtgagtgtattcgtttgtactgttttttttataaaaaagctacataaattaaccagatccatacttctccaaataacaaatcttaaacgatttattgaagaacttcgcaaatttgaagatcaagaaaaaaccgatttctattttatgaacgatgggcttgggtttgtgctggtccatacttatgggcttaatatggcccgacccaaaagtcacagaggcccgagagagagagaacgcgcgcatctactggacttctgggcccacctgtcggcgtcagtcacaaaggcaatagaatcccgaaccgtccttcacagcgccgcttcaaaaccctagccgactcaatcccggccacactcccacccccacgcttccctcgccgccgccgccgccgccgccgccgccgcctctctccccgcaatctcctcgccgccgccaccgcagtcaacgacgccggccgtcgctgtctttctcgcgcgcgcgtggaggattcgaggttttatgtaggcgaagatggcgctagaaatctccatggaaggcatcgaagcgcgggcgcgggagcttggggtcgacctctccaccgtcgatctcgactccgtcaccctccccgccggcgaggacttcggcatcctcaggtagccaccgcctctcgatccggccccaacaaaactacctcacgccgtcgtgcgctttcgctggataccctagtcacccccttccgtttcattcagatccgattatagcatcgcgtgactgttcgatctgccttaatcaacgcggcagctagtatctgatgcttttagctcccactggtagagattttgatacggttttttagatgtgccatgatgttaatctgcatgagaactcgtaatgtgtcggtatgctaactatgtataacattataagtgacatagcaggcactgattgcatatatttgtatataccaaggttaaacatgcaactggtgtgaatgactgtatttcttatctgactaaaattgttccatctggtagcttatggcggctgatgcttaagctgactcacaattacatggccagtattgtttgcatttaacgatttttgtttgtccagaaaattttcttgagttttccttttatgtcgctgactgatttgtaatgttcagtgacgatgaggatttacttcggattgatgaccctatggagcttgaaatggggtttgctaacgttgttgtcgtggacaacctgcccgttgttccaccagagaagtttgagaagttggagaacgtcatacgcaagatctacagtcaaattggtgcgatcaaagaaggtggtctttggatgcctgtaaacccagagacaaagaagacatacggttactgcttcatcgagtataataccccacaggtactttgccacatgtcagatgcatttttccccttagagcatgacacatggcttgattcttgtctttgcaagtcatccctcagatctgtaccatttgaacatggatcacacatgagtacatgccttgagaacgccatgggcccaatcatttaaatattgttttgaaccatcattatttgcttcatccatgttcatttagcttttaatcgtttaatatgatgtaagatagaaatattgtgatctttacttatagtcaggtgaggaaaaataggaaattgaacgactctgtcggatgtttcgtttttatgttcatttttaagtctagtagggtttaagtttgtattactttgtttgacattatgtcaggaagctgagcttgctagggaaaagacaaatgggtacaagctcgacaagtctcacatctttgcagttaacatgtttgatgactttgacaagtacatgaaagttccagacgaatggatgcctgctgaaattaagccatacactcctggagtaagcattttcaactttacaccccccaaaagcgtgtttattttttaatgagcattttaattttgaaaattattaagatcctttttgtgacattgcctaatacctagattttgcacatgttttgcaggagaacttgcaaaaatggctggctgatgagaaggcccgggaccaatttgttatccgtgctggtactttcactgaagtttactggaatgatgcaaggcagaagatgcctgaacttgtgttccaaaagcaggtaccttgggtttcttgaattgaaattgaaaaatttaaggtcatgaactgtgctctgcactcccaatgcataactgaatatactcatcactttacctttttttttactcgtctagtactggacagacagttttattcagtggtcccctcttggaacatacttggcaacagtgcataggcagggctcccaggtgtggggtggcgacgataagtttgagcgtctaatgcgatttgctcatgcacaggtacgtgatttacgctgcactgagttatgtcagatatgtaatattttatctacctaacactgcttgtaacaggtgaaactgattgacttctcccctggtgagaaatatttggtcacatatagtagccacgagcccagcaaccctagagacactcatgtaagggaccgtcttacattcatttatctgctcatagctttcccttctgacttttgtgctggatgttgtagagggttgttcttaatatctttgatgtgaggactggcaaagtgatgcgcgactttaaaggaagtgctgatgaattcagtgccagtggaaatatcagtgtttctggtgtttcatggcctattttcaggtgaacacactggtttttgtatttgttattgaatgcattacctctttgttaagttgttgtacctgggggtgcttactatattttttgtgtctgaagatggggtggtggaaaagacgataaatattttgcaaggcttgggaagaatgttatatctgtctatgagactgaaacattctcccttcttgataagaaatctctgaaggttgagaatgttgtcgacttctgctggtctccaactgatccaatcatagccctttttgtccctgagttgggtggaggaaaccagcctgcaagggtaagtgcaattttctgtgcttcatcccttttgaggaagttccgtcaactaatggtgaagactaaaatctataatttttattgaaaggtgagccttgtgcaaattcctggcaaagaggagctgcggcagaaaaaccttttcagtgtcagtgattgcaagatgtactggcagaacagtggagaatatcttgctgtccaggttgatagatacacaaaaaccaagaagagtacttacactggatttgagctttttagaattaaggaaagggacatacccattgaggttcttgaattggacaacaagaacgataagatcattgcctttgcatgggagcccaaaggtcaccgctttgctgttattcatggtgatggccctaagcctgatataagcttctactccatgaaacatcccaacaacatcagtcgtgtgtccaagctcaccactctcaagggcaagcaggctaatgcattgttctggtctcctggtggaagattcattgttttcgctggtctgaagggctttaatggcaagctggagttttacaatgttgatgagcttgagacgatggcaacgggtgaacatttcatggctactgacattatgtgggatcctactgaaaggtaagcctatacttggtcagaaatttgtagtcctcaccatgacactggcactttattatgtcaaattttcaaaaaccaagtatcatatgccctacgaaaaatgttcactctaaatgaaaatttcaaaaccaactcttagaatttaaaatatttgagttttggttgcaatttttttataatacttctcactggtgtgactaaacaagttaagatggatttccttgtatgttagtggaactaaaatgatgttgggatttttttttgttagatatcttgcatctgcagttacctcagtccatgaaatggagaatggtttccaaatatggtctttcagtggcaagcaactttacaaggtgtcaaaggaccacttctttcaggtatggaggttccatcctacccttttctggactctcatgtctcattgctttacaccattgtaatcctttgtcatttactttaatttactggtacagttcctgtggcgtccgagaccaccgtcgctgctgacccctgaaaaggaagacgagattgcgaagaacctgaggaagtacagcaagaagtacgagcaagaggatcaggatgccttcaaccagctgagcgagcaggaacgcaagaggcggaagcagcttcaggaggaatgggaaggatgggttgccaagtggaagcagctgcacgaggaagagagaccatacaggatggagctcagagacggggaggccagtgacgatgaggaagagtacgacaccaaggaagttgagattgaagaggaggtagacgtccaagaagaagttccattcgagctggatcaggagtgaaaagcttatgctagcatctgctgagatctttttctgttgttgcctgtcttaagttaatttctgccccctttgcataa

SEQ ID NO: 25712 - DNA, 4014 bp, Oryza sativa
  unsure (1)..(4014): unsure at all n locations
tttccaaatatggtctttcagtggcaagcaactttacaaggtgtcaaaggaccacttctttcaggtatggaggttccatcctacccttttctggactctcatgtctcattgctttacaccattgtaatcctttgtcatttactttaatttactggtacagttcctgtggcgtccgagaccaccgtcgctgctgacccctgaaaaggaagacgagattgcgaagaacctgaggaagtacagcaagaagtacgagcaagaggatcaggatgccttcaaccagctgagcgagcaggaacgcaagaggcggaagcagcttcaggaggaatgggaaggatgggttgccaagtggaagcagctgcacgagggaaaggaaaggaaggaaaccccccccaaaatttttaaaccccccaaagagggggggggaaatattttgggggggggggaaaaaaggagccccccttttttttccccaaaaagggnnaaaagaaanaacggggaggccagtgacgatgaggaagagtacgacaccaaggaagttgagattgaagaggaggtagacgtccaagaagaagttccattcgagctggatcangantttgagagcttgtgctagcatctgctgagaaccttnnctgcctaagtctgtcttaagttaatttctgccccctttgcataataggctttagagatcaagaacacaatttcttgatctttctggtttctactggttgattgtacactttgtccttggattttacggaccaatgtattcgaagatgaaaatttgcggttggcatactaattttaatgtgtcgttctccaatcctgcaaaacgcgttcacgtatttcctcatccacgcctccacataccctttagcaaaagcgcactggtgaagttttttttttgtttggtcacctacggttttcttggtttttgtcctgtagaacaagatcgaattcttaaatcttgtattttttaattagatcgggctacattaaaatcagattcagatcatcagatggtaaagcctggtgctgttcatcagatcatcagacggttttcaaatccgtcttcctgccgtctcggtatcttcctctgccttggcgaattccaagttcaggcatcccggcgttgcaagatgcaatcggacgcggtggcgcggagccccaggcaaacggtgagagtcggaggccggcgccccacggccgatccctcccgcggctcatcggaggcgtacggcttcgtgggatccatcgccgcggtggccgccgccgccgcctacctcgcgtgggcttacctgccggagccgtggctgcgtttcctcggtgtcacctactaccccgccaggtcggtacagcgtagtccatactcctcacgtttcagttgtttgtttgcttcgcctggacgagtgatttgagtctcatggcgatggcgttgtgcgcaccggtgtcggtgtggttttctttcaggcattgggcactggccatgccgtcgctgctgctgaaagcggcggcgcaggggatggtgctctacatggcctccaactttctgctcgctcctgctccgactttgcttggccactatctccggtgagacttttgctgtgctcacttcggtagttccgttccaacattgttgcattagtggtacatgttcagatattttttgccttttgccagatgaatttgcccgggagcctgcggcgtgtggtactgcaacaggggaggagaaacccatcgaggacatatcagatattagcattgacaagataaacaatctcatgtttggcaatgcatcatcaagctgatgcatttactacttctgatgaagctctcaactgatcaccagttgaccacaaacatgttttttgctttctcttggtgtgttgatggctcactcgtttgcaagctagcattgtgctattcacttatgattaacatggttatatgggttcttttaatgaacatgtttctgtactggactcatgcttgcagcaactgcatgcttaacagaacttcaattccactgctcaccactagtatgaactgctgttggttgtgggtataccacaacatagatccgaatgctaagaaaaatactatacgtacgactaaacttgtccgactttggaacgaccttaacgccgtgagctcgtgacgttaatctccgtatgaccaagccatgttgccaccatactaagtcacgtattgagttgttttaccgtttgatcgtacgctgatcggacatacaggtcgtacgtatagcattgttcgaatgctaaatatcaagtaatgcgcagtgctttaatttggcgaagcttcgttttattcaaatttcaaagaacacataatgtacaacacacaattgcacgaataactacgtacaaacccgcatatcacaaacttccagcctatcttctcattcttcccctccctaagttgctggtgcacgttgtaacaacatgttcttacttctcctcaaactccacatcaataacatcaggccctgagcttcttgaactgctggctcgtccagaggacctattgtttggctgccacactatgttttggcaattcatgcaccgaatcacttggttgcggtaacccacaaacctccgtttgcacgctgggcatgtcccctggaattgaaacacattaaatcagtaactacctagtattttgaaagcatcccaggttttgcttgactacgagtagtaccccacaccaaagaacaacagattaacaagagcaagttgatgcattatgatacccttgtatcactatgtgatcagggaaattaatttcaagccagagaaagccacttcaaccataaacaaaaatatacaacaaactcaaagtaaacacaaacatcaacagagtagagcactgtgctagtggtgctgcatatcatgtggctgatagtagcagtatacttgcatacaggttaaagcctcttaaaacccatttaattttagcatacaatatacttaacaattagtcagcaaaagaacagtcttagcacacactcgccggtggctccaaggccatttcaaaactgagtacaataaacacaggataacagaccaaactcagaaagatgagtattacctcaatggcgacccgattaccaaatgtcccaaggagaagtggcgcagcaaaaggcaggacaaatgtaccaaaaatgaaaactctgaatagccatcctgacagtgcaaaccaaatgaaaaagatcgtctacataaaaaaaaagcagctagtgagcacaaaatctcttgaaagggattgattatcatttgaagcagataatactacatacagtatctacaggctgttaaaaactacggtgcatacaattttgatcttaaaaaaaaatgtatgtgctacattacatggtttcatggacgtgacaacatgcaaaggtgtatatccaaaaatgataacagagagtactaggcaaaatgtctagcatttttttctcaagcaccagaaatctagtcacaaatgaaaggattggcaatgtgaaaatagagtcatctctctcttctttctaatgtttttagctccttcaaatcatagactatatatactaaagaagcacaaatattcaggcagctataaagggcttaccttcacatttcatgttttcaaggtcttatgatcatcttgtggttagctaagcttaggcagtagaactctactaaacaatctaaatgatcatcgtgatcaccaccatggcactgagttaaaaatgcgaacattttgggacctttggtgataataaggttatcttgatcatattcctttcatttggggtatagctggtggagtcctgatcatgttatcagctttggacaacgtgtggagtatactttcaggttcacttgcctgctctctattgtgctcattccaataacatcctgaaatccttggttgtttcaagtattggtctggagcagagcagggtgtcatgtggcatagaaatggaattctttatttgaattgtgctcacgttgc

SEQ ID NO: 25713 - DNA, 8244 bp, Oryza sativa
tgcgggagaagtcgacggagaaggagcgccaccgccggccgatgccgagctcggcgtcgatctcgacggcgcgcgcgcgggcggcgcgcgcggcctcggccaggcgcctcgatatcgagaacctcccgtccaggcgctgcgcggtctggcgcacctcgaacgcgagccgctcggcgccggcgttggcgccccgccacgcccgccgcacgaagccgtcgaagtcagcgccgccgccgaacgcgcgcggggagaccgtggcggcccggctccgcctcccgtacgccggtcgaagggacacgcgcccagctgccgccggcggcggcggtggacgccaccgcgcgaacgtttccattccgggagaggcgagagagcgtcgtggcgtcggagatttttcgtgcggatgtggtggtcttccttcgtccgtgggccgtcttggtcgctttgtttacttgggctttttattctactgggcctaatattaattagctcgggcctaatgatcctttccggattcggaaatccgctctaatcattcatacgtgccgttgaaatgccatagaaaaaatcacacgggagatggatagcaaaatcgtcttttcaatggatgttttgtgttaattactctctccacgtacttgtttataacatttctgagttatttaagcagaagatgttgttgatgataatagattttttttttggcggatggatggaatagccaaagaggatatcataacgggggatttattgtattgttccttccatgcaaaacatgtatttttcttgtttacaaaccacaattcagtagatgcgtttccaacaaaagatagcaaattcaactgataaactatatagccattttcctgcagctgtttagttctatcaaaccatgtaaacatacattacagttattttcggcaatatgcatactgggagttttttacaggagtttttacagcaagtcacatgcacagatgatggtcaattgacaaactcaaaagtcctaagacgtgtgctgaccccggccccatctagaaatcagctttattttgttaggatagacagatgtataattattccagtattcatgttccatctgcaaaaaatgctccatctagtactccagaattccattgctccatctgcaaaaatcagacttgctcgacggcggcaaccgtaggttctatctcttcaagtatggacagtagctttgggtcctggaaatcttttatcagcaagcttgctcctgcatcttgcagaactttctctggattcctagttgtcagaccaactacaggaacatttgcagctacaccggctcgaatccctgacgcggagtccttgacaaggatgaacaccatgttagtactattttaacatgaatatagttagttctcaaaacaaaacaaaaaaaaagtacatgaatgtagttgatgataaaactgaagataactattttgtgaacaaaagtacaaaactaatgtgtacctcaaaaatgaatgtgtgatcaggtgatgcaccaataagctcaagagccttgaggtaaggatcagggaatggcttggctcggtcacactcgctcccgattacgagcaccgggaagaattcagtgagcccaaggagtgacagcatgagctctgcatttgaccttggagcatttgttacggcggcgcgtttcagcttgtgatcttttatccatctgcacagatcatgcaggccttctactgccaccaactgttctggagccaacctgcatagttttcggcttaaggttatcaggatgaaccaacctgcctgctagttctgaaaccgaatgactatgttatgttaggaaaattcagagttgtcagtgcgttggcattagcattgtgtttaggtttacagctgaatttctgcagaaaaactaaaatctgcaattagttcatctaccatatcatgctatagtatggaagaagataagaatttatataccttctgtacaatgcttccttgtcgtccatgaacttcattgccttgtcatgatccaaatccgggaacaaggcccttgcgaggtcatcgttgtgccccccgctgatattggcgctgtagaactcctcggagatgggcacgccattgttgaaaccaacctgtagtcattacacacatagaaacgcgaaggttcagaattgcagagtatgcagagaagcagagcataatcgcaagccatgagaaagaaggaaagacggagcaagcagaacctgctgcagcagttcgcggaaggcgcagaaatggataggatcagagtcgcagagggtgccatcgatgtcaaacaagatcgcctccagtggagcaagctttgacagcgcactgctgcttaattcagacagagagacacatagaggatcagttatcaatttatcatcagtatcacagtatgtttcggcgtttctggtttgttagaacagcatgaactctgaacatatgcaaactgaagaacgattgatcaattgaacagcacgagcagctgaaccagcaatataatcaatcgatcatctccctcccaactcccaagaaaattacagtaggatgctctcctatttcggagtataaaaaagaacaaaaaggaacagcgaaaatggagaatccatgatccatcttgtcagaactcagtaagaattcacctggtggcggctgccatgttcaccgggacagctgctctcctcctccaacaagtgctcgtcgtcttaatccttcctctcctcccttgtgaagctactgctgttgctgctgctgcaacgtggagaggaagagacggtgcaaatgcagacatataaaggagacgagattgagcgaatcgatgcaaagcagaggaggagaggcgattcccgaattggattcgacctgtgcagagctaattgtttaaagatgagtggcgaggctgtagctgcctgcaagcagtccctgcaacgtacgccggaggcagagcgcgaatggaggatgcatacgtggcgtgtgcgcttacgtacgtgtgggcgtgtggctgagagagagcaggcgaggcgtggcaacggatagtcaaaagggtgactggtgtgtttgttgctgtagcctgtaggaggctatgggcctaatttttcgcttatgtttatacttatcaattaaaatttaatttttaactataaatttgaagttaattttgtgatttttatcgaagtttatttttagcatttgtttttagataaccgagaatatgcatataaaaattttattcacaaattatgttttatttgtaaatatgatgtttaacttattccccgaaggggaataagcgatacgacgaaaaaatacgcttctttgactgggatagatataccaacggtcaaatgaccatccttccaagaaacttcatgacttcacgcaaaaagttgatcgcttgcatgtgaagtccatgtgagtctcacttattatattaatttaaaaccggccattatgctgataagagatcaaaattgatatggataggttatatctgatatttaggttcagggttctgatttagcgataaaatgaaggacctcaagtgaacttattatggcacgtaattccatcccgtcattaggccgcatgaagtcgaaatattagttcagcccaatcaacttttacgataaaagttgacaaggaagggcgagtgggcgactcctgctcccgacgagaggttgcacaatggagatgtgcgtggatgaaggaggtttcgaactttcgacgggttatactcacagacagacggtatttgtagagtatatacggtcgttggaataagggtatacacgagattaagataaaagagaattgcgactgtgacttttatacaggtttgagccccttaactaacatgtaatagccctattcctattggtcgaagctggtgttgtttttatatatcaatatgtcataagtgcaatatttgggatggcctaattaatctagtctctgtcggtttggcggcacagagctctcacatatagtcgagagctaatgtagtcttctttgtcgaatatgaactcgacgagattggaggtagcgctggatccttcatgtcggcctttgtgggtcctacgttgagtttgtttatatctgtattggcttgtcttgtgttggcgtgtctagatctgtctagacgtgttagcgagttgcatgtgcctccttttcctaggggatcttgtatttatatcctcgaatgttcccttattcaagtagaactaagagacaagtatggatacaatctaagcagtccttgtagtgtatgagtagaactttgcttttccttcattatccggaacacatttcgtataagatttggtatatggtgagtcccgtcgagcccaacccaaaactattagatatgtcttctgtataacactgccaggagcgcttagagatcatgacgtgctaccctctgcagacggatttgaaccgtattagagacttgacaggcaactggactaggatcttcatgaccatctccttcaacgtctatatcgtctaaggctgtgttcgggagacaaagttgggaaccttgcctcccaacacggaaaacaaagtatgcaattatagtgagattaattagtattagcctaaaaaacttgaaaaatggattaatatgattttttaaagcaactttcatatagaaaacttttgcaaaaaaatgcatcgtttaacaatttgaaaagtgtgcgtgtggaaaacaagggaaataagttaggaaagaggggaaaagaacacatcctaatatcctctagcttcaatctataaacaatgtttaaatacattattttattaagcaaattatataacacatgttgtctactccctccataaaaaaaactcaacttatagagtttgaattttgtccaacagaaaaccaacttctatcatcatacctaccctcagaacataaaacgagaagttttattcctttataccctttacctgcctatcaccattacattttattcaataataaggggtgttttggtcattttcatcctccactaattttgtgttgggatgctaggattggattttatgtgggacagagggagtacaatatagatgctcaaagctacatggagtatgctcactataaggatataggtcaaatcattgattccacccattagctttgtgtcccaaggtggtgagcagagaatgcagcatgggttgtaggcttccaccagaagagtcctctgttacaacatctttatgaaacgattgcaaactgaatgcccgattttttccaaaaaaatcgggcgttgtttcatcacttgtgaaacaatgtttcagcacttagtataagaatatttcaattcttgaaaatagtggaacacaattggatcaccagatgaaacagtttggttcaacatatgaaacaaatgatttaaagccattgaaacatcacaagatccaagtgaaaatcgaaaaagaaaatgaaacaccaccaaaaccccaatctgacaagtgaaacatctatatacatctctactattataaaaattgaagatatgtttgccggtactattataaaaattgaagatgtgtttgtcggtacttaggtacgtcattcgtgtatgagtcggtttttaagttcatttgcttttggaaatacaaatccgtatttgagtcggattttaagtttgttctgttttggaaatacataaggaattgtataaataatctctttaaaaaaactcgcatgctaacttgagatgatcggacttttaattatagctcatgattttctaaaaaaatatatatccaaataaattctcacagtgaattttatcttaactaaccatataacaataataagattaaaatagtctttacccgttgcaacgcatgggtattttctcttgtatattgaacaatattacatagatgctcaataataagatggcgatgtggcgctgccgcctttgccgttgcatccgctttaccccgcggccactagcgatggatccactagtcccactatcgtcggcgctagatccactcaccggtcagcgcagcgtcttccttgagaagggtggcgcgatgtcgtccgagtcatcggagtcgtctctgtcgccatcgttgtcgtccgtgccacgctcccctcgaagtccaacgacccccgccttcctccactgctacttgcggcagtcgctgtccccgctgatgacccctagctatgccccctcccctgcccttccccgtgccctgccgctcttccctgcttccgttgtccaccccgccgcctacagcagtaggtcctcaccacgagatagcaacagggggcgtcgggatcgatgtctggaggcacgaggagacggcggtcgaagggacagaggaggagaatgagcatggttagagcaagttcaatagtatagccaactactagcttcaattcatctatagccaatttaatagctcatttatacaatagttacatactacactattaatacatggtcccacctgtcatacacacactgtgtcttggagtccgtgctacagctagctacaaatctgtagcccgctgcccttctctctccttatttatctccttaaaatatgtttgcagctagctaatagcaggctatagcttgctattgtacctgctcttagagagcaagacagtggagcagtgcccgatattttctctttgaattggtctactgatgtggagcgtttttgacatctttatccaaagcagcaacatgtggacatatgcagcttgagtagtttataccttactaaaaacatgtgtctcatcgaataaaaacttttggaacggagaaaatagtcctccctccgtttctaagtatttgacgctattgacttttttaaatatgtttgaatgttcatcttattcaagttcctatcatttgatttattgttaaatatacttatatgtatatatatagttttatatatttcacaaaagtttttaaataaaatgaatggttaaatatgtactaaaaattaagtcaacggtgtcaaatactccctccatctatttttgatagtcatatttcatcttggcatacagactaaggataagtaattctacttatcatctatttaagcatgctactagtcattcttcgtaaacaaacgattcattaatatttatatttctcgatgtccatatagccaatcacgtattaaatccgagaaagtcattaagatgataggttgttgaattgaaatatggctatcaaaaataatttttttagatttggaaatataactattaaaagtatatggagggattatttagtaaggtgagggagtattagtttggcgtgggatatgtacatgcacgtatcaaaagataaagaaaaatcccatgtatatctcacccacgaagcttcgaagcgacatatctcacctctgtcactagaccgtgaaaaaaaaaaaggagactcgcacgtaagccatcatgaaagggaaagtccgaatggtcaagtctcagacacgctcgctagttctagttcctgcgagcgctcgctcgttagctctttcgcatcgagaagcatctattgtttacgctgcaaattgttcttgtgttgcgtcaatacatgcgtaagccactacctcttgcatgtatggctacagacgccgaacgtgcccaactaacatgcatgcatgcagctaactaattgttaacttgcccgtactcaactaaccacataagctaattaattactcggtcaactaatcaccaaacacatggctgttactacaactgagctaatctcctagtacatgcatgcatgcatgcatgcaatgtatatgcagaactccactacgtgtatgacacacatacacgactggttaatgcagatattctaaaacatatgcgagtcattattagtgctaacagagagatcgagcgggccggcgtggcgagcatggagatcagcgcggcccagtcgcttgtgagtatagatggccatgccggcacggcccaggcctggccgtgcctgggccaaggcttgtcgggccggcacggcccgaccgacgcaccgggccgtgccgtgtcagcccacgtgccgcactcacagcccaggcacggcccaacacgcctcgggccgtgccgggccggcccgaaggcacgatgggccatcgtgcttttcctcagaataagtctaaattttctccctcctattgggctgtgacattgtataactaaaaaaagtctattttacctccctcttcttt

SEQ ID NO: 25714 - DNA, 27229 bp, Oryza sativa
  unsure (1)..(27229): unsure at all n locations
ccaggcacggcccgacggtcgggctgtgccggcacgggcccgacccaagggggttcgtgccgtgcttgggccgggccaaaaaggcgtgccgtgggccgggccttcgggcctcgggccttatggccaactatacttcggagcgaaggtcctccttcgaccgttgaggagtatctcattctccgccttgacctcaacgacctgccgaaacacgcgcttgagaagctccatgaggtcactgcggcggtccctgctggtgggatcgaacgcctgagacacggacacgatcgctcggtacgggaactccatctccagcagccggcacacttcctcgcccagcgtcgacttgccgacgccgccgaaccccacgatggagaacaccttgacatgctgctccccgacgagctgctgcttgatcagcagctcgaccagggcgtccgcctagcccttgatgccgacgagttggtggctgtcatggcggtgcgcgtgcgcagccaccggagcagcagttaaagaatatgactgataagaagggaataagcggcggtgctacagggcgtcgcggttgacgccgtaccgggcgtggcgctcgctgatggagagggcgcttatctcggcggcgaggcagcggcgctcgcggtaggtctgaaggcggtgcttcaacctgccgcgcacgccgtcgcccgggcggcacctgatgcggagccaatagaggccgacgcagtcctcggcgtcgtaggcgagctcgcgcacctgcttcatccactcccggatgaagtggtccacggcggcgccgtcgtcggcctcagactacatccggaagagcgcgttcatggtggccagctcgtcccgcagctccgcgacctcgccgcggacgccgctgagctaccggtactcctcacccagcagctgcccaaccgtgctcacaagtatagttggccataaggcccggcccacggcacgcctttttggcccgacccaagcacggcacggcccgacttgggtcgggcccatgccggcccagcccgaccgtcgggccatgcctgggcctccccgccagcacgctgggctggcccggcacggtcgggccggcccggcacggtcgggccggcccggcacgatgggctggcaggccagacccggtacacaaagtatagggactaaaaatagacatataaatgtcaatgtctaaagaatagggaccttaaatagacttattttagctatttatataccacagcacaaagaagagggaggtaaaatagactttttttagctatacaatgtcacagcccaataggagggaaaaaatttagacttattctgaggaaaagcacgatggcccatcgtgcctttgggccggcccggcacggcccgaggcttgttgggccatgcctgggctgtgagtgcggcacgtgggctggcacggcacggcccggtgcgtcggtcgggccgtgccggcccgacaagcctcggaccaggcacggccggacctgggccgtgccgtgccgggcggcccacatggccatctatactccgaagccaacaaacaactcaaccacgacgatgctggcaagatgaagaaactcctggatggaatcgacgattggaaatacgagaaactggacaaggaactccggtcctatctcaaggacaagaggtacgtacgtacgtacggtactactaccgctccatcctaaaataattgtattttctatcctttacttgagaaaatacctgtacgttgctacggaaaactaaaattatatatgataattttcatgatccaagcccttttaagagaatatattcttcatgttacgcgcgcacataatttttgtcaaggtctaaacaacaggtaaattcttttttcataacagcctatttcacattacaccagataaattattctatttgtataagaccgtgacacaaaataattgaaatccgatcttgacacagacttcgtgtcacacacgaacatgatctcgataagatgtatagaaaaagttacaactttaatgtacaagtctcaacattcgtacctatgagattgtaatatcgcatatgcaccaacattaaaaggacgaatccaaaattttaagtaccatatccgaatgtataaaagaaataagaatgaaaactaaatgatgcgggatgagagcataagttacatttttttacacatgcatcgactaaacttagaaaataaataaaacaataagtttttttctaaagatttcagggaatcaataatcactaaattgactcaaaaattaaaaattctccacggataaatctactcggtctagtaggttccaatagcctcgatgaacatatcgtaatctactcggtctagtcggttccaatagcctcgatgagcagatcctttgcccaactaatttttttgtacacttatatagatggtgtaattcatagtaaaaaaagaactacttaacttttttagatagctcccacatataagatggaaagctcgtgggggtgtgttagtgtaaaagaattactatcagggtgcaggagggggcacgtagtaaatgtacgtagccacggtaattctcacgttgtcggtctttttttaataaaatgaaaaatgtctcacaactttgacacttaattactactctctccgtttgacgtttttcttagttaaactttaagtttaaccagtttgtacaaaaatatactaacattttcaatacaaaacaaatatattatcaaaatatattcaatgttaaatttaataaaactaatttggtgttgtaaatgttaatatttttgtgtataaacttggtcaaacctaaaaaaatttgacttaaaaaagtcaaacgtcctataatatgaaacggatggagtagtttgtatatgtctaaattatgttttgaataccaggtctgttttttttatagaaaatgtcttactaaaccatctcacacatttggggactcagggacaatttcattttttttaataaaaaactaaatggggcaatttcatcttggatctaatacgacgcatcatttttaagtgaatgtacaacaaatctaaacatactctacatacaatatatactaagagcaattttatggtccttgagaaggtactatgaggtaccactttttctagagatttgctccggtccaacaaaaaatacctcgaggtaccggtacctcccggtatcaaatcatttacgatcgttggatttagctagacaagatggacatttatagatccaatgattggaaatgatttggtaccgtgaggtgctgatacctcgaggtactttttgctggaccagagcaaatctcatttttctattgtaaatttggtacctctttgtacttaagtactagaaggtactaaattttacactaaatttttggtacctcacgtatctcctcaaggaccgtaaaattactcgtataataatgcatacgactagttaactgcaggtacctcattatggtggatgacatatggaccatacgagcgtgggaggcaatccaatccgtgttgtgcgataacaaccgcggcagcagaataatcgtgaccactaggatagaggctgtggccaaagcatgcagtcctgctattggtgggcaccatattcatcatacgcaacccctcgagtttgaagactccaagaagttgttcctcagcagaacatttgtcaacaaggagtgtcccgaggagctggaagatgtaatggagaatattttgaagaggtgcggtggcctgccattggccattgttagcattgctagcgttttggcaggttacacgtcaccaggaagcaaggacaaatgggaatcaatctacaaatcaattggttctcatatggagagcaacccaacccttgaagggatgaggcaaatacttgcactcaactacaaccacctgcctcatgagctcaagggttgcatgatgtactttagcatcttcccagaggattatgaggtcaacaagaatcggctcttgtggagatggattgccgaaggattggttacggagaaacggggcttgtccctaatggaggttgcagagtcctatctggatgacctggtcaataggaacatgattcaattgcgtgaagatatcgagtactattggaaggcccagatgtaccgtgtccatgacatgttccttgaggtcatggtgtccaagtccctggaatctaattttgctagcctgctaggagggcagtatgcaacaatgtcgtatgataggattcgtcgcctctccattcagggcgatgatgacaggcttgagaatgcagagcagcctaggaaaaatacggcagcatccgcaggcgtagatgatgggatactggatttggagcatgttcgatcactaagcatgtttcagcatacagggaagaaattgctcgatcaacttggcaaattcaggctgctgagggtacttgacctggaaggtttcaagggcgccctgactaaggatcatatgggctatatttgcaggttgtacctgcttagtttcttaagcttaaagggcatagaagtcgaggaggttccaagtgaaatcgggaagctagaacatctgcagacacttgatgtacgtcagacgtcagttcgcgggctgccacataccgtgacgaagctgtataaactcgagcgcctacagatctcctataacggtgatgccaatctaatgtggaagctacccctggagcttaagaagatgaagatgctgcgagaggtgggcttctcagtcctcggaaaccatctccaggttgcacaagatgttggtgagctagatcatcttcaagagatggttgtctacgtcgacgacatcaccttcgacgacaatgttctcacagagttcgctaattctttgagcaagttatactcactccggcgcctcatcatcggagacgtgggctacggcaagactctgaactttctcgaccagctcccctcgccgccacaacttctccggcaccttatgatcgccggtggcatcgataggttgcccagctggatcatgtcgctcacataccttgttcagttcaacatgtcgtgggggaaagttgctggtgaccagctattcgatgtcctgtgtgagttgcccagcctcgagaccatctgcattcacaattattgctacgagggcaatgttctagttgcacgcactagacacaggtttccggagctcatcactttaagaatagcctctggatcaaagcttcccaatgttattcggtttgagaatggaaccatgccaaagctcgagaacctgctagttaacttcactgacaatgatgagaagaagattattggcatcaggcacctgaccagcctcaaagaggtacagctctggggtaacgagagcaaccttgcactacatcgtgcactggagcatctcaagagtgagaacaagaggcgcctttttgagttcagtagccagtttcaaattgtagtgaaatacgagtgatttctcttgtggtttccttatttgttagtttctaatttctcccagatatcaaagtaaactatcctattatacgcaaggatgaggaatgccatcatgttaattaagatgccatcttgccgattggagagcacgcttatggagatattcactagacatgggtggcggttcattgagggaatcgatgattgaacaatgttgtccatgacttggcattcgatttttttttcttcttgttgttgcttgatttgtcacgttttgttttcaagtttgtaataatgtacggctatgtgcatcatgcatatattgaagaggctgagatgcatttgttttttttcttcttggctggtttctcatgttttgtttacaagtttgtatgatcattcttattcctttaaaaaatgtattactaacttagtaggtgggcgatttagtaaagaacttaagaatcaaacatcaaagtgcaacaacttaataagtggatgtgttctagtatgagaacttgagaattttgtattttggtgcagcaagttggctagatatgtttgttttggttaataagtgtttggtgagattttttacgaaacaaatataccatcacataataatcttgcggatatatattaccttaccatcttggatttaatctataggctagaattatgttgctcatccaatttgcaccatcagtttggagtttcttattcaacttcttaaatctcaatcgaaatacaaaatttatagaaaatttagttgacttttagttactagaatgacaaattttaagtatacttatacaaatttgtgcaaatatatcgacaaaataagtacgtcaaaactaaatgagtacataaaaaaatcaaaataattaagttgttgcgcatcacttcttaatttattatagcaaaaccacacccatcttacaagttgttgtattcatgcgctcacttattaagttcatatactagatttcacccacctattaaattgttgcactagcatgcttacttctcgagtttttatactaaattgtacccacctattaaattgtgccaccggcatgcttacttctttaagttctcgtactaaattacacccacatctaagttaatgtaccatgaatgtaatttaattatagctcatttacctttttttaattaggtcgcctaccactgaaagtctaagttaatgtaacgtgaatgcaatttaattatagctcatttacctttttttattgaattacgtcgcctaccactgaaatcacaacgccgttaaatccagaaaaatccgctcccatagggagtcgaacttaggacctcaggtgctactgaggctcttgtaaccactatgttacaagctctttcgtatagcttatttacctttgaactgtgtatttattccaatcccaccctacacagatattttattcacgagaacaccagctggtcggttatttcgaaaagaaaaaaatatatttatttctgctagcaataaagggaatgactaaaatgttctgctagcaacgaagtaagtatgtgatgataaaattaacgaaactaattggctaggtttggcccagaagcaagcaaagaaaaagaaaaaaaggacattaaaggaagaggccagagcgaggcccatcaaaggagattttttttaggaaaaagtacaccgaaggtccctcaacttgtcatcgaattacaaaattatccttcaaccgcaaaaccagatatagaacatccctcaacttacaaaaccgttcattttaggtctttcggtggttttaaccccggttttgtctgacgtgacggctgagtcagtgtggaacccacgtgggtcccacatgtcagactatccgcgtcatcacctcactctttccattgtttcctcactatagttggccataaggcccgaggcccgaaggcccggcccacggcacgcctttttggcccggcccaagcacggcacggcccgacttgggtcgggcccatgccggcccggcccgaccgtcgggtcgtgcttgggcctccccaccagcacgctgggctggcccggcacggtcgggccggcccggcacgatgggctggcaggccagacccggtacacaaagtatagggactaaaaatagacatataaatgtcaatgtctaaagaatagggaccttaaatagacttattttagctatttatataccatagcacaaagaagagggaggtaaaatagacttttttagctatacaatgtcacagcccaatagaaaggaaattattttgttctttttctgagaaaaagcaagatgccccatcgtgctttggggcggccccggcacggcccaaaatgtgttggcccgtgcctggtctgtgagtacggcacgtgggctggcccggcccggcccggtgtgtcggtgggcctgtgccggcccaacaagcttcgccccaggcacggccgggcttggnccgtcccgtgccgggcggcccacatggccatttatattcctcacctcctctctctcactcttcatctcatttgggcagggcggcggcaagtggtgaggtggctggcgggccggcagggtaaggcaggagagcaggcggcggcggcgcccgagcagggggagggccagctgcccgtctgccccaacgccgccgcggcgcgtcgtcgtggttgcgggagaggctatcaaagacgaggaacagcgcggcacggggccgaaggcgagcacggtggtaggaggaggagggcggcggccgccgggcaaccaggacgacggccatcgcgccgcggcgggatccggcgggaacgagggggacgacgacgccgacgaggaggagaggatcccgtcgggaggagcgggcttgggcgaatgatatacggtggcagatcggtggaggtggcggcggagcaggggaaggagcgggcgagcgtggcagcgtttacccgatcttgcccctgacgtcgaagccgtcgagcgagccattgccgcagaactcggcgaacggcttcccgctcgcgccggcgtagaccagtgggtagaaggtgttcagcgagtcgttcggctggtacaacgactcgccgtcgaagtagaggttgttccctaagcgcaccgtcgtgcgtatcgaccggtccatggtgctagcggcaacggtgagcatccacggtgccattgaagtcgcaggctcgcagcaccccttccacttggctggcggcggcggcatgccggcgtcgctgaaggagaggtggtctgggaacacgccgacaatgacgccagagccagctcccgagccgccgtgggatgacgacgaccaccgcttcccctgcggtggcggcggtggcgacggagcactcagcccgaggaactgcggcgtgtgcgtctncacgctctccacgctgtctccgagacgcaccgttttcgcgctctccacgctgtccgccggcgcctccaccgttgcggagctcgggagcccccagttcgagctctttcttcgccgccaccggcctccacgtccaccttctctgctgggaggacaacaccgcagttgaggccgacgtcacgcacgcgaagaagagcgcgtcaccgtcacgacggggagcgcgaggatcacccaccgaagctgccgctccgccattgccctcgcccgccggaggtcgaatgccgtgtcggcgagggacacgccgctgccggagcaccgcaaagatcgtgtggtacctgcgcgccgcccctccgtcgcccgcgagcggctccttcccccgccacccgcagctcctccccccacccctcagctcctttctcccctggcgccactccctcccctccctcctccgcctggcgctgccccgattcctcccctctgtgccgcctcccagccgcgcgttgccaagccgccgcgccgcgcagcctctctcctcccgcacgcaaccgcgccgccaccaggctccctctccctgccgccaagctctaccccttccacgctgccggccgcctcttccccaccgccgccggccatcacctgcgtctccggcatcctccctctgctgcgcgctcgtgagaagtaaagaaaaaaaagcaaaaaaagagataaggacagaggggagagatgacgtggcagcttgacatgtggggcccacgtgggtcccgcgctgactcagccgccacgtaggataaaaccgggttcaaaaccactgaaggacctaaagtgagtggttagggatatactatttctggttttgtggttgggagacgattttgtaattcgatgacaagttgagggaccttcggtgtactttttccatttatttaacacagacgcaaacgctgatatacatgtatgcatactcaccccacaaacacacatacttggacccctagggttcattgtgacctggtcctttgttccctaaaaatatgtgggccgacccacaaacttttggtgccaaatttttagggtcggcccgcgaatctaatgggccgctccgccccctttgcaggctagagccagagatgaagcgggaggacgcgtcatcgccgacgagcaaggctttggtatccatgacaaacctcgcatgacggtggcgggagcagtggtggatctaggatttaggatatggataatccgatctatttttttctaaacacaataaatctatcgatactaatatatactccctccgtttctaaatatttgacgccgttgacttttttaaatatgtttgaccgtttgtcttatttaaaaaatttaagtaattattaattattttcctatcatttgattcattgttaaatatacttatatgtatacatatagttttacatatttcacaaaagtttttgaataaaacgaacggtcaaacatgtgctaaaaagttaatagtgccaaatatttagaaacggagagagtacaatccaagtatagataatagaacagaccaaattactattatatattaacaaaatatcttaaaatatataaaattagtaattaagtaaaattgaaaaagatagataagtagaaaacctagaaattgttgtcttgttggcgcgggcggctgatcggctcgacgacggctccccgcggcgacggcacacgcacagcaggtcagcaccagtggcagccggactgcagagcagcgcagcacagtagtggccaaggcggcggagtgcgggactcgcgcgcggcggcgtgggcgtgggggcgcgggcgccgggtcgcgcgtgggctggcgcctggcggcgccgtacggctctgtgactggctgatcgcgtcgcgtgcccgcgtggaaggacgacaaggaaggacggctatgctgccaacgcgaggtttaacaccggagatgcgcgcggatgaaggaaggctcgccaccctctgcagacggatttgaaccgtactagcgacttgacaagcagccggatcaggatctccatggccatctcggcatctccctcggaaggttggccgccgccgcacgccgtactcctatatatatgcttcctctccctcttgctcctcgtcctcacgttcatgccgtcgtcgtagatgctaggtgcatacagtacttgcagccaacactttgctagtgtcacatcacacgtgctagtttaattttattgtgaatatacgtttattggttgatgaggacatcaataccatcaatacatccacgtccccccaagtacaacttcatggtcctattacccactctcgtgcacgtcaactcaataatcatgtgagttctttcttaagttcattttcctcttctttatatcccggagacgcgtgcactcttgttttactcaggaacgatgatggagaggatccaaaagggagaggatttccacgggttggattcggaccggtggacagcaccaacttctaatggtcgccacaacttcatgcgaactccgatttaggcatgcaagtacttcatggaaagcttatcaagtctactttcaaatggatctagccacatgtccgtatctgttctggagcagccgcaattatcattttagtcccgactgctttctgtccatggtgctgcgtcacctcctttgcccaatgggctgtgtatcaagttgggcccattaggggcgcgtttagggttggagcacgaccctgtgttgttcttccccttttcttatagctctagtcgccgtaaagaacaccggggttttgatgatggagttagctacttactaccggctcgcaacgcgcgtgttggctaaaccgctcgtctgcttgtaatcagaaccctaccatattgtgtttttgattgtgaaaactttcatcttcatctagcaattcagtgcttgttctacttgttcttgcttgttcttcgattgcttgcaggacgagtgccctcgtggccgggttgacgcgcaccacaagttcacggtgaccattggagacggtgtatcggttgctaaggcgcggtgtctttggacggttgtagtcagaccgtgaacgtcgtcttcatccaatcgagttatcccccacctctcatcgaaagattgggccacaaaccctagcgggttcacatcattggttgtagtttaatttgtcttttttattgtaatatgtaaaagttaaattttaagttgcatgtttatgaagtagtataccacgtattaacacgttttgtcaatttttttaacattttcgtaactacttaagtgatatacaaacaacaggtagacgtcctttcgagagtttagaatagtttctctgttacttattcacgaacgattttgctatccatctctcgtgtgattttttctatggcatttcacactttattttggccgcacgctatgcaccacttgtgatgtgagctgcagctcacggcctgtgtcagctagcccatgcgtgcaccatgatagagaaacacggtggcaaggtggcctctgaccggcgagccggccgccggcagtacggccaacgctattcggcgagcgacaccgtccctctcgtcgtcgtgaaatataaattacaatactatataactaaaattacatttgtaaatttaattgatatgacatgtaagtgcactgtaatttttgataaaaataatgtgtaagtaaatatgcatttgttattttctttaaaatataaaattacagtcctatataactaaaattacatttgtaattttagttgatatgacatgtaagtgcactgtaattttggtataagtaaatatgtatttgttattttctttaaaatataaaattacagtcttatataactaaaattacattttaaaatataaaattacagtcctatataactaaaattacatttgtaaattcagttgatataacatgtaagtgcactgtaattttgataaaaataatgtgtaagtatatatatatatatatatatatatatatatatatatatatttcgttggatgtaaatataaaggtagaaaaaatctgggtgattttttttgttagaaatcacacgacaaatggatagatagttccttgaaaagattagagaacacatgtagaaattggggattgaactcttgcattgcgatgagctcaaagagcaaaatatttgtgtacaatagatggaaaattaccaaactacccatagacacatatactaattattactactcccctgtttcatattataaatcatttgactttttcctagtcaaactttgttatgtgaccaagtttatagaaaaatttaacaatatctaaaatatcaaattagtttcaagttgaacatattattatatttttctataaacttggttaaacttaaacaagttgcctcctgggccaggtccacgagtctccccgcctagtcctttggaaactctgtggcacttgaacacaacgctaccgcggatacactgaaaactctgaattttcctaagataacataacaattcggcttcagaactagcagtgtgtttcaagcacagctcattgttctccaattccaacagaggatgttaatttcaattccaatattgatttacacaaacactgaacacagctaggtcgatacaaaagatgtccgtactgctgtttgattcatcctgactcctgagaacctgaagccataaactatgcagtagaaggcctgaaagtatggataatttgagcgtgttctggagctctgaatctttaaagacagaacatgagaatccgtcatcccaggaatctagaataacagagcctccagaatgtccagttctccacattgccaatctcaacgcaatgccactgtgcttataacaagcatgaagctgctgagacctgaaaggcatattccctcttcatgccgaactgaattccttgctgcagcaagccgccatggaccgaaaccttggactcggcgaaccagcctcggtgttctatgtgggtacaatggttacatcatgcgtttttttgtttgactgtttccatttctggtaaccacatgatctgcagcagagcccctggccggctgtagtactaaacatacttgctacaaggatacacggataagtatattatcatatattttaccgcctcgacttaaacatttggatgaactagttgacagaaaaactagtatgggtcattgataattgaatcttgctggatgatctgtccttgatcacccaagcaggtagtgatcagtattcagtagtcataactaaagaggtagaggtagatgacaatagaccggtccagtagtactggccatgtgggcccctgtctctgactatcccagcaacggccatcaggaatacgtgccttaaatccagcgattaagacagcaattagtaattattgttgttattagcattcgccttatgaatgtcaatgatcaacctgtctgctggccctgccttgccgcttgcatcgtctcagctgagttcatctcagctcagctcaatttcacagcaaagaaaaagttagcatctgattcatctcttcttctctctgaactctgatgccgttgtcgttctgtatcaagtctgtccacccactgtcattctgacgaagagatggacgatcaggagcagatgctaatctgcacatgttgaccatgagattcgtgatgagcgacgtgtcgattagggataagctgcatgtgatgatccctaattcaagaatcaaccattgcacatgtagtgtcaaattgacagtacatttctcttccactcagggttagcggcatcagtacacttgaaagtactaccagtttgctttctgccaaagctgtcgttatggtctccctctctcttttgttcatcttttggctacacactcattcccaatcactgctaatcctttctttgtttcggcattacaatcattgttatctcttcctgtctagcaagtaatttctgacgttggccaattcactgttcagagaaaccgttttgccatctgttagatactttctttttcagatatgcaagatgcagtgcaaattttgcacactcacgcgccataagtggtaatcataaaccatgccaaattgcaattagaagctggaccatctcctcgagctcatccaagcgcatcaattttgtgatctctgagaagatccatccattccaaatcagcatagtgcacctgctccttctcacagtttactaatctaacatgagcagcacaagttcctgaagaggaaagactagtctaaaagacgatatcgaaacgaaaaccaattcggaatatagtagtagagaggaggagagattgcgtggggatagcagaattataataataccgaattgatgatctgactgcgaatgcattgtaaacgccgcatgcttctgcttttttggtatgtttcctccatataaagacctctacccatgcaggtgtcactacatcagtgcatccaggacttccttctaaggtaaagtcttttctttctctgaagtgtttatcttcagactagttactacttactctctcttgttctaactactctagttttttttctctatgtccctagcttcgctttccttctttctctcttgtctagctatctttctttgcatgtctttgcattgagaagaaagaactctgtgtcagtttattggagcctgttgttttagacttgcacagcttcagtgatcaatggtcaggcatcgcgaatgaaaatgccaaaaacacaaactgtagctttttggagcttccacgtattgttttttcatgtgtggagtggttcatctcgcctgaaacgaaacgaggttctgaaatcattcagcatggacagtcaatagggcgatgcctttaaaaccaataattgctattgttctctagctgttgttctctagtgtattgtccatagtaagaaagacgaatcgctatacagttgcggagttatactgtaggtaggcttttgatgtcacaattagtggacgacaagaacttgggggagatcatcactatgatttttttcttcttcttcttcttcttcttcttcaaagatcagatcactataaataggcattgtcattctaaaaaacatacttgaggcaaggcaatgccatgacaacatcttctcatcgcaccacttgattctttcatagtagtatttctcaacgcagattgatttgatttgatctgatctgaacagtgtgtaaatggagcatctcaagaaaggagtggagtttggggtggcctccctgcagagatgccattctctgtcgtgtcaaatggtgatgctttttttttttgcaaatctttcgcgctaaaaatttcttttcttgttcacttttatgcaaaatggaccatacatgtcggctaatgctagtactatgaatttggcataaccatctgcatatatatatacatcccatgacaaaaaggaaaaatcagagaaaacctcagctgttgctgtgatcaacttggtgactgaacttatatataacttcaacaacatatataattcagcttgtatcatgacttagctaccatggtggttttgctgaatgtgcaaacaggcagagagcacgcagatcgacgagcggaagacggggaaccgatgtagcaaggagaaatcacggcgtccgaaatgctgccatcctgcagagatgccggtcatccccgagcaggcaatggagttcctctctcggacatggagcccttcctcctcggatctcttccaaatcctctctcccagtgtatgtttatatgcacacatgcatcatctgctctggaccacaccgatgattgattcagttccattttacaaactacaaaatcaagggtgttgacatatacatattaatatattccaactcaattatcaacatgtcatttccattttcatgttttatacaggttacaatttcagttctgtcaacagcagcagcagctaaaattaattatattcttctttttttaatgtttcttttgcctgaatctatagagcctgggaacatcaccggtaaaccgtcaggaagactaggtgatcggagacgaagacgttgaggtacatggggacacggttcgatttgatggaggcagaagccaagtgttcaaccagacatgggtaagccaagtgtcagccactacatgatgtagcttattatttatgcaagagacatctttctgatcttcctatgaacgatcaatttcttgctttaccttgacagggaattctagccagtgggaagtctagctcaggacagcacaaacataagaaccaacccacctgggtaagggcatatgtagcacagggagatgtgacaacactaagagtaaggtcaatagtatagccaactactggctccaaaacatctatagccaatctaatagctcatttatataatagttaactataaaaatatactacaccattaatacccggtcccacctctcatacacacataacatcttggagtatgtgttgcagccggctataaatctgtagcccgctttcttctctctcttctcttttcttctcgatatatggttatagccggcttatagcctgctattgtacctgctctaaggccctgtttggttgcagtgtattgtagtccattccaaaaagatcttatttctggctatgcacatgaataaatatttgtccaggtgcatagacagaaataaaatctttttaggacggtggcagtagtattttgtcagatttttcatttcaagacaaggccatcatgctttgtcggatctggcacagtgaagtgaattgacgaaagcttttggtttccactgaaaatgagcagctgaacatgggacacatgagggcaattctgagaggatacttgatggacagcatccccatcgccgggagtcggaggaagaggcgcgacgagctccggctgcacacggcgcaggcccacgccgccgtctcggtggcccagctcgcagctgcgatcgccggcgtcgtgtcagcttgcgagctgaggagcagctctgggggtgctggggctgacaggaagctgagcacggtgcttgcctcggctgccgcgctggtggccaccgtctgtgccgagttcgcggagtctgccggtgccgacaggtcccgggtcacctccgccgtgaaggccggcctcgacagccgctcccccgccgagctgctcaccctcaccgccaccgctgccacatgtaatcaacacttcagtggtgaaactcaaccaagtgatcgaagctacaaactcactgatgctatgatgctgagcttcttgtatgctttttccaggtctgagaggagcagctgtgctgaagctgagagcagacgtcagcagagggatcagcagcagcaccagcaactccatgatgatgatgagcaccaatacagctagcattcagaaaggcacaattctcagggtttgcctgccttgtggtaagagaccaaaccaatgatattagtaccttaaaaaatagcatcactactagtagtactacattgttatgccctagtacaaagtactaagactctgactatgaggagtactaagatagtactactcctaagtcctaagagattatatttccttccccaaaatattaaaaaaagatagtaattctaagagattttgtttcttaaaaatgaagatatatagtactcctaggatattttatctgttataaagaaagaaggtagtactagctcctaggatctagcattgagcatggtgcagcaagcaatctaatgataatatgatattggggtatttgggtggcattacaggaaggttgcggctgaggacggtggccgtcttcccggagtgcggcacggtggctctgaggctggggaagaagcgcctgcatggagcattcacaacataccagcactgtaataattaaaaaaatttacctgcatgaaccagctgaactgcttgccactagtgtattgatcttcgttctgcttgtcggtgatgatgcctgaaccctgttgtttgtgcttggtccagatgaggtgttggcagtctctggcggtggcgaggcggtggtggattgtcggaagttcttccccgtggcgctgagcacggcagcagggacggtgcagctgctgctggacaaccagatgcactgcaaggtctggaaggcttccatcgagagcatgctgtccggtcgaaagctcaagcacaccaaatgctgattaattagagccaggaaaaattgccttgcttttcttaccatgttgcatcacccctgtacatgcaatgtatgtgatgtgagttcttaatatacaggtaaaacataaacaactgtatagtataaaattataatttctttaaacatcactttccatgttcaccagataaccaaaccttcctcattatgataaccctttcttcctcgctaagagaagagaaaatattacaaacaatcaaaacagagcaaacgtgttcctaacttcagctcaccagtaaaagtatgatactaagcagcccactagcatcgatcatatgaaaagaatacagcaaaaggtccttctccataaaaaaagttacactaattcagatgtgacttgttatgttttcatgcgatgcacaggcttgcctgaaacaaaggtttggcagatggtagcaagacaaaacaagagaccagttctttctttttccttttcatattttatgttgagaaaaagaggcaaggaagaaataatggattcaccagctgggcaggttgtcatcagcattcagcagtcagactgtgtgataatgtcatcaatcttgagaatcattttcaccacctgagttgtcagcacgatctgctgctgcttgttttgttctctgatgccgtttgttcgaatgcaattgcagtcaataccatgatgaggattgctatcttgcaaaggtagttcaggaggctgggaagttacccacaatattacacaatgcttcaaaataactgatgtgcgaggatgctatataatagaaagaacataggttccttagcatatcatcctataactagagggttctctattatatagcattctatatattttcttgcatccaccagattaactaacagatagtaggcgtatgtgctggttgagttgatggcatatgaagcattttttatgagcccaaaacatactaggagtggggcgacctaatcagactaaatgtagtcaattaatgtcaactataagtctataactaaagcaacagaataaagtttaaggattaccaaaaaaaaaaaaaacttcacttgctgaggatttactgcagtcgacgtatcaaaagggggcaaaccactgttttcagctagggctagtgggatcccatccaatgcacctcaaatggcatgagcgatgtgtgggagagacgtctcagggagatctgcacgtacagttttcaggtatcagataatgatagcatactccaggtacacagacacaatcagaagacaggcagacattgcttcattttgtaacttaaatgtccaatgtcagtacttacttggtcaactccaggctgttgatctgctgcagttttaccagcaactagcatggtgacccgcgcagattgctcggctagcatcattatattttctctcatataatagcatatatgttttctcattatattattcaaatatattaaaatgatatcataattttaaattttgcaataactttacgaaactacaaatgagtaatattcatattgtattttatatacgtgttggttagtaattatttttaatatcaaattttagttatttgtaaattatatatattcctatatggactctagactcgtcttttaatatttctttttttaattccgaattttctgtaaattgtatttctatatagactttaggctcttcttctaatattatttatttttatttctgaatttttattatttttaattgtgtttctatgtggactctaaactcatctctcaatattatttaatttttaatttcgaatttcagttacttctaaattgtattcctatattgactttaaactcttcttcccatgtttttcttaatttcgaattttagttatttgtaaattgtatttttatacggactcaaaactttacttttaattttactatgtttattccgaattttagttagttttaaattcttatatggactctatactctacttctaatatttcttattttttaattccgtatttctattttttttcttaattgtattaattgtatttttatatggactctatactctacttctaatattccttatttttaattccgaatttctattgtttcctaattgtatttctatatggactctatactctacttctaatattccttatttttaattttgaatttcagttatttcctaattgtatttctatatggactctagtctcttcttctaatatttcttatatttttaattccgaatttcaattatttctaaattgtatttctatatggactctagtctcctcttctaatatttcttatttttttaattccgaatttcagctctttctaaattgtatttctatatggactctgctttttctttttctccgattaatgtgagaatttctaggccatgagagcgaacgtggaggctcctttttctattcctttaataatataatagatttataaatagatccctgaaaaaaattatttcaagaatgggttcttttcgcaatgccaacatcattagcgccgtagatcaatgtgatggtgccagctatgttggcgcccctccccttttgccttacacgcaggaggctggcattccaaatttaccatttttcatgcaaatttataaagttatagttagttacagtaaatttctatcgtgccaccaaatttgtctcctccatataatacatagctacaaatttaacttaaatcaattttttcatacaaccatccattcatgtctcaactaaaaattatcattaccacatatatgcactccaaaaaatcatagcaccaacgagcacattgtgtacatgtaacactacaatcatcaaatccccaatttcaacggtcagaatcacaaaatcgggaaaaaaaagagttctagagttaccctccgatctaaaacgcaaaaaaagagggagaatggaggatataccttgctctttgattttcccaataaatcttgtaaaaaaaatggctccaaaccgaatggatttaaggagaagaggtgatagagagtgcacgagatgcactcgagctcgggcggaagaggagggggcgaatagccggggagtggatgtacggggtggggctcgtgtgcttcccccctccacgggtagagcgtgctagggctgttggtgcacggggagggtttggcaatattgttggcgcctagtacctcctgccacgtcagtgccgggccgccgtgtggtgccatggtgacggcgcaagagaccgtccagttggacctcgacgccagcaattctagcgccaaaaaggatcattccttaaataagttttttctaagaatctatttataaaataagtttgtgaaaatgaccaaattgtaaaaaatcaaggagagtacatgacaacctcgtatacacatactggatcttgtgtttgtagacgactataaatttgtatccctctcgtcttctgtcttctccacccaagtacaaatttgaagtggcaatttttaattttcactcacaacacttgttatacttgctctaacacataagtatctgatatacacccaaaaggtatatgcgagctacaagagtggattattgggtgaaatcagtcaagccctccaggatggactaatggaattagaaacaatataattaattttggtgccaccacgagtcatgctgcagatggtaaggttagttgttcctgattctctttaattaatataactagtattatggctaattacgtacacgtgcatgtcgtggaatcaaatcaacgacaacttttgctggctagtgccaaaccggtcacaggaagaaaggaggacatggcattgacccatggtaaacgatatggcaatcgaactgcacgcactactcactgctacttgctccgtacaaaaaaaaatcaaaaactggatatgacatatctatcatagtacaacgaatctgaaaagaggactgtccagattcattatattagaatgtgtctctagtattaggttggttttttatgggacggagggagtacgtaacatgcctgctgctagctagctagctgtgggtctataaatcgtgaaaactcaacagctatgtagagaagcaacaaattaaccaaagagggtgcaatttcagtcagagtagggagaagaaaagagttagtttagaaatgaggaagcaacacacttcttctgctgttgctgctgttgctgcgtctctttgcaaggtgctcctgatgatcctcgccctcctctgcaccctgcacactgcctccgtggtcgaaggtaaatatatactccctctgtttcaaactatttgacactgttgattttttatacgtgtttaaccgttcgtcttattcaaaaaatttaagtaattatttattcttttcatatcatttgatttattgttaaatatactttcatgtacatatatagttttacatatttcacaaattttttttgaataagacgaacggtcaaacacgtgctaaaaaaatcaacggtgtcaaatattttgaaacggagggagtatttactagtactccgttcgatcgagttaaattaactttgtgggtttgtgcatgctgcatgttatttataaaattaacgagtagatcgatcagtgacatgctatacacagtgttaattgggtgaatgaagtgtattgatcacatgatatatggatgcagggagatcaggtcctccgaacgggccgccagctcctagtgccaacgaagagcggcacaatacaccggcctttcacaactagctagcttgatataacagctgcagactcaccatgcatgacaacctacatacctgcagctctctatacccatgacatggcatgtaataatatgtgtgtgtgatactacgtatgtactgtttctgttgccggatcggatgatgatcgatgttcaacttactctcctagctgagtagtcccttaatccttttcatctctttgtgtaactagtgagcaaaggaaaattaaatatagggatctcatcgatctggggcttctccatgtctgtcaagagcttgtgtagatcgagctgtgtgatggtgttaatcctgggaggcacactatacatacgaagagttttaacagagatggtaaagagaaggcccggcctggcctgactaatgggccgtgcttgggcctattagcacggcacgacccaacaatcaggggggaccctaataggcgatcgatcgccctgaggatggggcagcgatcgatcccctccccctcccttcctctacctgattttcttttttggcaccgcattactttcctattttagtaaatttatacacttaaagtttatacacttcaactttacacatctaaagtttagtgaccaaaagtttataagtcaaaagtttatatatccgattcaaatttgaattttaattcaaatatttttttatatatagtatttctatacatctaaagtttatacatctaaagtttatagacctaaagtttatataccccgtttcaaatttgaatttgaattatatcttattcaaatttgaatttgaattcaaatattttctatatatagtatttctatacacctaaaagtttataagtcaaaagtttacatacccaattcaaatttgaatttgaattatatccgattcaaatttaaatttgaattcaaatattttctatatatactctttcttcccataaatgtttgacaccattgacttttttaaacatgtttgaccgttcgttttattcaaaaacttttgtgatatgtggaaactatatgtatacataaaagtatatttacaataaatcaaatgatagaaaaagaattaacaattacttaatttttttaataagacgaacggtcaaacatttttaaaaaagtcaacggcgtcaaacattttgggatggaggtagtagtatttctatacatctaaagtttatacacctataaattatagatctaaagtttataagtcaaaagtttacatacccgattcaaatttgaatttgaattcaattttttaatatatagtatttctatacataatttttctaacttttgtttttttaaaaaaaattgtggtgtaccgtagtaggaagagaagaaggagagaaggaagggggagaggagggaggagtatagggggaaggcacagcgcggggcgatcacctgcgcattagcatttcccaacaatcagggagacaaaatagatttattccagccatgtagacatggcccaaagaaatgagggactcaaaataaattattccaacaatataagacacggtctaaagagataagaaaagcaaaataaacttattccaagacgaacacgatgggccagtcgtgcttttgggccggtacggcacaacccacgccttattggactgtgcctaagccacaggtacatcctgtggcctagcctggcacgacacaaagagtatgccaagctgccagcccgacataccttaggccgtgccgacccgatatgccttaagctgtgctctagtcgtgtccgagccgtgccatgtcagcagctcatttagccatctatataactagccaagccaagccaagctagctcattattttaacgagccatactgagctaagctagctcgacatccatctctatcaatggtcaagtgcaagatctctcggtgtcagcaaggggaaaggctcatgcgcgcgggtggggccgaaaactgcgtggggagtgagtggagactgattgagagtgacggattgtaaaaaaaaaagaagagagggacccaccacggctgagaaaaaaagtactcccttcgtctaacgttttgactttttatttgcacgtttaaccattcattttatttgaaaaattagtgtaaataaaaaaaagataagtcatatgtaaagtacttttgataataaagcaattgacaaacaaaataaataataatttcaaaattttttgaataagatgaatgatcaaacattaacaaacaaaaacttaaaaagacaagtaatatgggacggaggtagtatgacgattggaaaattcggtatcttttaagttgggatagatgtaacagtgatgtcggtcaagccttcacgatggacctatggaatcgaagtagcaacgacatttctgaagtttggcgccacgcaataatatcttgcttgaaatttgtttactgtccatttctgatcaatttttccatgccagcgcgcaccactggagaagaaggggacccgctagcaagtgccaaattggagccggaaaaagagtgcccattgacccctggtaaacgatagagaagtgagctgcagccgctataaattctgaacccaatatccggtagagaagcagcaacacagcgagagagtgcaataatttcttcagacctaccgacagaaaaaaaaaagagaaagatgatgaggaagcaaagcagcagctccacctctcgtgctactgctgctgtagtgtcgctttgtaaggtccttctgatggtcatagggctcatctgcgccctgcacactgccaccgtagaaggaggtaaatcaaatactccctccatttctaaatagcttgacaccgttaattttgtattacatgtttgatcgttcgtcttattaaaaactcttgtgaaataagtatatttaacaatgaatcaaataataggaaaagaattaataattactttaatttttttataagacgaatggtcaaacatgtttaaaaaaatcaacggcgtcaaatatttaaggacagaggaagagaaagtattatacatacatatccgttaatagttaacatttgtgttagctgcatgttgttaacgaccacatatacggtactagtatatatagagtaaattaacacagctaactaatgaatggagtatatacatacatatatatatatatatatattatatgtactatttaaaatcacatggtgcaggttagatttcagatccagcctatatatgtttagtagtgatatagatccgttgcaatttgtaatgtatctaacatatatatatttttacgagggatgcaggaagagcgctagcggcagcggcagttggtggtactggtgtggacttgccaccaactgcaccaagctactccagcaagtgcagatatccctacaaatgcccccctgcaggctcaccatgacaacctgcatatgctgtgctctagcgc

SEQ ID NO: 25715 - DNA, 7677 bp, Oryza sativa
acagcttttcaacggccacccgggccaacaactttttaaacggccacccgggccaacaacttttcaaacggtcacccgggcctagctgatcccatcagctacagatttttcaaacatggaacccttttccacaacagcaatttcacaagcagtagtcaaacaaaactacgctaggaatcacctcacatccgcccatgaccgtgggcacggctgttcgaacagtttgttaccctctgcagagggggtacactttacccacacgacattactaacccggatcacccagcccgtggggatcagccacgtcgggagacctccaagctttcatgacaaggcatttccaaagccgacacaggtttaccatatgccgacgagaggggtcccagaccaacaacaggttaggtcccagaccatactgtgccaggaagcccaggggtcctccccgacaccaccccggcgaattcacatgtctctcggcatcaaggctcccctgataagctagttactcagctaggggtgtcccattccacccatgtggtcgtacttgtcttatgtttagatgaaattccaaggaaacggtccttaagtgcaagagcgggaaaccgtacacccggtacgttccctggtccgcggttttggaaattcatttagttcgcaagcaccgacccaggtgtcgggttttccaagtctcttgtaaaacccaagttttacccaagttgtttttcagattttaagtttgaaggcgtccgtcgatactcgcactgggtacacgaatatcgagacgcaactagatggttgcaagggggcatggtatcacaattaacaaaggaaggatcaaatgcaacaaattaggtagatctgccaatctgccttgcagacgggacaacagattaagtgcggtcctatcaatgcataatattttttaagcaacataattaaatttcaaatataggctcaagatgttcaaaggtggcttgccttgctcgagatctggagcttgatcctcgaaatcctcgcactgcgggtcttcgggctccgaaactacacgcgaaacgggacaactcaacaaacggcgaaaataaagccctattaatgacctctaagcgtgccattagatagatctcgagatttgaggaattttggaagttgaacggagtcaaacggacttacggttgggaagatattgaatttctaagattattggatttttggtctaaaggaaaaggatttaattaaatcttttttttggaaaagaaaagaaaagaaaagaaaagaaaggagggagggaaaatagacttttctcgggcggctagggcgtggcccgagagagagtgcggctcggccgagcttaacgggccggccggcccaaggtggcccagagcggcccaagacgcgcgcgcgggagggaggagagagcgagccggtggaccgggctcaccacgcgcggtcccgggtgggaccatcttgtcagcggctcggctcaccgtgcggagggagcacgtggcgcggcgctagggtgggggagggacgcggtgcacgcgcgcggttcacggtggacgcggatgcggcgggcccacgcgcagcctcacggctcgcggtggaacgcgcgcatggggagggactgaccggggtcggctcgacccggtctaggctgagctggcgccgacgtggcgcctacgtggctgccacgcgggccggcgggaggtagacgacgacgccggccggaacggacggcggtcgacagcggcgagcgacggagcaaaccacggcgatacaagcaaaagcgagcacaccgggtggttgcacgtgacgaggggagacgagccaacggctcggattcgccggagggagcttgacggcggcgaatcgcggcggcggcaaccggcggcgggaaaaggggaaaacggcgacgaggtcacgaggggccaattcccgacggcgagagcatccacgcggctacgggaatccgttgctagcgtcggattgggcggaactacgccgagcgaggccggcgacgagcgggtgccacggagctcgggcggcgacggcggcgagcacacggcgagcgacgacaacggtcggggcggcgccggctagctacggggaggctactcgtgctaccaccgaaagctaagggggagagatggagcgaggaggaagaacggagggaggcactactgtgcggcggggcgcagtgacgagaggccgacggcgcgggagtaatctctccggcctcgggccggggaagaggaaggagagggcgcgcccggagtccccttccgcgtccttgctcgtgccggctcctccgacacgcgcaacgacgaacggcgacgacgaacagagcacggggacggcggcaatggcgcggaggcgaatgggagaggaagggaaagggaggctggggtttataggatggcaatgtcggtttgggaaccggcttagggcggtcaaagcgcgagctagcgctcggcgctcacgtccaaatcggcgacagggcggagggaggaggatgacgccggcgggaggaaaaaggagaaaaagagggagagaaaagggagctcgtcccttgcctctttgggaaaaggaggaggggagcgggggcgttgcggcagagggaggagggctctgcctccgtcccttggcggcttgcgcgcggagaggcggggccgaggcgatgacgacggcaatgacggcgggacggtttggagcggcgcgacgacacgagcgacaggcgctgacgacggcggcgaccaggcggtcggccaccacggcacgcgcgcgcgcgggaaacaacgggcgacgcggtggattgagcggcgcagctcgggcacgcgcgctggctgcggggccgagcggctgcgcggcaggtgtcacgccctgaagtttccccctctccttgctttaaaaattggctaaataaatcgtccgaagaaattatcttaattaacctagagctaattccctaattaataaatgcaattaataattgaattcggcgtggtggaatttttcttgagttccccatgctccaatgcattaacaagattttagtggaattttcagagccttggaaataattttaaccaattaaaaatgagcaagcgcaatattttaatcccaggaaaatcctttttctctttttcttttcttttccctcctttttctttgttgggccgtcggcccatccctctcccgcggcccctcctccttgtgggccggcccaagccgcccctccctcctctctcgggacgccgacaggtgggccccacctgtcggtcgtctcccacctccggccgctggagccgaagctccaaccgctgccgccgaaaccgccgcgccgccgtcttcttcgctcctcccgcgtccacgtcgggccttcactccgagcccgcacctcgcgcccacgtaggccgcctctccccggatattccgcgcgcgcgcgcccgcaagtggtgggggatttgaaatcccccaacaccctctctctctctcctccacctctccacgttgccggccaaataggggccatccccggccgtttccgcccctccctcgcccataaaaaccctcccctgagtcccctccctcgtttcccccatttgccgtcctctcccacgccccctaccgcgcccacgccgtcacacccgagctccgccgcttgccgccgccttcggccgcgagccgccgccgctagagtcaccgccgcgccaaaccgccgccgccgttagcttcgccgccgcaagagctttcccggccgccgcctcgcgtcgccggaatcccaccggagcacctctcccctcgcgagccggtgagtttttccctcccctccatctccggccggcaattcaagccgccgtggtcgtcgtctcctctcctaacgcctctccatcttctcctagggtgtcgccgccgcccgtccgtgcctccgcgtcgccggtcatcgccgccgtcttcatccttcgcgccggccgccgtgctcacagtgaggagctcctctcctccctccttccctctatcccgcacgcgttgccgctccctgcgctcgccatcgccttcgtccgccgccgccggtctgtgcgccgtctgccgccgcctcccgcgccgtcgcttgccgttgccggcgttcgcgcgccgccgccggtcatcgccggtgaccgcgcgtgtcaccaccggccgccatggctgccggtcggctttgaagccgagccgtgcctagccgctttccccgcgccgtccgatcgcctttgaggccgatccggaccgtcggtcccgtggaccggcggtggaccacccgcgtggtcccggtccacggtggaccggccaccttgtgccgctgacccatggggcccgcttgccggcgcctctctctcccctctcttgaaccgctgacccgtgggccccgcctgtcggcgccgccccccttggatgacgtcagccctgggctttattgcgcaataaagtgattaaggacttttctttattagtaaaaacacagtttatcttctaaaattcataagtaattcatccgagctccgtttaagtccattcaagtctcagtaaatcaagaaaaatgcaaagaatccattaaaaatggttttgtttcctgtttctgtagtcttatagcatgttttgcttgtgtgctttgtttgtcgcgtaggtttcggccgttttgtcgatccgcggtttctcgaagacgttgctgaggtctcatcagttcgagagcaaggcaagtcatgcaatacgtttgatcatattgtacccaatttacaaatatcccgcatttctattaaatgttgcattcttttacaacatcatgtgggatgggtcctattactcagccatttattgtttaccatatgccattgataacctgggtatcaaaatgattagatgttggtttaggaaatgcttagccatgcttagttcaactagtacacaaatggggatcacattattacatagactttgtctattggcatagctttagattggtgccaccgcaatggtgtgagttaattaaaatacactgaatggtgggctgtgggtgcatggttttgctggtcgcacccatggcggttaaggaccggttcacgggaaaccctgggagacttaccgtgcttaccacaagcgggagtgggtaaccgcttgatctgaagtatagctcgaccctttcctaggcaccggtggcgagggtgggcgtgatggagttgggtcggccggggtgtccggttgtccagctgccggattcaccgcggcgcaagaggggaccgcccactgccttttgaggggtgggggtgaaaccttagcgtggtgtggatggttaggggagggttatgtggagggtcttgtcacgatttccccctttgcagtatcatggtgatacttcggggcatggcgacatgtgtggaatcgtgtcttgtgggtacagttgtacacctctggccagagtaaaactattcgaatagccgtgcccgcggttatgggcgatcaaccagattcaccgtgattagtctcacccctagtttagcttaatgaactggtgtagttcaggtggttggttgggcctgttgcaacgtggtgtagcgttggacagtgtttggttaatattgattaattactacagctgttttactgctttcaactactgctttgaaatgcctgctttaggcaaaagaacccctagcttcctttggttatatcctgcatcgtacctcctcttccggtatgacttgctgagtacagtgggtagtactcagtcttgctctctttttcccccacaccagagctgaagatcttcctagttggagctgttttgtcaaagttggtttcgtcgctgccgtcaaggattgcctgtggagtggagtcgctcgctgctgaagtcaagcttcccggtttagctcgcttttatcttttccgctgcatttgtaatcttttctatttttgtaagacgtggatctgtatgtcaacaattgtcgtttgtgtaccctggctggtcctggacagggatttaatgcacattcagcttagaaattctggtttgagaatttctgggcgtgacagcagggcagcggggtcgggcgacgcggacggcgcggctttcgcgcacgcgcgcgcggcgcacgggcggagcggagggagggagagagagagagagagcgccaggagggagggggagatgggccgaaagaaattcggcccatcgaacccgggagaggcaagatagaattttgcggaggaatttgatttggagggatttggattcggaattgaactcgacgatagatcgggggatttgagatcttgagatggcacggacgctagacaacaagcaaggaagcaaatttcgcaattagggtttttaagagataattttcccgctaggcgccacgacggaacgggcgctacaaatagctatacatttatcaacaaactttttttctaaaaatttgatagatgaaaatatatatacaatcgtaatatgattacactataacctgcatttaactatgatacgatttgtatgtaactttcaaaaattctacggtaacatgttcttttttcgtgaatcagagttcaacaagacccaatctcatcatccacgcgcattatgattttttttctctttcccacttgcacgaatcttaagttaaattattttaacgatttaaaattatgtgaaagttacactgtagttatatataagttacaatataattatactataattataatatacatacatctgataaatttttgaaagaaaatttgtcaataataaatatataagtaatatcaaaatatagtggaagaaaaactacagcccctaggggcgaaagaaaaatatatttgcagcttaattaattaatacgtttaactgcaccttactgcttcagtgctgtcgaaacatgaattcggcaataataaaacggggtagcgcacgaaacctaaaagtggatggatgtggagacaaaggatttagacaggttcaggccctctcgatgagaggtaataccctactcctgtttggggatttgaatccgccgggtgtattatagatctgacgatctagttgtctcatatgccccctagagggcctcctgcccaccttatataggatggggggcaggattacaagatagaaaccttaaccaatacggtatcggtttcctaaatcaggactttaggccgttccgtaatatacaaggaaacgtaacacccaagtcatgatctgttacatattacatagatataagttatcccctataactagtcggataaccatgccgtgtgggtatggggtacccataatctccacagtagcccctgagaccttcacagtcggaaagataatcttctctcgaactagattactccaaagccgagtgcttcaatcatcttcgccatgatcttccgaatacttttaccaaatatgaagactgtggagggctgaaaaataaagtcagatgcatcgaatagatgtacctaatagatgcaccaactgagtggttttgataattgtagtcaaccaagtgacttaatattaatatatagcatatgcggcgtgaatccctgaataacatgatccgagtgatataccgactgctttgtaaaatatgatgcgtgcaacctaaagctgactacatcattgaaagttcacatagcaaaacaactataaag

SEQ ID NO: 25716 - DNA, 2872 bp, Oryza sativa
ccctggctggtcctggacagggatttaatgcacattcagcttagaaattctggtttgagaatttctgggcgtgacaagttggtatcagagccgaccttgaccgtaggacaagccaactggaaacctaagagccctctgaacccctttttcatatgcatatgcccttttgcacttggattttgtttcgggaaaattttggggtttgttcttttgatttgtgggaaaaatcttggtcgcttatttaaattggatttctcgactagggacagtctagggagttagtaaaagtttattcagaatttattcggcagtcggtcgggaattgtcgggtgatatgcattaggtcgcgtctatgttcggaggggtaagtttatgcgtatcagtatgactatgcatctatttcatgcattaagtcattgtttagtcagttgcattagcgtcttttgtctcggttcgtgaaaaatgttctatgcataaaaatcatcatgctccgcgagttacttgagtcatttgttgctttatttaatttggttttgagcatgtgttggttcctatccctctgtcctctttagatgtcagtcctatccctcgtttgcaagcgccgccccgagcttcagagtcgccgcccttagctttatcgtcttcttagtctgtttgcttgctagttttcgtgtttaggtttgttgcttgagggttagtcggcggtcgatatcatgtgtcagtggtatgactgcctcaattaggagttgcgtgcctctttttcagtgttttaatcaagattaagataattgcacttaaattcataagaaagattagtttctgagccccctgtttttcttccttttctcatatttctacctatccccttcagatggagacaaggaatggttcacgcgactcgaacaacgccagtggcagcgaaaagccgatcaatggagcacgtgccaacagtgcatctgacaacagtccgtccccaccgcccgagaacccaacaattgctcaggtgttggacaatcagactcagatgatgacaatgatgatgcaacagatgcagcaacagtaccatcaggtgttgcaacaggtgcagcagcaagcacagcagcagcagcagaacctgcaatttggtcctccgcctcctcagtccaaattgttagaatttcttcgtgtcaagccgcccactttctcaagcaccaccaacccaatcgaggcccacgactggcttcatgccattgagaagaagctgaatcttttgcaatgcaacgagcaagagaaggttgcttttgctacacaccagctgcaaggtcccgcttctgtttggtgggacaactacatggtgacccgtccaactggggcagaggttacttggacagagttttgtcatagtttcaataaagcacaggttcccgagggaattgtggcacaaaagaagagagagttccgttccctgcaacaaggaaccagaacagttatagagtatttgcatgagttcaaccgcctcgcgcgctacgcccctgaggacgtgcgtaccgatgacgggaggcaggagaagtttctgtctggtcttgatgatgaattgactaaccagttgatctctagagattatgaggactttgagaagctggtggataaggctatccgtcaggaggagcactgtaacaaaataaaccgtaagaggaaggcagctcagttcaggactccccaggggaagagtcagaagcctcgtttcacgatgggacatcacggtggaccttccaccatgattatccggcagcaccgtccctaccacccgggtaacttcaacaagaaccaccatagtgacagtcacaacaacagtgagcagcacagcctcaaccctactctgagttcactaaagattccagctcaatcagttcagccagctctgccagaacagcccaagaggttgggagaaaaacccgaactctgcttcaattgtaacaaacccggacacacggttggaaagtgcccgaagccaagacgtgccggacccaagttcgttcaggcccgtgttaatcatgcatctgcagaggaggcgcagtcagcaccagaggttatattgggcacattccccgtcaactcgacaccggcagtaatattgtttgattctggtgcaactcattccttcatttccaagcgttttgctggtgcacatgggttatctttagtgaagcttaagataccaatgcgagttcatactcctggaggtggcatgaccccaactcactactgcccatctgtgacagttgaaatacaagggttgatttttccagccaacctcattcttctagaatccaaggacatagatgtcatacttggaatggattggttgacaaggcacagagaagtgattgattgcgccagccgcaccatcaagttaaccaatgcaaaagaagaggtggtactttccagtctccagtaccgcggaagccagggattagtttaacccaggctgctggtgaagaacaagaggtagcagtggagaaaaccactaagaagctggaggatattcccatagtcagagagtatccaaaggtttttccgagatgatctgacaacaatgccaccaaaaagggatatcgagttccggattgacttggtacctggaactgcaccgatccacaagaggccttacagaatgggagccaacgagttggcggaagtcaagaagcaagttgatgaacagttacagaagggatacatccgcccgagcacgtcgccttggggtgctccggttatctttgtggagaagaaagacaaacccaagagaatgtgcgttgactaccgcgcactcaatgaggtcaccatcaagaacaagtatcctttgccaaggattgatgacctatttgatcagttg

SEQ ID NO: 25717 - DNA, 991 bp, Oryza sativa
atagacctgcgatcaggctatcaccagttgaggatccgcgaagaggatattccaaagacagcattcatcactcggtacgggttgttcgaatgcacagttatgtctttcggactcactaatgcacctgccttcttcatgaatttgatgaacaaggtgtttatggaatttctagacaagattgtcgtggtttttatcgatgacatacttatctactccaagtccgaggaagaacatgagcagcatctccggctggtacttgaaaagttaaaagagcaccagctatatgccaagttcagcaagtgcgacttctggcttaaggaagttcagtttctcggtcacatagtgaatgctcaaggagtagctgtggatccagcaaatgtggagtcagttaccaaatggaccccaccaaggacagtcactcaggttcggagtttcttaggacttgcgggttattaccgccggttcattgagaacttctctaaaattgctaagccaatgacacagctattgaagaaggaagaaaagtttatctggtctgctgaatgcaataggagttttgaagaactcaaacgacggttggtgtctgcaccagtcttaatcctgcctgatcagacgaaagatttccaggtctattgtgatgcatctcgccaggggctaggatgtgtgttgatgcaggatggcaaagtggtttcttatgcttcacggcagttgcgtcctcatgaaggcaactacccgacgcatgatctggaattggccgcagttgttcatgctttaaagatttggcggcactatctcatcagtaaccgttgtgaggtatatacagatcacaaaagtctaaagtacatctttactcaacctgatttgaatctcagacagcgaagatggttggagctgatcaaggattatgatatgggaatacattatcatcccggcaaggctaatgtggttgcagatgccttgagcaggaagagctactgcaatgttgcatggg

SEQ ID NO: 25718 - DNA, 4950 bp, Oryza sativa
aatagcatcagatgttgctatatcttgattggcaggagatatagcaagtatgatgcagtttggctacaaaagaaaatacaaaaatgtcactgcataaggtacacacaaatgcacacttcatagtctcctgcaatgttgttaagatatggtcatcttggagctttagtttgcagtataacttaatgcaacatacaaaataaagcactagtgaatataggaattaatttcaacaaaggaaaggcacaatataatcagcaccacatatgtacttccgttggatgtagaggctgggtttaatccattttctaaaaaaatagccccatattggagtacttttgtctaaccctggaaaaaatattatagccaactagcccacttggaaaagaatggctgtaagaaatatgctataaacgggcagatccaaggaacttgcttacattttttaaaatactttgtagaaggcatccaagcaaacaatattaaatgctaatgagaccgtgagacatgcaaagggtacttaaatctatcagtcagcattaactgctaatgagactgtgaaatataggtgtgggagaccaatcaagctagaattgtataagtgaatattgatacgaggaaatattgcacccttattttaacaccccagagatgtaataagtcaagtggcactgaatttatttttaaggcgcatcgaataattcataaaatgaaaaaaatacccagtggtagtactttaataagaatgtgtaggcctatattctatactgaagtaatataccttgtcaacatatgagcgcaccatattttcaatatcctggacaatgctttcaggctgtccttctgaaaggcaatgtagtaagtgaaaattctctggttaacattgcttaagtccaagtaagttcaagcatgaaaatcggtacacatttccatacctactgcaactttagttagacccggcagatcaatcaatgtcaagttgaccactgcaatagttcattgaatagagttatgttaagttaagaattctggagttacatgaagctgcgatgtactgcatataagtaaagtctatgcctgtgtgagaaaaaaaggaaattaaaggttgcacaagtattgttgccaaacagaaaacacagtcttatttatataagatgaaaccggaaaaataaaatttgacaagtaaaagcagctgtgatccttcattaaaaaaaaaaaagaagcagcataagtcaagcaaagggtgtgagtaccatgtggtgagtaaatgctgagatgaattggaacaggtgatatttgtttagtcttccctgtcagcctatcagtttcatcttgaatttccttccgcacaagagctgcagaaaacaaatatcaccattcaccagcatgtttgtaagaactatctgttcaacttcagtcatttccaaggtaacaagacgctgaaaccacacagaattcattacaagcaaatgtatcctctatatattttgcaaccatttgcattagttaaataaagtaattttaatatgtctacagccctagtaatgacaacagattgcttctccagttctgcttctctcgtgacaatttattgatcgtttaagtgaaagtaaatttattgatcgtgacaattttatggagcattacctaggcagtgttatacctgtatagctgaaaaattactgccgaattttgacattaaacaagaggatacatatgtagtagcagtgtagaaaccgaacaatacagcatctgctgctagcaactgctaattgcagggttaattacactaaacatggccaattgtgcatttcattaaagcaatttgcctacggccactaagtaaaccagttcaaagcataaacccataaaaccccccaaacaactgcaagacactgaaaatgtctgagcgcgcgcgcccatgcgtatagagagagtgagtgagagcactcaccaaaatcgttgaaccggcgcttgggcatatgcaagaactcagcgtactcctgcaccccgtcctccgtcttgtgcagctgcaaaaccagcggccttctcgtcacgatacctgtaatcgaagacacaaacctcgtggccgtaaaaatcacagcacgggtactcgaaaattcggacacaggcgcagaattcccgatcaaacctgagcccctaggcaggaagtcgcggcccacgatgctctccagcaccgatgacttgccggaactctgcacgcatgcaaccggcgcaaataaaatcgagcgttcacctccgaaattgagcaacgacgcgaaaccctaggtgggggagcagaggcggtatagggcgggggggcgcacctggccaccgacgacggcgacggaagggagcgcctcccacagcgtggggagggaggcggtgccgtcgccgccgccgtggtccccgaggacggtgcaggctcgctggatgcggttcacgagcacgatcacgttctccatcgtcgccatctccggcgaggcggagggaggcggcacctccttgcccggacgaggagcgggagtggaaggttctagaaggaggcggaaggttcgagagggagaaagcactgtgtctctgtgggcgaagcgaagggagcagagaggcgtcactgtcgcgacggcatcggatagggacgaaagcgtgcaactgctcccattttacggttttgccccttgcggcaaattccaatttccaagtggcccggcgggaacaagttccccgaaattcgaaattcaaatattcgttttacttttcggatgaattgaaatttcaaaaggattttcagtatacctttttactcttgaatttcgtaagagatccaaagcaaatgcaagcaaattatttcagcaacttgcagcagacaaggtttggagtaaggggcagtttgggaatcagagggtggataagggaggtgggccagaatggacaggacagaatggttggttcaaatgtctttcaaaattcctcgcccggatttcaaattctctggaatggtgggccccggatgatgcgcgcacgcgcatattccttcgttgtatgccgttgggctatggcccatgaaaaatggaccggaaacattgaggcccacttaggaaatgaaattgggattaatttaggccattgtaggttggaataagatcactttgactccctcaactgagcaccgaatctaaatcgtatccctcaaccacaataccaaaaatcttgacccccgaacttacaaaaccggtgcaatttgactcccttggtggttttggaggacagtttcgctgacgtggcgcacacgtggcagtgttgacttggtatttgtcccacgtggtattgacgtggtgcttgtgtcattaaaataaaaatatatatgtgggacccatttgtcattcacacaaaaaaatgtgggatccacatgccatcttctctctcactacccttcttcctcctctcccttatttctctctctctctctctccccttcatatgagccggcggcaagcgggggctaggtggcggcagcagcggcgatggcgcccgggtgggtgccggagcggtggcgccggtgggcggtggacctcgggcgacgggcgcgggagcagctccgctgcaaccacatcaggccgccgccgccgcccagcagctcgttcgtcgggtgaaggagtccgaccagtgccgtctccagcaccggcacggcgaagttgatgtcggggaagatccgtcggtcggtgatgaacaggatgagctggtagttgtttccctgaaagtccaccgcctctctgctggccaagaactgctccggccagaactcctccgacgagttccatgccgcggggtatctccccattgcccacacgttgatgaacaacgacgtcttggccaggatctcttagccttgtacgaccgccgtcgccgtcgactggcgcgggacaaggatcggggcgggacgggcttcccgtcggccgctcgactgatctcgtcctgcagcttcgccatcacccgcgtgttcgccgtgagctccgccatgatccattccagcgtctctgtccatcgcccgccgccgccgccgccgatctggacgccgctccccacgcacgaagaaagagagggagagacagcgaagggaggagagggaggaggaagaggatgacacatgggacccacatgtcagtgggtcccataatttttttttgtgtgaatgacaaatgggtctcgcatatattttttttattttaatgccacataaacgccacgtcaatgccacgtgggacaaagactatgtcaacactgccacgtgtgcgacacgtcagcgaatccgccctccaaaaccactaagggagtcaaattgcaccggttttgtaagttcggggagtcaagatttctggtattgcggttgagggatactatttagattcggtgatcagttgagggagtcaaagtgatcttattccttgtaggttcactgaggcccaggatacttgcagcctcggccgacaatatgggtctgtctaatgggcgtcgaagtgttgtacaggcccaagcaccaaattagtctgattacttgcattctaaccattttactgttgatctcatcaccatcatcgtggaaaacattaggatatccggcgcgttgctgcggcgaatggtaaaaacattaaaggttaaaggcatcctcaatgtctaagatgcatagaggttataaggtgagactcaccattatatggtctttggctaatagcatatgctacaatgtttatagtttttttatcgactttacggttggacccactcgaaaaaattttgtttcacccttttacatgcaggattcaaagacccacatcatgctacaaaggtataaccatagcaacattctcttcttttatcttctcccaatgcataaagcaataacaaacatattactttattccttaatatcatatttgcatgcacattgtggat

SEQ ID NO: 25719 - DNA, 14242 bp, Oryza sativa
cttctcccaatgcataaagcaataacaaacatattactttattccttaatatcatatttgcatgcacattgcggatgccctaacatggagtatgaaattatattccttttaggggcatagaagtttacataagatgcattcttgtagtacgtaagaagaaacttacaactcttcatacatgcatatattccaccatgcatcacatcaagccaggcatatacttcctccgtttcacaatgtaagaatttctagcattacctacatttatatagatgttatgtgaaacggagggagtagctaataaggcattccttaccaccatatctgaatcactaccgccgttgccgttgtataggctgtatgttcatctgtttgtttggttttccctttcacttgtttaattcattcttagcacaaagaaccaacaaaaaaaaataagaagctctcttatcattgtcctgttggatatatcatctcagaatttgacgcagatgagatcacagctagtctatttgcatatagcccaagaagcagacagaacaatctttttcctgctcctcgaattagctgtgctccagaatccgattcttttttttgtttgtttttggtatgcagattccgattcggactatgctatgttacgttccgttaataaatatatgtgcactatgcaatctcgagttaagcatcatttgtttgtgtgtttgctgcatgtaggacgacaccatgaacatgaagaagaggaagaggacggtaggaccagctgcagcagcagctacttttcctgagctgccggaggagattgtgatggagattctggctcgtctgcccgtcaaatccctgctacgcttcaagtccgtctgcagagggtggcgtgcaatcatctccgagccctccttcatcccaggggcggagctacagtgatgcctatgtattcccaggaatacccaactttttttatcaaaaaacaactatacttcaatatatacacataacacatatacacatattagttgtccccactcctccagagtccctcgctcggctcacgcctcaccctcacgcgcaaatgcgctgctcgcccgctccccaattccccatttgattccaaaccctaggtggcggcgttcggcggcggcgcggcggcgcggcgaccggcggaagcggcaaggcgtccggcgaccggcgacgggagcagggagctagaccagcggtggcgcggcgaggcattcggcagcggcgcgacgccgtggcgaggcattcggcggcggcgcggcgaggccgcgagacggcaaccgacgggcgaccggtgacggcgggagcgaggccacgaggccgaggggcaggggcgcggcggcggccggccaacagctgcagctcagcgggacagcgcccagcggcactgcggcaggcacaatttcaggtgacaaatcaagagttcaagattcaatcagtcctaaatccactcactatgtgtccatgtctgatgtttttttaccttagtctctgagtagtttctttttcctgtacttttgtagttctgtagattgaagaactctcaaaatgaagaagaaatcgattgatttgaagactttgtgggatagacattcaaagtctaggaaggtaggggtaggttctggttctggatcaacaacacagccagttagaattgacagtgaagttgctgttccttctgttcagccgattacagatgcaaatgagagtccagttcagattcagattactgcagttgaggttgtgcctgaggtagcagccagtgatgcagcaagagatgtgacagaacctgaaacagaggtagctagcaatgatccagacatagcaacagcagtgacacagcaggagcaaccttccacttggtctcctatcagagattggtctcccatcagagatggtgatgatgaagagacagagtatgactcaagtgatgaagctatttatgacattgatttactttgtcatgatcctggaaggcgaattgcaatcaaaaattatgatgtcaatgaacggaattctgtgataaggggatatattgcattagggccatgccaaccacgcagccacagttttcctataaggaaaattggaggtaagcctcggcgcttccttcctagttggtatgacgaatttaaatggcttgaatatagtgtggaacaagatgctgcattctgttttatttgttacttattcaagcataaaattaataattctggtggagatgcatttgtaaataggggatttaggaattggcacatgagaaaaaggattgcaaaacatgttggtggtatgactagctttcacaatgtggcacaagataaatacaatcacttccttgcacctaaaacaaatattgttgagagctttgctgccaccaatgaacaagacaaggctagatatatggctcgtttaaactattcaatgaagtgcttgaagtttcttttaaggcaaggtttggctgcccgtggacattatgaaagtgaaaagtcacttaataaaggaaatttccttgagatgttgagtatgctagcagaaaactttgaagaagttggtaaggtggttttgaataatgctccaaagaattgtaagttgactgctcccgaaatacaaaaacagatagctaattgttgtgccaaagaaactactaagcttatcatggaagaccttggtgatgaatattttgcaatacttgccgatgaatctagtgatgtgtaccaaaaagaacagttggctctttgtttgagatatgttgataaaaaaggaagggtagttgagaggttccttggtgttgttcatgttgaaaatactacttccttgacacttaaagctgcaattgaatcattgcttatggagcattccttgagcttgtctaaggtccgtgggcaaggctatgacggtgctagtaacatgaagggtcatgctaatggactaaagaaattgattatggatgagtgcccttctgcctattatgtccattgctttgcacatcaactccaattaacacttgtggctgttgctaaggaaaacccagattgtgtgtggttctttgagcaacttagatttttgttaaatcttcttgggaattcttgtaagaagacagaaatgcttagagttgcacaagctcaaagaattgtagaagaactagatttgggtgacattgaaactggaaagggtttgaatcaagaaatgggtttgggcaggccagcagatactcgttggggatctcactataaaactgttatgcatgtcctatctttgtatccttcaattcaaaaagttcttataatggttggcaaggatcgctcttttggtgcagaatgtgcaaatgcacaaacagtgttgacaatattccaatcatttgagtttgtttttatggcacacttgatgcaaacagtacttgggttcacatctgacttgaatcatgctttgcagaagagggatcaagacattgttaatgcagtaggactgattttattgacaaagtttcaattgcagcaattacgcgaggatcctggatgggatgattttcttcaagaagtgcaatctttttgtgtgaagcataagatcaagatccctgatatggactctttctatcggccggttggaagagataggaggttctttattaaaatcaagaatatgcatcgcttccatgttgacatgtttctaagtgtcattgatagacaactacaagagcttaatgaacggtttgatgaggtaaacacagatttgctcctttgtatggctgcatttagtcctatagataactttgctagttgggacaaagataagttgattaagcttgcacggttttatcctaatgatttctcaagcacagagatgaaccatcttccatcagcattgaaactcttcctcactgagatgcgtatagatgaaaggtttagaaaagtaaaaaatcttgctaatctttccattatgattgttgaaacaaaattgcacaatagacatgagattgtttacaagcttctcaaattggttctggtacttccagtagcaacagctagtgttgaaagaatattttctgccatgaattatgtgaagaataaattgagaaacaggatgggggatcaatacttgaatgattgcttggtcacatttattgagcgtgagatgtttttgaaagtcaaggagtgtgatattataaaccgctttcaagccatgaaggaacgcagaattaaagctactcttccaagccacgaaggaaccgaaatagaaaattagaggtaccatgtaataatttgtaattttatttcttagattatcggtattgacatactgtgaaccattgattttttttactatgaatttttttgttagacgggaatacccaactttcaaatcctggctccgccactgcttcatccgaacccaactccagtgctcggcttccagacggcagcaggagccatccatcctcatcagcccccacttccgccatgaccggccgaccaaattctccacccacatcagcttctaccagtgggagcaaggtgcctcctcccttgcgaggatcatggatgccaaggacttccctgtcggccacaagttccgcttaatcagccactacacccactgtgatggcctagtgctcgccccgactatcaccaagctctacctcttcaacccggcaacaagagaagccatcacgttgcctgacggccatggccacagccacaccgcagggctggggctggatcctggtaccggcaggtacaaggtggttcggtccttctaccgctccccctccatggatcctcccgtctccatggggatggaggtgctcaccgtcggcgagcccggcgcgcggtggagggagaccgccgttgatcctccacaccccatcacccgatggcggaccgcccttgccgtcaatggtggctacctgttctggtacatggacaggcgccgctaccccgacgatgctccccggggactcctccggttcagcctgcgagacgaggcgttcgccgtaacccgtctcccggaatcgatggacccgacgctcgacgagaacgtcttgcccgacgtgctgcacggggagctgtgcgtcgtgcaagctctgcccgacaaggctggggtgcttatctggacaatgtcgtcgtcgtccatggacaacgacgatgtccacctcgacgacgggccatgggaactgcgatattgcatctgtgtcaacgccctttgccatccgttgggggttcttcctgatggaggaggaatcttgttgtgggcgaatcgcagcgtccatcgctacgacttctcggctaggaagctcgctggtgtggtgtgtaacctggatcgcatcaggtatcagggtggtaggccagcgagatggaagagtgtcgtcgacttcaccttgatgccctacaccgagtctctcgttagaattaccgctgcttagcttcttcggtcttgctactttttatcccatgagaatcagtttgtatgcactgcttgtatttccccccctctgtttatcactacaagtactcctgcaaatgacaaggctatttatttgaatgctctattattaatttattttactcccttcgtttcataatgcggggcaattttttactttgcattgttttagtttgatcactcctattttgtcaacttaacagaaccagataaatgtgaatggagtgctgcggaaagatcatcctgggactgcctatttatatgcaggggcaagttgttgtcgttcaccagatgtgatatcataagattacctacagtataacacctttttcggcttagcgattcacatttctttcttacttcctacttattttaattttaatgtatgacgccgttgactttttatcaacgtttgaccattcgtctaatttaattttttttgtgcaaatataaaaatatttatgtcatgcttaaagaacatttgatgataaatcaagtcacaataaaataaataataattacattttttttataagatgaatggtcaaacgttagtaaaaaaaatcaacatcgccatacattaaaatatggagggaatagtaccgtgtagtatggacaattcagtagagaacaaccactagagaacaatatcaattattgaatcaaaactaaggcccaactgaccgtacatacagaacgattaagtcattagaaaactttgtttcaggcaagacaatgcttcctcatgttaaaattgagtgggaagtaaaactgaaactatatgcagtattttcatttcttttgttgcatggtgactgatcactgagacttctataataagtacagaacactatattctgctgacaaaagagtaagaatgtctatactaattctacacataaagaaggagaacatgcagacaaagaaaggaagaactgcggcagtaagtatatctgtatatgaagcatctctctacaaaataaaagtgcacaataagcatttcaaggagggtattgccttacagggaaccttgatgcaccgatcttgtcacacttgcatgagtgttcggtacaatattgccagaacttgcctctacacgatgcattagcagtcaggtactcttttggagtttggaccagtttttcccctttcaggtcatctgttcatcaagtcctgtaaatccaaaatgctttaggagatggctcatcttaaaacaagccaaataggcatatgctcgctgcaatgcatcatcattcatcagcaaaacagacgaacaggttgagaagtgtcatattctggtgatggaattgcacaaaaagccttcaagtgagaacatgacaaatataacaaatataagaagattgatcgtctcaggcgtgctttcctttggaagggagacgaccttgaaaatgtgagttcaggcagcagtctttgtcaattggcagaacgtttacaaactcaaatctttaggttggcttggtattcttaacttggaaaagttctcatgtgcattgtgtctgcgctggttatggttcggttggaaggatgaaaacaggccttggcaagagatggaacttccttgtaatgaattggaccgagtgttgtttagagctggatcagtgattactctgggggatggaagaaaatgctctttttggtctgataactggcttctcgaaaataatcattagtttgctattctaaaccccatcacctctttagaggagatcgatgctttggtgcgacttggaagttatttacgggcttgttcagattatagccaaaataaaccttaccaaattttggccaaaattttggcatgatttcttatgtatttaacaaatttgcaacaaactaaacgtagacattttttaggcaactttgtcaaaaaaaaaaaaatggtatggttgaaaatggcatcaatgacaaccctacaagaaattacactcatagagctttcaaaacaggctaatggctaattcttcgctaagtcttcccagtcgtctttcttttattctgtaattgacgatctgaacggcttactccctctagacgttgtttttacttttgctcgctgattgtaacggttggtgacctttattccttctaatatatccggcagagctcctgccatttaatgtttttttaaaaaacaaatataacaaaatgcgaaaaaatgtggtgagctggtgcaactgcaacaggaactaaagcaagcacacattataaaatgagatggcaaatataaataagcgcgtaagcacatcttcataaattaattacttggggggtacagatgctgtttcatcgcaaggaacaacgatacaagtgatgccaaagcaaaggatgcaaggttcagattgccaccgaacgaccaccggatgatccgcgagcttaggcaagatgatcgcctattccctggatgcagtgggagaggcagttgacgaagctgtatggctgctgcaacatctgaagaaagatgcagtcgaggtggcatggctcgctgcttccatctgcaacactgtaaccgtcctgctgcgacatctcacggaagatggagtcgaggtggcatggctcgctactcccatctgcaacattgtaaccgtcgatttcgttcatctgagtcttttcacgacaatcgaatcccaggtagagagtgtcagctgcgagcctctgcaggtagtagagtgacggagcggcacaggcccaagaacacagctcgcccgcccaaccccttgaccgggatcaagtccccggcgtcgaaatccaccctgtaaacatcatacttcatctcgtatttcgcagcaccttgccgcgattcatcatcaacattgctctggcggatcttacggtacaccagcatcaaactccccaccattgtccacaaggtgaatagttcctgacatccgggagaaatgcaagggcttgctcggctgagcggtggtgaccagccgcggccgccctctatgatctgatctgaagaaggagagctgtccagcaccatgacactgccgccgatggcgcagtagaagcgccctgcgaagggcaaagccgagtcaatgtaggggcggttcttgtcggcgacgacgacggcccagcactcatcgccgggtttagcgacggcgatcaacttggggcggcagaggaagagagccactgtggttgcggatgcaagaccgacgccacgcgccaatagcggatcgtcttctaaccccccatccgaatgccaagatcgcagttgctccggcgtgagcagcgcggtgaccggcgggaggtcggtgaggtggcgggtgagggggttgagcaggcggaggaggagggtgcgctggtggagcagcagcaggaggccctccggggcgagcgcgaccagggtgtggctctcgagctccgggagatccgtacggatgcactcgccggtggagaggtagaggaagcggcggcagcgggggggcgccgccttgtcgagcatgatccaccgccgggggaggaagcggcagtccagggcgcgggagaggggatccaccgagcgcagccgccacagccggcacacggcgcggaagcggatgtagtcggcgtcgtcgttggcgagcacgcgctcggcgatgaggccggccggcccctccccgccaaggttcgaccagtccatcctccacctcctccttccccgcacgctccgccgccgccacttgagcagggggtcacggagatgccgccaccgatggcgatggggaactcggctcgccgccgccgccgccgccggtgggagttggagacttggagtcggagtcggccggtggccttctgatgggccaagttgccaaccctacccatttcggcccatcgagacctatgtccgggtaggcccacgaagccgtgatccgcccatcgaagctcgccgccaccgccactagctgtgcgttgcttacttggaataagttcactttaggtcccccacggcctaaggccgaagcccaagagagtttgattaattttttcctgacattttatctgttgtcgatatcaaataatcatcaccatcattatgtgaattcatttgcatgattgaaatgagaacgaaactccatttatcatttggtaccggaaaccggaaatctgaaaatataaggagtacacctcttttcatgtgtatatatacttataaaatacacacataaataaaaaaagtgaaaaacttataacatccaatcatccataattttctcaaaagcatgttggtgtacaaagtaggtgaggttaggaccgaagaatggaaaaaaaaaaacagcccatgcaacctatattacagaactaaacctcaacaactggcgactggcgtacattgagtacacaatgcaacccaagacctgtagtgcaatatagtagtatactacacctctgtatatcatgtgaagtgtacataatttttttttataatagaatgaaacatttcggattttgctaagagctacagctaattattaaaaggttcatatagaagcaaactcacacagtgaagtgtatagctgcagctaaacatgtacgtatacgtgtgcctgacgacgacggctcagagtttagcgtgtttgacgttttggtcggacagaatgccctcgatggcattcttccagaccttgcagtgcatctgactgtccaacagcagctgtaccacaccagcggccgttctgagcaccagcgggaacaacaccatgccgtccaccaccacatcgccgccgttgctggagacgtcaagcacctcatctgaacagggcgcaggcagagccagcggccgacaaaaaatgaagccagtgatcaatacaaccaggttgagccaaatcacaacagttagcatatatgcagcgatgcaaacaaatgtgatatgaccagaccattgtgtggctaagcatgcaagatcatcaaaggggccaggagacaagcgtaacgaagcaaaaaggcagacacttcaggtgacatgatgcagtaccggactgcaagatcatcaaaggggccaggagacaagcgtaacgaagcaaaaaggcagacacttcaggtgacatgatgcagtaccggacttccggtggtactgtctgtggcacgatcgatcgagacaaacagtgtactcatgcaagtagagcagaagaatgttactgtgtatgataacttttttcatttcgttagactgtgataatctcgataattgtaactattttcaggtgttgcgccccaaaaaactacttttagatttactgtgtcggaagcaataattttactacgttgtgaatatgtaaaacaaattataacctcttaattttttgtttatatagtgacataaaaagagcaaaacaaccacagattgagcgcaagtatattgtgcctacgagttgggcgtgcttcttacaatttttgtaggttgagaatgccccgtgcagatgtttcttccccagcctcagtactactctgtcgcactgtggaaagacagccaccttcctcagtcgcacgctccctgcatgacaccaaaacaccaatattgtcattggtgcactctgctcagtgatagatatttgtgttatcttaatactcctcgtattgattatttgatttgatcactcaccacaaggcagcctaaccctgagagttgtgtctttgtggatgctagtagtgctggtgccaactgagttgttgttgctaccgattcccctgacgtctgccctcagtttcagtgctgcagctcctctcagacctgatgagagtgcaaaaccagaacagaaagaaccattaacaccggttcaagtgatttttccttctttacctataatttgcaggattacatgtagcagcagtggccgtgagggtgagcagttcagcagaggagcagctctcgactccagttttcacggcggaagtcacgccggacctgttggtcccagcgagctctgcagcctctgcgcagacggtggccaccagcgcagcagcggaagcaagcactgtgcccatcttcttgctgtcagcagcctcgacatacttcaggttgtccggcctcagttcgcacaccgacacgaatgcctgcgattgctgcggcgagctgagcaaccgagacagccgcgcgggcctgtgctgcgtgcagcctgagctcttctttcctcttctttcgctggcgtccagtgaccgaaacagcactcaagaaatgacctcgaagaattgctttcatgtagccagcgttgagttgctaatatccaaggaaaacaaagcattcattagcaaatctgacaagataccaactacttcctccgtttcacaatgcaagactttctagcattgcccacatttatttagatgttaataaatctagacatatgtatgtgtttagattctttaacatctatatgtatgtgggcaatgctagaaagtcttacattgtgaaacagagggagtatactatactgcagttactgtgtaatttgtactatcctgtggatgtgccatgttattgttgttatactgcttgtgtcgtgtccttacccaagttggttgcttttagcttatgcttgcgcttatggggctaggcatctcactagctagaacacgctgttagacaagcaagaattgaacatatataggaaggcaactcctgtgttggccgagagttaagagttaagagagtctgagaccattcactggcatacccatgtctggttgaagaattggcttttgcctccactgaaattgaccgtggacagatgtctctcttcatctttttcttcatttccctcttcgtctttgattgccttctccggctgacggtgttcagatgatgttctaagggtctgtgtgcataaaaacaaaacataaaatatctccatgcttaatgattaagcttacgaaagcacttttgtgcatgtgagctctaaaatactccctccatttttttttaaaaaaatgacgttggctaattcaatctcgattttcaaactaaccacggatacatagaaagatatggagataataatagagtaactctacaatttagtaaatgctgacaccgcgttggtaaacggaactgaaactgagtgagaatacttggaagaaatctgatgatgaggggctccatgttcgagagaggaactccattgcctgctcaggaatgatcggcatatctgcaggatggcagcattttgagcaccgtgattcctctttacactggatcactgccttccgcacatcaatctgtgggcgctctgcctgtttgaaaattaagtaatttatcacggtcacagcacaaaattaagtattcaacacagaaggggcgtaaaaccatgttaaaagagagatgcaacgtcatgatgcagaaatttataggcacctggccctgataacgacaaaatcaaacctttctcagaatttgtcagaatctctaaccatgctaaacacaataagtaatacaaaaacttcagttgaatatggttatagtagccttagccaaaactatgcctcgtttcctgcttctgttctataaatcaaagaggagtatgaatatgcagaagcatcaccatttgacatgacagtgaatggcatctttggatggaaggcatcccgagcaccactcctcttgtgaaatgctccataaccaccaacttaatcaggttacgttgagagatatataacagaaccagataaatgaatggagtgctgcggaaagatcatcctgggactgcctatttatatgcaaagtcaagttgttgtcgtccaccagatgtggtatcataagactacctatagtataatacctttttctgtttagcgattcgcatttcttactatggacaattcagtagaaaacaaccactagagaacaatatcaattattgaatcaaaactaaggcccaactgactgtacatacagagtgattaagtaattagaaaactttgtttcaggcaagacaatgcttcctcatgttaaaatcgagtgggaagtaaaactgaaactatatgcagtatttctatttcttttgttgcatggtgactgatcactgagacttctataataagtacagaacactatattctgctgacaaaagagtaagaatgtctatactaattctacacataaagaagaaggagaagatgcagacaaagaaaggaagtactgcagcagtaagtatatctgtatatgaagcctctctctctacaaaaataaaagtgcacaataagcatttcaaggaggatcttgcttgacaggtaaccttgatgcactgatcttgtcacacttgcatgagtgttcggtacaatattgccagaacttgcctccacacgatgcattagcagtcaggtaactctttttggagtttggaccagtttttcccctttcaggtcatgtgttcatcaagtcctgtaaatccaaaatgctttaggagatgactcatcttaaaacaagccaaataggtatatgttgttgcattcaaggtcaaggaggtggcttttatgattgccacacctcaaccggaatatatgctgcaatttgcatgtacggaaaaagaaaaaggtgtatgtgatcatatgatagatggcaattcgtccactagcatgaacaaataaaatttacatggctggagaattatcctgataccagaagaaaagattggaactgattaatgacatgtttgaatggttaggcaaaacaagataagagcaaaccacagggaagggataaattgaaagcttaactagcactactttccagcatgctacatgcatggatcaccaacaccaagtgggcaaatgtagggtcaagctt

SEQ ID NO: 25720 - DNA, 1424 bp, Oryza sativa
tgattgctggcacaagccaccgcgtcatggttgcttgttgccccagccacgctgagctgaggaaacaataactatgccaaggtaccaagccgctcgctgcaatgtatcatcattcatcagcaaaacagacgaacaggttgaggagtgtcatattctggtgatggaagcggaagcagccgacggcttggggcgccgccttgtcaagcatcatccaccgccgggggaggaagcggccgtccatggcgccgctctgcgagcagcggggatccaccgagcacagccgccacggtcggcacacggcgcggaagcggatgtagtcggcgacgtcgttggcgaggacgcgctcggcgatcaacccggcggcccctccccaccaaggttcgaccagtccatcctcctcctcctgcttccccgcacgctccgccgccaccaccgatggggaactcggctcgccgccgtcgccgccggtgggagtgggagttagagtcggccggtggccttctgatgggccaagttgccacccctacctatctcggcccatctaggcctctgtccacgaagcctctgatgggcccatctagccttctgatgggcccatgaagcgtttttttttttcctcctcggctcctcgcgccgccgcctaatggattccccaactccgatgcttctagaaccttccgagcctcgcgcgcgccgccgccgccgcggccatggtgctggcctccgacgagttcggctggtcgatctcgttcaccatcctcgaggaggaggaggaagaaggagtagaagacgcgtcacgcgactgtgggggctcgactcgacgcgcagaaggcgggccaatgtcgccgccggcgaggccgtggcggcgcgcatcctccgcgcctacctcgacaccaagggagatggtccagttcccctgacggcgaagccaccattagtaaccacctgctaacctcctctcctgtcttccctgtttggcttgcttcctgtttgttgggtgagttgcttgcttccatgggatctggagttctggacattgcaagccggtttgcttttgaagcttagtgcctttcccttagatcaacatgcttgtttgattgttgattccactggagtgttctgtgcgaggtgttaagtgtagcccgtcgtttctgcagttgggttaattgccgccctagtgagggaatgtgcaccctaaagattaagatctgtttgatggatcagttcttgtcatacatgtgtctttgtggggatctgggtttgtggttttagcagttgatcgtggggttatgcatataggttacttatctgaattggtgtttcttcgtacagttgttgacccatttactgattgaacacctttacctatgaattgcagcaaatgctggagcaatgatgctggtcagctgtaggcctggagcaaa

SEQ ID NO: 25721 - DNA, 746 bp, Oryza sativa
tccacctcctgtgggtgtcgaagtcgcggatccttcggccctctcgagcgccttctcccgcctaggactttggcgtggagggggcgtgggagtacgagctcgacggcgtgggtttggctcccgcgcaccgtcatactggggaagaggtcgggcgcctttgctggctcggccattgggctgaacaagaaaagcttggcgcacacgaaagagtgcgagagctcagaaaatccctcgcagagccccctacctggcgcgccagatgacggagcgtggggctcctcaccgggagaccgcgcaggcccccctttgccggttcggccggggactcagggagagattctaagctctctgtatgtggaaggctcgcgagacaggaaacacacaagacacgggcgatgtatacaggttcgggccactgagaagcgtaataccctactcctgtgttttgggagatctgtgtatgaaggagctacaaagtatcagccagcctctcccttgttctgggtttctaatctggaaaagtccagtcccccctctcagtgggcaagttcctccttttatatcttaaggggacaccacatgcaccatttctctcttttttgtggggacttacccccccttttcataaatggacggagatttgtatagttgccgtccgagtcaccttctgatgagacggcccacaactacctccactttcgccgggagcaggtgcgacggggaattggggctgtctggtgacaaca

SEQ ID NO: 25722 - DNA, 9340 bp, Oryza sativa
gcaaattgcctcttagatcaggagttttatagtgtagagacattttatagaggcattttaaaaaatgtctagaaaacttttactctacagacactttagaaatattttcagcatattttattagattttatattgtagaggtattctttcggcactttaaactgtgcctgatatataaaggcattttcttaagactttgtaaggcacttcttagaataaaagtatgtaataaatgattaaatataagtaactcaagacaacaacatataagtaatgacttggggttgagttggttagtgccttgaagataagaatgaattgtgcaattgatcatgagttcaaggattgtcgaaaaacaagggaaaatattttatttttttacattggtttcatatggttgtgacacaatttaatgtctctataaaatgcctctaccatcttatagacattttgtaaaatgcctcttcgtttgtagagacaattcaccgtaagacacttattatgcattttttaaaatgcctctatagtattataaaggcatttgaaaagtatctctatagtactagaaaaatgcttcgtagaggcatttttgttgtagtgatatactttaatatatacatatagttttacatatttcacaaaaatttttgaataagacgaacggtcaaacatatttaaaaaagttaatggcgtcaaacatataagtaaggagggagtagctattagttagctctactattaaatatatgctccaatgagtcgacatttaaagcatccgcagccactcagttaatgacagagctatatatgtgatgatgtctactttcgatgtttacttccttcattttaaaataaactaatctattacaggttttcttttgataagatttagtataatattaaaatatatcataaattatattaaatttatttattgcggaaaagagagcctatatgactggaggatagacggagagacaagagctagccagcgcacaagtagtcgacggccaactttatctcgccaaaaagatggacagagggagtattaaatatatacttcaatgagtcaacatttagagcatccatagtataataggtcagtcagctaaggacagagctatcaactatgtctacttccgatgatgtttactttctccatttttaaatgaactaacctagtattacatatattaattgtctcgatcagatttagtataatattaagatgtgtcacaaattatattaaatttgtttattttggaacagagagcctctgcgactaggatggacacagaggagctagccggcgcacatgcagtcgacggccaactacatctcggcaaaaaatctaatacaacactttaattatgttggctaacagaattgcccatgtccgtgggcctcctgatgtctcgtgcatctcttccttccacgattcttgaaaaaccagaggtcccagatgattatgattcatgatctgtgacaaaccgagtgttggcaataccaccgaatgactaaaagtggcttttgctagtagaattaagtaggtcgtgctttccgttttttcagatgatcaaaatccctttttacatgtggccaggtatatgcgaaaatcacatttttctacgtggctagtgcaaccgcgggcaaaaacatgcagtcacaaatgccgaccacctcaaaaaaaaaatgaaaaatgaaaataaaaatattccacaaaaccaaatcagccgaaacccccagcgcagcctaccgccagctgaaaccctaactctccaagccgacatcgtcgtcgccactaccaccaccaccgtcattgctgtcatcgtgttcaccgtagtccgccatcatcgtcactgcagcggtcaatgcctcttctgaggccaatggcaataaatctgtagcacccaagtccggcaccgcccgatacaccgtcgtcatcaccgtaattgtagttgtagtcgatagatccatccgtcccgttgtcattggggacagatctggacgccgcaaggtcgctagtggtggatccgcccgccccacggtcacaggcaatagatccacccaacctgcccaagccatgattgtcgtcgtggtcaccgtagtccagcatcgttgttaccgcagctgtcaacgcgccgatggcgacagatccaccactcccgagtccagcgctgccggatccaccgtcaccgtcgtcgatggatccaccagtctcgcagtcgtcggggatggatctagatgccacaaggtcactggcggtggatccgccagcctcgcggtcgctagtgactgatccacccatcccgaggtcgtcggtgatgatccgggcgtcgcgagtcgccgacgccagcactggacgcaggcagtgcatccggctaccccgctcccgtgcccgtgttgaagccgctatcgccactccctttctctcgtgagggaaccattgacgccgctgcctccatgcttgcgtgatggagccgtcgacgcaaccgccgcctttgtcacctcccggagcgcttgcctttgcgggccacgaagtggatcggaggagaggattggtggagtaggaagaggagaggatgagggaggagaggaaaaaaaaaaggataggataagtagaggatgtttttttaaaggtgaagagagtgaggcgtgcgattggctggtggactggtggcaagatggcctcttaacaggctcacatgcgaaaataggtttattttcgcaggtgattcttgaaccttccttggaagccgaatttttgcatacggggacggttatggctcgcctacaccctatattatgtctcgtccagaaaataaattatgtagtagtggaagaaattcagggaaaaaaaggagaaaaatgtgaaaataacttcaacataatcgatttttcaagacgagaaatcctcaaggttggcagaccataattgcccttgtatgcaaaaatcgctcccctaaggacggtttaaggactacatgtgaaaatttcatatttttcggagatgggccttttaacaggcccgcctatggaaataaacctattttcacaagtgggcctgttaagaggcccactgttcagtagccctctaagtcgagctcatccttaaaatatctaagtcctctctctctcctcatcctcatcctctccactccacccctcctttcccccacttcctcttctctccaccttatctccctcaccttatcctagtccctctttctcggtagaagcttgacgtcaatgatagtttaatgtgcggaggcaggtccggtggtgtggcgcacgtcgaagacaagaacgggggcggcaccggcctcggcagttctgccaccaatggtgacaggagggatggatccacctttgttggacttgggagcaactggcctccctctcgcctctcccactccatcatcaacccagcggtggcatcctcaagaggtgtggctcctccgccgtcggactcggaagcagtcgaactctcttgcctcttcctccccgtcgtcaatccggcagcagtgggggcggccttgagaggagaggatccacaaccaccagactcaggagtggctggcctctcttgcctttccttctttatcgtcgatttggcggcaatagcagtagaagggctagatccaccgtcgcgggactcgggagcggcaacgggggctcaggctgggcgtgatgaggacatcactagctcggatatgaccatggttatcttatgtattcatcaagcaaaggtgcatgctttctaggtgggatttacgtgttatatattggaacaaacattattgtattatgagttccgtgtgttctcatttgtagaggtgcttgcttggtgaaagggaaagataccgagaacaaggaatacatggatgatctaagaagttgattgaggaagaaaccaaaaccttcctcaagtctactccaacattaccatgttatttttggttcataaaaggcaagagatgaagttctgcacgttttggattcaaattcgggcctcctgacaatattaactttaaacaaacctagccactgatccagaaggaccctaggggtccatgagttctttttggaaagattatagagtctgctttcagatggttttagtcccacatcaaaattcctattgagctatagggaatatgcaaaacaagtcatgtacctcatacaatcttagtctgatttgggcgttgggacttgtacttgtcgtgggctaagcccaaggggtggaaaaaccctaggatgtctctaatcatatttattccatagccgtcataatttagagtcgggttttgcttgaattatttctggtactatagtttcgatgttcattggtttgtggaacccaaatttcgagttcttaatcattcatctgcatttctattgcaatattttttgttcttgcttgtgtctttgattcacacaccgtgattagccttctcgatgaagtcaattgggtttcggcatggttgataaccagaggaggcgtggtgctaaaattgcatggttcagatcgtattgattggaagccaaatcgtgtgtgtcaagtttccgccaaattaagagttatcaatacctatcagaagattgagacctaattagttaacgggaatccactgccagcgcccacaggagcgacagatccggcccagtcccattggggacaccgggaaaggtggtggcaattttgactgcgacgatgacggccaacaacacgttattgggcagcaaagactagtccctccactccgacgagggaggcagaggagcttgcttgagtctatggcaatattcatggtgacgacgacggcaagagtacagcggcggcatggttggattgggtaggctttctggattttggtttttttgaaattcttattttagttttgccatttttttccatgcagttggcataaggagccacattttcacatgtggttcagctggccgcctggaaaattactctctttcgcagactcctactggtaggcgtgcactttgtcacaccctgaagttcttctcccaagcctaaatcatatttataaatgacctcgagaatttatctgtgtaacagcaaaagagaaaccctaatttaataaatgcaaataataatcagaattggcctgtggaatttttcttggtttctacatgtcaaaataagctaacatgatttttagtggaattttcagagctctataaataattttaaccaattaaaaatgagcataagcaattattaaatccctggaaaatcccttttctttttttcctttttccctttttcttcgaatgagcagtcggcccattctccccttccctccccgtgcgctagctgggccgctgcccgtgccccctcccctctctgggtcaccgacaggtggggcccacctgtcgggcccgtcccctacctccggccggcaccgcccgcgcccgcaaccgtcgccgcccgcctctcccgtgcgcctcgcgcacgtcgtccgctccccgcgccctctcccgtacatcccgcaaccgccgtcccacttctcccgcgcgttcacaccaagaaacggctgggattctaatttcgaatcccgccggccccctctctttccaccttccccacttcgccggcaaatccatgccactcccagccacctctcacctccccagccctatataaagcacaccctcccccttctccacatttttccctctttcgccatctgctccccagctctcctctgccctagcgccgcgcaccacttgccgccgccgctttagccacctccggcccccgctcgccgctgttagagccgccgccgtccggttcacaagcctgagggccacgccgtccaccccttccccgtccaatttcgccactggagcccgccgtcctcacgcgccggtgagcccctccattgccgccgccttcggcaggcatctccgcccgttttgctccccctctccctctctaatccctctcgtttgtttccttaggtcgtcccggagctcgtcccgccgtcgccatcgccctccaccgctcgctgtcgtcgaccgtcgtcggtaaggcctcccctttttccccctctctctctcgcgtcgccgcttagccgcctagctctcgcgccaccgcctagccgcgtcgccgccgctcgtcgcctcgcgctgccgccgcgcgctaggtccgctgggccggcttaagccgcccgcgcgtccgcccggccgcgcgccgcctccgccgtcctatctaccctcgggtagatcggggccgtccgttgctgcctgcgtggcagcccatgtggccgccacatcggcgccacgtgtgcaccacgtggcgctccccttccccggtcccgtggactcggtccaccgtggagcagcggcattgagccgatgagaggtggggcccgcatgtcagcgccgccccccggctgacgtcaccaggattaattggtacatcaccgtctttgggcccgttgggccgtgtatcatattggagtccaatagagatacgtccaggggtccaagattgaccctagaacatatatattcaatagtttcatcactagatcggtttgtggaaccccaagtttgagttcttgattaatcattcatctgcaattgagttgtttgtctttcttgttcttgattgtgttctttgcttcacacgcagggattagccttcttggcaaaatctgtcgagtttcggcacggttgataaccagaggagacgtggtgctgcgattgcagggttcggatcgtgtgtatcatgtttcggccaaatcgatagttatcttcacctaatgaaagattgggcatcccatttccatcaaattcttcatgtggtgatgccgtggcttgatctgatgcgtccagatttgatccaatagctatggagagtctaagtaagggtcaagtttcaagggctctttggggattccgcaagaggtgattcccaaccatttggagcctataaatagggaggtagaggctaaagtttgggtgcccctttgagagagtcacttgtgcctctttgtgagaattttttttggagttttgcatttaggtcttttgaagtgtttaaattcaaacacatgtgaaggtgtatgtttgcttgtctttgagtgttttctttcaacacttctgtaatgaatattttctaagtttgtggaatttaattttagttcttgcctttcgcaatttgaaattttccaatttaaattacgcgatttggatgttttgcccattagctgcattaactaatttctatccacccaaagctaatccataatgaagtccagtctattaaatccatatgtatttaatgcattagcaagcctaattaattattgtagaagattaacatataagtctttaagtattgataaagtcatttaaaaaaatgattgctagataggacatatagatagttgcttattattatgtacattagtaagatatactaatttatacctctcatattcttttaatcgatgtgtatagggaattgggcgacgatatacgcattgattagagtaagtttaatagtaaattaaacttactcttatttatacataaataagagtagaagtcactatcagctattagtcatcttaaaaccaacatatatatataatagattaggtataaggttggcttcaatttttctttccctctctctttctcttatttatacatttaatgtactagcaaaaatgcccgtgcgttgcaacaggtcaaaaatttctaatgataatatacgtttttcatgaataatcatgtcaatgataatgtttgtattttaatgagcggctttttttttataaactgtgtttttttcttacgcgattttctcaaactatttagaaatgacgcttttctttctaaaagttttttagcattttttttgcttttttacttataacgaaaaccatattttctcccctttttccttttttttctcgtgtgtttttttgccgtttttttataattattttctcacgcgtttttttgcttgttttttcttcaaatgtttttttttgcttttttccaatacaggacataggggaaacagaacttttgttgttgctgtttttctttttatgcacctttctgcttttgttctctcttttattattatttttatcaaaaacgacctcaagtactttattataagattatagggactccaatgtaaatataaaaattacagggactcaaatacaaaagtacaaacccaaaaattaaaataatataaaaatggaatgctttcgacatgtaggttctgtttttgtaaacagatcttcaatccggcacatcattttgtttcaccaagatgtgtgatatattatggtacagattgaaaccgagaggagtatggtatctcggactcaaaaggagtggcgccttttatttttcgggggaattgtttatcggatttttttcgccctttttttatcggacaattacggttttttcgcccgttttcttctcgctcgcctggttatttggccagttttgttgacagacgatggaagcatctcttattttcagtagttgagatttgttttggagcctgtgttgttacctctccattccacataaaacattattcattttttgttacctcttccgtccacatataagatccttttactggaaataaaatgtcatatcctataaatagtttgttacctgacattttaactatacggttggtaatctaatccacgttatacttaaacagactatattgagaaatgatccaccaggatcgtggttgcctgcattgtccatcaggtcggataactagtattatacgacttttaagaactggaaggatgtttaatatttttggaaagggtttgaatctttgattccaagatctacaccactagaaattgagtgtagttatggacaaaatagttttggagatttccaaaagcttaaaacacatcgtctaaaccggaaccgttattaaaggacatcaatactttatatttatataatcatgtgtacacgctaaataatatatgtaagagacaatggacaccctgcttctaactataataaaaccttataaatttaagctagtatataaggtagtggacagtggacgagatagtgaagaacatatctacgttaagaaaatcctgatttgaacaaactctccgaacctcaccctttttagggaaaattataaccatgccattataattttgcaaaatttgagatataccatcctggtccacatgtcattgactcatgtggatcctacatgtcattgagataccgatggcatatctcaaactttaaaaaattataatggcatggttccaaatta

SEQ ID NO: 25723 - DNA, 5398 bp, Oryza sativa
gccataatggatttatgcaaagaaagagggaaaagtgggcgtttgtatactgtaggaacgtatatataaaaccttacaaactccatgcacaataaaatagcaaattgagaaagaatcatttgaccaggttgcatggaaatctgacaagtctgaagtttagagattgtatctcatcttgcactttctgttgaataaacaagaatcctttcacaaaagcaatgttgctacctgtccggaacagaaaataggaagtaaagggcagcaaaactgtacagcaatgttgacaaatcctcctcttgatttcacaaaagcaatttatcaaagacaaataaaatggatctctgtaattatgtgcatgatttgcctcacaaaattagtttatgaactgtagcagatatgatgctgccctgggaagtgctatgttcccaatgtatcagtaatacaagaaataaacaatttataggactgagaggcaaacatctgaattgtgatccatatagagactcctgtacagctcttgaatcatggagctgaaaaaacacattattcatttgaaaacaccaaaatacacacaattctctccaatagcaatttactctggtcagtgttcctctgcaactgaagccatataaaaacttgtcaccatgccatgaatcagaggaatgtaaatatcccttatcctaaagctggcatcaatatttacataatgctatacctcacctatatacatggcaaggtcttttgagctgtattttatagctcaacagtacagcaaaaccaaatgctggaaccaaatgcacagaagcttcgggttttttcccttatacaaagcaagttactgaaaatttataaacacattttgaatatatgtgatgatactctttgactttttagatgccttgctagcagacatcttaacagccaggaaaatacccctatgctcacctcacaatcataactttcctatagaacggaaataaaaaataggtacttttacatgaaaaacaaaccgaaattcactctaaaatgcatggcagatttcaggaaaataatgcagtcagtagaaccatcaactcgtaaaactcatgaaatctttggaggtactctccatggttgcgctatgtatgtgtgtgacctaaattagtttcatcttacaccttcagccaaccttgagcttggacaagtccaagttcagctttttaattgccctttttaggataagtcctagatcatatattttttaccctttttaggattcgggtaaaaaatggtttactgaacttatgaaatttagctgcaacttaagaggattgaaaagacattgtgaaggcatctattttcacttatttatttatttattagaaggtagataaggaaactgcaaatatcaaaatacacgagcctaaatattttgatccgaaaatgtataccgatctgaaaccaatcttttcgtaattaaaaaagagtgaattacatattgggctaggttttcttacatgaattgcacaatggactaagtcttagcaaataatttcactttataccggctattgttaccatagcatgcaatttggactataggcccacatgtcagccagatcaagtgttctctcactcttccccttctttcttcttcctccagacccatcattccccaaccccacatcatcaccctctacttccattccctgtctaccaccatatatttttgctcactgctgtttgagtttgatgatgagatcgagcactagcagatcctgccgctactgctgcaagaattagagcacaatacatcacgaggaaaaggagcagctccttgttgggggggggggggggtgctggtgcagcctgagctcgatctcgatctcgtaggttgatgtacacagaccttgagtgttaggaatgtgaaacaaaagcttgagctcgactaggatgctcaatggcaccattctgctgcagcattcaggttagtcgtgttgtgcttgtgccaatccaccagcgtgagccattatcattggcaggcaggtgaatctagctaggtagcacgttgcaggcagtgactgagttggaacaagtaggagacgttgaagatagggttgtctagtatggaactaaaggtaaaaaaccctgtgctaaagtgaaaacatgagatgtgtcatagcccaaagtgaaactttagcaataataactagcccaatatgcaactcactcttaaaaaatatgagagtacaagaaaaccttgagaatacaatcatacgaggtgatgtggatgcgcttggagtagtgcgatatagatctgtttccattattaagaaatcaatttagttttgcaataaccccttaataaaaataaaatataatgcataccaatagattccagctaattagccaacaaccgataacctaagtaggaagttatggtactcgctgatattaattgctgattgaagtaacctgagttccactatccaccaactttgcatatcattgataaccttcttcaaataatctccaaggaagacaggggcaagagtatattattttcccattttatattttctacacagttttaaattgatagcctcaagtcaaaactaaattggtctgatagatcactccatgtagaagtcctctagggagaggagatctgttttgcagcgtatcccctgattatgcttgatcactccataaaaatgaaattacctgtagccttcaaatgtgatgaagccatgtaattttctggtgccatagaattaataactgatatacatggttcagaaacgagcttatatttgaagcatgatgcagagagtatcaagacaaaacatgtaaaatgtgaaaggaaaattagcatccggttgaaatatgaatcaggctgaacatttccaatgaatagcacaaatagaatcgataatacaaacctgaagaagaaatgcctggctgggtgatggcggcgatgtggtcaggcaggcagcgctggcttcggctcggctgtaccggtcggtagtgacgcggggcgacgatgcaggagtcggcgccggtcaacagcggccgcggaggacatcggcgaggcgggagtcggtgccggtcggcagtggccgcggaggagatcggcgaggcgtcgttggtattgtcctcgacggttggtggcggcgcagacgagggagaagtcgatctcagtggagttgaaccgggggatgcggtggcagcggtgcgacggtgagggcgaggtgatggtgacctggtccggcggccattgcagacttcaagcgcgaccgtgagggcgaggcgacgacgatttggcgagagatggaacgcgatgcgaggggacggggttgcggccttgcggggggtttggcgcagatcgcatcgtgggtggacaggaagctcgtggctcgttagttcgctccgcttgtgactggctcggctcggctcgtttgaatttcctaacgagccgagctggcattttagctcgttagatataacgagccagctagctggctcgcgagctgctcgcaagtcttaacgagccaggactccatcagacaacccaaaagcccaatacaataaaaaggcctaagccacaagtagatactgtgcaactgcaaaccctagtcctctcgagactcactcctcaattccccacctggccacccgagacacgatgctgctccgcctctcccccagcggccgacgccaccggtctccgactctcccccagcgcccgccgccaccagtctccacctctcccccagcgtcctccgccgctgggaaatccagctcccgccgccgctggtctccgcctctcccccagcgcccgccgccgtcggccacctcaagcgcccgacgccgctggcaagctcaagctcgtttcctcatggtccaacagtgaaccgttcaagtgccagcggagctacggaggtgagttctccccctccaccgtcgagctcctccccgtggttaacgggttcgcgatcttaacgagctagctcgagcttgttgacgagccaagccgagctaggtttctagctcgttaggataacgagccgagccgagctagctcgttatcctaacgagccagaccgagctgagccgagccagctctacatccacccctagttgtgcgaggggatggggaggagatcgcggcaatactggtggcgcaaatcggcggatgcggtgtgggagagaggaaggtgtgggataggcggatctgggagggaggagaggcgcgcctccggtgccgtcggatgtaagtcatcggatgatttcataccgttcgatgtgtcacacgatgaatgagtaaagagtaaaatcatttatttgaattatagggtagatatagcctttaaaagtaactgaacaaatgttacaaacgaataaattttcttactaacatgcatcatgtactacgaaaacaggactaaactccatcctctgtttctcttctcttacgtttgcacatgttggcctgccagcaattgttagacatacatcatgtactacgaaaacagggctttaacaacaacttgatcaccatcctctgtttctcttctcttacgtttgcacatgctggcagagaaagcaattgataggcagaaaatgcccaagccaagtttaatcgttgcaatatgcggctgacaagaattgttcttgcgttttgctttcgtcatttttccatttctttttcacgtacctatccttcacatagatcttaaatccacaaacttctaaaatcattattcacatgtgtacaaattgtacaatagatcaatctattactgataactcgattcacctatttcaaatttcactttccccaatcaaacgaaggacatgagtgtcaaatgtggcaagcacgtagactaataaccttatatccattgccgaagctaattcacatttcaaaattttcctaatcaaatcaatccacggacaaaaagtcagacatgtaaattaatgaccctcagcccacttccaaaccgtcggccccgttaaggtttgaaattttggttagaaatttcagagtaccaaccccacacacattggcacgaaactgttcgaaaatttttttttcgtgaatttaataaaatttaatcaaatacagtcaaaacttgttcccataccatttttctcattccagaattttgaaaatataaacccaggtctcgatccttcaatgccttgcagtaaacaatctagataaacgtggctggccaaataaacaaatatgccgcctataaatgcgaagctcaagacgaagattgcaagcatttgctcatggaatgctagagggttaggataaatatgattaagagggagtgtaatatacagaagattcatctccaattaattagtatagtggaaaaaggacataagagaactacaatacacatgt

SEQ ID NO: 25724 - DNA, 6783 bp, Oryza sativa
atttgttgatggacactatgagcaataaaataatatatacacctagctgaggagagagaagctatgtgaaatgtcaattttgcccttttctttttttcactgtctttttatttattcctgctgctcgtttagtgtgatgatagtgctcgtgtacgtggaccccttggtcactacgtgcgccggcagcgccgcatggtagagcatcgtgtcccgatgtccttgcactgtcccgcaactccgcatggtacgtggacccctggcgctgtcggggtaggagctgttgtggcagacgctgagcgacttgtcgacggaccagcgggcgctaggcctggtagtgcgaggtcgctgccgttcacggcgtttgtgctgctcttgtcgctggcgctgctcaagctggtgccactgtgcgcgctctaggcggcgctgtgcctcctccgattccccgccgtgcgcgccgatcgagttcaggcaacacatcgccatgaactatctcttcgcgccgtggatctcgtggctgctgctactacactcggcgttgttcctccgccccgacgcgcgctcctaccacacgttgtgatgggcgttctcgctccccaaggtggtgttcttcctcttcttcgccgcgcggagcatggtagctcacctggacgccatctcgaccccctttggcacttgctgcaagatgctcttcttccaccgccttccactgacgctcgccaccggtcaaggccatcgccaccacccttgaacctaagtttggcctcaagggcaatttggtcctttttaattgtttgtccctccatttgttccgaaaataataaaataatagtgaaagtgtccaatggcaaattacatgatttttggagtgtctttcagccgtttcacgattttatggtgtctcttagctaattacatattttttgaatgtcctgtagcaaattttgcctagcatttacgcactcttatatcatacccggacgtggatgaatacaagggacggacaaggctatcaccacctgctgcctacctcactttctgtcggacatacccacatcaaacggtatttatctaacctaagcactatgcttatgctagtaaatagtgatactaactcctcaggacttccaccattcggatggacaagttagagttagagcaactcatcaaggtcatgggatcgttgccgtagcatagatcgactaatctaatcaagtgaaatatataaatgaagtatatcttattaataaggtatataactactaaagcaatatataaattatgaacactttagaagataattctattaattcaactatatagtcttacaataagaataaagtattaaagatataccagaatctcttataagactataggaccgaagatatgctaaacctattaccactagtactatagaaaatataatctctgagaagactataggaccgaagaaggcacacgatcaagaacaaaagaccaaacccaaggctcccgtcctttatttgtcatatctttttaaacaatagaacaaggtttgcactgcctcctgtaaacatgacacatatatggggttgcccattttcattttttatctgaatttctgagataccaaaaatttcatgattttcatacttttttgcaaaagaattgtttgaaattttatcaatttttgactcaaaaatttcgtgcgagatatttgctttccgtagggtgtgaaattacctgcataatagtcccatactcagactaaattaattataaaatggctaggataaactctgatccggactcgtcatcactaccttgaagtatattttagtgagtgtgggcttttctgcgtgctagccgtaggtactctagaagtctagattactcattctattttcaaataattcggtgttgactattaccattctaactttgaccattaattacttttaaatcaaaatgtaacattactatgaacataaatttcatggttatgtttaggataaaagaaaaggttggacccaaagaaggacttggattcaatggttttaagaaggtagaggtacatatattttccctggtgagcgggcttgataagggtcgaacccgggatggtggggtgcatgccagcaacccctgcccctgcgctactagcacatcacgttatgtttaggatacaacacaccttaatatcgagatatatttctttttctatgaaaatgaatggtcaaagtttataaacgaatagcgtccagtgtcaattattttatagatggaaggagtactgttttgatattgacctcaggacgttgtggaagcatcttgacttggctatttatagatgatttgattttccactccatatcgtcagtgagcaccaggatagaaaagtcgatatgtttgagagatgtgatgtgccggatgccaacctctaaactgccatatgttgattgtgccctctctgcaccgaattcaacgctaagccattcgagctttggcatgcctcctttgaataccaaaccaggtccagatctgttgcagaaacgtaggcgtgccaaacattggaatgcaccatggctgatcctgattccatacacgagagcttcccctatgtctaggtgtaggacaataagagcaggcaaatcttcaagaatacgtacatgttctcgttccatttgtttaacgtcgatatccaagtaggtgagacatctagagagtgtgggatgaatccacttcggaaacctggaaaagtaatgtatattgcaactactcttgtaaacaaacttttccaggaaacacggcgaaggacaccaagaatctgcgaaacaatctccacttccattgcagctggtaatatagacttcccggaggttgtttcctccaagcttgcaaagggatggtatcattgcttcttttcctgtttccccttcagacaagaaccttactttgagcaccctcaaatttctcaaaagttgtagatctttctgaaattttaataaatttgtggagcttctacaacaacctaaaaaccctaattcttgaagagattccatgttaccgaacccatccggtaatatgagatgatgtccaacaagacgcatcaaccgtttgagctgaacaatactttcaggcatcactaataatgaagtatggcgtaaatcgagtgtttgcagatactctagcttcccaatttggacaggtaggcagtcaattcttgaccaacggagccccaagtatcttaggtgaaataaacctacaatgcaatcaagataactattcctgagatcacaacgctctagattcaacactcgaagagtaggtaggtttaaaagaggagacatcatatggccatcaacatggtatatgttaattgaacgaaggttagacgaattcatggttccttgtgattttgcccttgtatattcttctttgttcccaactaaaagccggcgaatccgtttacgtgaagatgggtgatcctgacaatccaacttggttaaaaaattttcttcagttgactgatggatgatgaagttcaaaactatatcatggactcgacatccatcttctccatttggcatgatctgtatgtgttggaccaagctcctatttatcagctcgtagaaataactctctgcaacttcctgcaaagtaaagccttgtttttttgttatgaatccttcagctatccatctccataccagcacatccttaccaatcttgtgatcctcaggaaacgtaccgaggtgcagtaaacaacttttcatatgatgtggtagatcattgtaactcataaacagtatcttgttcattacctccaggtcattatccttctcactagtagaaacaatataattcagaactctctcccattcttcccttgttcttggtttatcagctaacaagctagctatagtaataatggctaaaggcaaaccatcacatttataaagtatatcactgataatcccttccagctgactggggcattttttttcagcaccaaaagtccttgtgagaaataaattttcagagtcacttttgttaagaggtttcatctggtagacaaagccctcatctgaagcgccgcagcaagattgagctacacttttgatccgcgttgttgtgattattctacttgcgtgcttgtttataggaaaagcacattgtattgttttccatgctgaccttttccaaatgtcatcaatcacaataaggtacctataagcaagtttgtgaagcagtatgaatcatttgtaggctaataaatgcacccatattcatttttgggaaacagatcccctgactttatgcagtttgcagttgtgccactgacatgtgggcctcactttggtatggtctacatgtcagtggcataaatgcaaactgtacaggggatcctcattctcatttttgcatacgtacatgtgaacaatctatatacatgtaaaactatctctgcatgcaaaagttgtactacattttgtgttggttaatttcagcctgaaataattttgattatttgaaggaatataacttcatcattggtagaaacaaaataaaaacaaaaggctaccaccactatgcagggcatggatataaatcgatgtgtaggagagaccacgatagaaaattccaacaagaaactttaatgaaaattccaaatgaaaagaactttgaatgttctttttatattaatctagctacaggctgagagatgcacgggttgattaatgatgactagaatataagaacccgtatgaaagcacacgatagaaagtaactcaagtaaacttaccgttcatctttcagacatgttcttagtttgtcgataagttgttgatcactatatgattccgttggttcattgctcttaatttgagaaagcaactcccttagaaggttatccatgttgggcttttgcgatacagacacaaaagctgaaaaagagaattgacctttaattttctgatacacctggttagcgagagtagtctttcctaaacctccttgtccaacaatagagacaatcttacgctgccctattggctccacttcctcactaccaaaccaattgatgatttccttcattggaccctggatgcccacgagtttttccttctccacataaagggcaggtagccgaggatcaatctccctacacaatttgctagaagtgccctcttcaatcctatacctcttttgccgttcgtacgcttcatttacaagaacatgaagttcctcgatttccttagcaaacttgtggcgatgatgaaacttcttcaccttgcggagggtcttgtggagaaccctcttgactccattggttgtgtcagctggctcatggtcgatacggtaggtgaagagatctatgctatcctccatgtcgtaggccaactcgcgcatctccgccatccaggccttcacctgcacgtctggactgtccatggccgcgtacttctccagcgcgatgccgatggtcattagctccttcgtgagctgttccagcttcttcctcacgcccttgacctccatgtacttcttctctatgaggttggtgagttttctgagaagagggctcatcgcccccgttagggcgctcaccacgatctgctcgacaacccctcccatctccctcaatcccaggctataatcagtctactttcttgaatcagaatcagtcgatggatcgattatggtgtggcaggatgaatttcgtagaggtgcgatgaaagaatggttggtcaccctccagctagtgtgcctgtggcgtagtagtggcaagagcatcagttctgtccctttcccatctttcaattcaatgggtgattgccgggagcatcaatttcgtgtctgagaagaaatagccaggaacccatccggggctactgactttgtcgttgagatttacaataattacagataattaaacgagtcccacagtatgttgagatcactaacactattaaatggattgcctttagtttacgttggttgggaaccttctccttcagcacacggcaaacagagaaactcattcgcacatgattaattaagtataagctaaaactagcaccggtggagaaatgctttttagtcacggttcgcaaccccctatagtcccggtttttaaactggaactaccaatccgggacgtcccggttcaaatacccgggactaaaaatagatatttagtcctggttagtaacaccaaccagaactaaaaagaggggatctttagtaccggttggtgttaccaaccggggctaaagagagggttgcggcagtgaaatgatcccctttttcttttttctttttttttcttttttattttctcccaaatcaagtgggatacatatcccaaatcaaacccccaatccacaaatcgaagtaacatctcaaatctacatcacaaatcaaagttacttatacacacaaataaatacatcataaatcaaatacatcacaatatcctaagaaattactcaaatacatcacagatccaaacaatgaatcacaaatttgtaacttctcagtcaaatacatctcagtgaatcatcacaaattaaaaaaaaaagaatgctactgccgccgccggtcgccacgaacgactggcacggccccaccggccgccaggcgcggccctgccgcccgccgcccgccgctgggcacgaccccgccgggcgccgccggccgccgcagcgcgcggccccgccgctggccggcccgccgaatgggaaggggaggccggccgggaaggggaggaggaagggggagagaagggggaggggagga

SEQ ID NO: 25725 - DNA, 6476 bp, Oryza sativa
taccaaccgtgattaaagtggtgatctttagttccggttattgacaccaaccgggactaaagatcctcggccccctgacatacatctgacaggggatgaaccgggactaaagatagtcccggttggtatgatcaaaatttttataactggaactaaaaacaatctttactcccagttctttttggatccgagactattatggattttgccggaccgaccaaagatggtttctccaccagtgtagcttaaaaagtatgatttttttgaaaaacaactttcctatagaaataccgtttagcagtttgaaaagtgtgcaggcgaaaaactagaaaggagatgggaacacaaccaaacaaacaaacgtactaaaaatatatataatccatccttgacatgaacatgcctttttggtagctactactacttgcctagtagcttcgtcctcctttttagattaaaaaaaagtactcccaccgtcccaaaatatcagtacttttggactctgatacggttttcgagatgctattttgatcaatgatatctaaaagtaaaatgttttaaataaaagagttacatattgtaatagtttatttaatgataatcaaatctagtaacatcaattttacctagttgatccttttttattttttttgttatctatctatctatctatctatctatcaatctatcaatctatctatcatatactataagtccattaaacttcctacaaacgctctcaagcagccatatggtactcatataaacactcctaagttaccatgtggctctctaataaatcggtagacccgctattttcatctattagatttaattttagaaaaaaaaatcccacaatccatctccctcccctctccccactagcccaccctcctcccctatggtacgtactcacctatccctcctcccctatggtacgtacgtacgtatcctccccccacctatccgatcttctcatctctttctttcttttcaagtttattacaattaaaaatatattttttaaaataatttccgtatagagaaataatcataatctttaaattgcacataaatctttttatcgttattcattatcgtattcatagtgcttaactaaccattcaaattagaagctattaagagcggcgggctgggcggccgctcgcgtgccacgtcggataggtacagtgcgcgggtagaagttttgcgaaaaaatccttctattttttgtaattatatatatgtccttataaacagtacttgaaggggaaaaatcgcggaaagggactgctctgtaaaataaggaaagaatagggtttttttttcaaaaatgacgcccactaatctaaccccccagaccttatccgccgccgcccgcaccctctccctctgcccgctccctctccctctccgccgccgccgcctcggccacctggatttttcacattttgatccttttaaaaaacttatttcgcaaatagacccctgaaaaaacttatcccagaaatggtcttttttggggcgccagagtggctggcgccgtcatccaacgggacagcgccagcctctctggcgccgtcttcctgccaccgtggcgcacgcgaaccgacgtggcaggaggagcatgctagcgccgccgcctccattcctatttctctgtatggagttgcaacggtgtcatttttattttattttttcggatgttttttcacactcaggatcacgatacaaacaaccacaaaaaaaatttaaacttgaactaccacttagctaagtctgaaaatatctagcataccacttagtttactttgcaccttcactcgaattagaccataactcctttagtaaaaccctttgatcagcatgttaaacataatgcactctaccactatataaattacttaatctaattcaaaatataactacatgaaatgacatatataagttaaacagtacatagagatataatttttttatttttatttcattttttgatatttttttcacacttaggagaacataggaaccaaccgtataaaaaataaactcaaacggacaaaatatgtgacatgtagaattttccaaaactctaccgaaacggacaaaatatgccatctattaaaataggcgtaactttctcatacggactcggaatcaggcaaataatatatgaacggacatctacagaaaaagttacatccgattctcccccgctttgccgggttcggcgatattaaaacctccaaattccgcttgcaagattgtgttttcgaggagagaagtttttcggtggagctttggaaaatttcacatgccaaatatttcatccgtttgagtttattttttacgtggttggttcttgtgagttcctaagtgtgaaaaaaatatcaaaaaaataaaataaaaataaaaaagttgcacatctctttcctctgcactagttcggagagaggagaggagaggaaaaattctacatgtcacatattacgtccatttgagttcaatttttctatggttggttcttgtgtgtccctaagcgtgaaaaaaatatcaaacaaataaaacaaaaataaaaaatttcgaggggggggcgccagccactctggcgcactccccctagccacctcagcatcgccccgccacgtcggcggtgggacggcgccaaagaggctggcgccgtcctgttgaacgacggcgccaggcactctggcgccccaaaaaggaccatttttgggataagtttttctggggatctacttgcgaaataagtttttcaaaaggaccaaaatgtgaaaaatcctcggccacccctcgcgccgccgtccccgcctccgcctcacaccgcggcccctcgccaccgtccctgcgtcgcgctcccacctccgtctccgcccctcgccgccgcccagcctcttcctcgcgccgccaccgccgccgcctccgcctcgcacagccgccatccccgcctccgcctcctgccgccggcgtaagaatccagccttgatgtggtcgggggacagggatctgacttcccccgtgcaccgggcggtgccgcagcctccgtcccccgaccacatggaaggggcggcctcgggtggagctggtgtcgttgccgcgacctcattggctaaaggccggctgtccgtcgatctggaggagtgagaggtgacagcagcagtaaagagtgggaaggggctgtcgacggcagtatgggggagaagcgtcggagcccgcttcccctcctctcacaggggccgccgctgtcgaacctgtgttacctgggggcggagttcaggttccagcgggcggagctcggggcggagatgatgaccgacggtggggcagttcgatgagcgccatatctgctcttctacaagggccccaaggtctgttcgtcccaggtcgatgctaaggaatctgaccacctatgttgctttcttgccgctgccatcaagacaccaagtcgagcttcaagaagggcgtgagtgttttccccttttttcctgagataagctgattagttgctttcatgtcatattactgagcttgttggagttcttttttttctatttagttttttgtatagtgcaaactgcttggtggtgtgtcactgaggttcctacagacgtactggatggatgcagatgtggtaacagccttcgagctaagccgggccatcgacgatggagtgctgcagcctttgccctttggttcgctgacatgctgttccttctatgtgaggttgccagtaccacggactcgccgtcagcactgtgcaacgtcatccttctgcgctagactgactccaccctctgctgagtgaggtgatgctaatcactcattgccctacaagtgtttgttgaaatgcatgctctgtgttgtgacttgtgcagttgtgctaatgatggatttttcctggtgacgattgatgcagatcgcgtgctttttccaccgctacaagtccgagcagccaagcacttatcgcaagaatggtccgtgtcttaaaactttcccaaaccgtgcatttgtgttgtgagtttgcaactgtctgcctatctgtatatactactacttgaatgcactgaaaacttcctcctgtatttttttttgttatttactctacaactggtgggatatcttatatgtcatgttgaaatgtaaccttttaaagcaaaattgcatttggtcgaaatgatgctagatggtatgttatttggattacagtgtgaatcaaattaggaggttgaagctaagtggttttgttcaagttaaagtttttctataaaataatctaccaaaaagatatatatttgatttgcagatatgcattgaaaattacacatttgcttggcggttatactgttagtccttatgaattgtttagttatttaagatgaaagggaaaatcattttatatcacaaaatttttttcatggattggcaacatcaaacagagcctgtggtttgctgtagcagtagcatactagaaaagtgtgtggtgttgatgtagtgcccgcatggtttagcttgacattaaaatgatgtgcagtccagatttgaggaacattgttgacaatttgctatcacctatcactgtctgtgttgaccacaataatttcagatgtaccatcccgtcttctaactagatagacgcatgaaagtttgttgcatcaattccagcacttcaattttttgtgaaataccattagaacataaccactttgctgtgatatgaaaaataaatattttatttcttggaaggttgtatgatcatgtattcttatactatattgttcattgattttcttttccatttgatttgattgactaatatctctaaattttagctacccttatggtagcctaaggaaaattgtatgtttgacagacctgttttctgttgtttgatccctccaggaaaaccagctgccattcaatatggcactggttcagttgatgggtttttcaacgaggatagtgttacagtaggtgatctggttgtgaaagatcaggtatgcactatatatctcagtcactgactatctctgatcatatactccaaaatattttagcactgttgcttcaccgctttaggaattcattgaagttataaaggagccaagccatatactttcatggttgcaaaattcgatgacattcttggtctcggatttcagaaaatagctattggagatgaggtacctgtgtgttaagacaacatgatctatagtgctatgatatattggtagtctggtccattcattgcaagctgctctttttcttaaattatttgtgtacttttgggctttttgctcaataagggtcaatcctcgcaaaatataatctaattcatctcactcctttttaactcattagattatcgctatcaccttctatagagttccttgcacagaaacctctgttctgaaaagctgcaaattatttgtagttatggtgtttttcttatgcattccatattggccaaggcaccattggctatgaccaagtagtctgctcatgtgcaagatttgtggggatcagatatgtatcatttctccctactattgtttcctaatgcgccctggtgttgtttcctcattttatttgttccatctgaccgggcatgttggttgctatccagttttccctttagttggattccaaaaataattgatatcccttaccaccttttctttgtgatacctgagtcttttattcaacttgtgtatttcaccattgaccctttgcaggtgaatatttggctttgattggtgaaaaattaatggagcggatataatcgaacttggacttgctacgcgttgtcccatcagtggtgtaagatccttttgattgcactatagatttttcatttttggtggtttaacgcagtaggctgacactccttttaactaacctattgattatttattcttggcttggacaatatggggatattgtgtgtccggataagagtaggcattatttgtaggtaggacatacaagaagtaaatatatttataatttctactctgtgaaggtattattaagtgttttagcatgtcataggcagaagttgctggaatggtagataatcatgccctcttttaaacatagcatcggaattagagtagaatcaagatgctttcctttcctttctatttcagtgtagtaccattattctgaagaaagacacacaagactatcatggaatagataatcctatatttataaggcgtgtaattcttaattcttttaatcaagccgagtgctattttgctgtggctcatgaatctttgcgttatttgtaaagctgtggtttatatattcctttgggagcttgattctcttcgaaattgactcaatcacctgtcattggtggattacctgtcttcatgcacctttttgccatacatgcaaatatgtagtgtgtaggcctcagggataaaaatgtatttaacaatatggtgtatatg

SEQ ID NO: 25726 - DNA, 40553 bp, Oryza sativa
  unsure (1)..(40553): unsure at all n locations
atgagcacaacgagcatggtggttctcttgaacaccaccgctgacatgtaggtgatcacggtgcctagcttgatgattgcggcttcaccaattctagtacaaccgatcacccatgttttgttgatgttttcacctgaacatgatatgttctatctttttagttttacttgtcaaaactgaaaatgtggtctcgagattgtgcaggaagaggttatcaaacaagacaatatatggatttgttggttgattggtttgccttttttttcctattttcatcaaacgtttgaataatttctttttttttcatttacttcccgttgacatttactacatgggttatggtaacagagtttttaagaacaatgttggtccctttcttatctgatgatatgtgaggatgaagaaaattcctgtctatagcaatggttgatgaccagtgattacgatcaaactatccagaacccattttgtaattaagtttagtacaaatcataaaagcgagaggttctatctactgtggaatatgttgtttccattgcaggatcaacctacattaccatgaataatagtagtctgattgttcaatattgccaaaaatgttcttgtatctgatttaaaattctgagcaaatggtgaattagttctaagggatttctagatgataccttgtgcaggtttctgtggctaatttagaattggtcgtatggtgctaaattagcactgctaatagctagggcggttggtaaattttcgaaagaaattgtgttgctttagaacgaaatttggctaattttggtgcataattgacatgcgcgatattcacatgataatagaaattttgtacagagcaagtaccaattctatgtgtggattttatatcttccctggggcctgggcagtttttgttgatgtttccagccatttatgagaaaaattttgtcctttaaactcctgacatgtgcgattaggtatccttggcgattccccccccccctctctctctctctctctcaaaccgagagattcataaatagactattcggttattctgtttttttcaccttgggtgctctgttgtttatctcaaatgggttgaagtctgtttaatcagtacggcaaaaaccagtgtacacagtgatttgagttaattaaaaaaattgtaacggcagtcgtgttttttcagtttttttcatcctataccgccttccaagtcacgtgctattcgactgcttacccacttgcacgaaatatttataattaaaaagtacttcggcccgttctaacacgttccaacaaaataggtgtggtgaaatacttactttgtactttttcttaaatatatttaatgtatggcctaattcaaattaaagctttgattaaactgattattttactaacacaaaatttggtcatttattatgggtcgtagcattagcatgggtatattactggtataaattaagtgtgtcctccgctatataagccatcacatatgatttgatttttatttatttcattcttacatacactacgagaaagtaaaatttattttatggttactgaaaattttcatttcattgattgacgtagactatgttgcgggtgaccacattatttgataatttttttcacatttaccgaaacattgcataataatacaacattaacaatagaggagcaatggttcacatgaatgctaacacatgttactacctctatcacaaaatataaaattctagaaccggatatgaaatatttagtattacgactctggaccgacctactgtctagattagtagtattagaatttgtctcatccaattctaagttgttatattttggaatagatagagtaccatatagaaaatttttatggtcattgaaaaaatatctctaattagctaaaattttataccacgtggtacggaaggtaccaagttttacctcccaatatatcttttcaaggatgataaaattaggccttgtttagttccccaaaaacctttccaaaaacatcacatcgaatctttgacacatgtatggagtattaaatatagataaaaaaaaactaattgcacagtttgcatgtaaatcgcgagacgaatcttttgagcctaattaattagtccatgattagccataagtgctacagtaatctacatgtgctaatgacggtttaattagattcaaaatattcgtctcgcggtttccaggcgagttatataattagttttttcatttgtgtccgaaaacccctttcgacatctggtcaaacgtccgatgtgacactaaaaaggtcttactctaccaaatgaaaaaaaaatgtagctttagttggctctagaaatcctatatatttctaacggtattgctaaatctctgtcgccatattttgggttcgatttcaatcggatagcctgatccgcatgatgcgcatgcgagcgtcgtggtcgactcacgtccgtagatcatagccggcatggtcagagattttcctctcttttcctgttcactaaaaaagtgccaccattagtttcccattaaattagcactagcatcgattctctactaatagctacttacatcaatttaggtatgtaattttagaacttatacagtaaatacactaaaattatatatgtaatttagagacttacatatgtaattttgggacttacattataaatacattaaaattatacgtttagaaacttacaatataaaaatatatgctgactattttttcataaaaagtatggcgccataaatttaggtagttttctaatcaacgctgaaatttcattttgtttatctattctattattatgctattcatcttcttgcattgtcactctgagctgcttgttgggtcaaggacgtggccggcgaagagcaccgcgcccgacgtctcctccaccacgaagaacgcgaacggatggtccgcgacgaagtcctccgggtagctcatgctcaagagcctgatcgtgcaggccgtggacgccgccgcctccgtgccttcctcgttcacctccacgaccgccctgtggaacacctcctccaccaccagcccgccgccccgctgatccacgccctccgccatgccggacaggtcggcctcgccggcgtcgaaggcggccgtcacccccatcccctgcagaaccccgttgatctggctgtagaacgacaccttgaacctcggcaccctgaggtcgccgacctcgcgacgccgcgtcggccggtggtcgcgcaggaaggaggacgacgacgacgacgccgccatcttgtcgacgagcgccggcaggccgtcgcgctcgtccggaaggaagatgtacatcgacagccctacgttctcgccgccgtagtgctcgaggatggcccgagtgatgctactgttggtgatagtgtcgccaccatcgccatggttcttcatggtccggtggtggtacggcagcttgagcaccgtgaagccgtcgtggaagccgatgtactgatcctcccggctgctcatgaacgggacgtcgacggagctgccgtcgaggcggtggaacttgccggtggtggtgctcgacctggggaagggattggaccatttgcccttgaagtagatggcgttcacgagcacgagggcggtgtcgacatgaactgatccatctgggaggatctcggggatgagcttgttcgtcgccttggacacccacttgttgatcttctttcttgatctctttggctgcatatgaaagttttacataccaagattgatcgaatttactacatatgttggtcgaaatttcacaaatcgtcatattgaaaccctggactgactgacctgtctttggaagttggcggcgcgcgtcacggccttgtaggtgccggcggcggcggcgcggtaggccggcttaagctcgagcgtctcgtcgtgccagacgccgcaggcgtcggagacgcgcggcccgccggacgcggactcgtcggcgaggccgacctccacggcgcggcgtacggactcctcgaggtcgtcgagcgacgcggcgccgagcagcgcgaggagctcgtccagggtggtgccccgtgccccggccgccaccagcgccagcgcggcgtacagggacgccggcgagaagacgaggttcttgttgctgctgacgccgacgtcggcgagacgcttcgccaggcggagcgcgaaggccgtcatgccgccgcagtcgccggcgttgtcttccatggtgatgggtgatgatgagatcgatacttcttgattggatcgcaatgcaaccagggtacgtagatcgtgctagacgtacgccgcaagggtcgttaaacgtacgtacaaattattactgtatataagtcggtgcgcatatatggcagatggaagttaattaagatatgtttacccttaaatttgcaggagaatatggagaagataaaactaccacattaaccatgaataatttccttttatacggatggggattttcatccctcgaggggacatcacctcacctcgttgcaaaatagttatcaaaacatttgaaaaaaaaaatgacaacgtagattaatacgaaatatatcactccacaaaaatacaagaccaaattcaacttctataagttgcaacaaaaattacaaattaaactgaaaatagttatcgcacattcgcaactatatttgttatttttgttacaacttatagaagttaaatttaaacttgcatgtttgtggagtgatatatttcatattaatatatgtttctaatttttttttcatatttttttatgactatttaggtgacatgcacgaaacgagaggatatcccctcgagggatgatttcactttccccttttataccattgtaggcagccgcgcgccgcatcaggctagatttaatgctgcgcttcgaagcacacgacacacaggtcgagtcgagaagaaagccgtcatcaccgacggctactagtattatgccagtgttactactacacaacaccatattggtgccggctagtgccagattaattcccggccagcaccatgaaagaggcactgatgagagagggttctcacttatcggtgccgattgagaacgtcatgaactgcatgattttttatttaaaaaatcagagaggcttagctcaattagatctgatgctttaaatccatcaaagataataaatctaacaaaaaaagagtcacaaaatcaacggcattccatcccgaatcattggaatcaacaatactcaacttggtgcataactgaattcattcgaatgagcaacaaaaaggaagaagtccacaaattttgggcagtcaagaatgcaattcacaatggtgcaggagctaatatacatgttggatatagcacaggaagtaaggaccttgtcggcacaggagcaccgttttagaaaagatctcaaataaagccagaattttggggtggcggcagtggaaaaggcaaggaaaaaacaagcctcgcgagttagatggctcaaagaaggggatgcaaacacaaaactttttcacatcaaagtcaatgctcgcagaagaaagaattttatccactgtctgcagcgtggcagcaacaccattcacactcatgaggacaaagcagaacacctccatgcgcatctcacctcaattaatctgggagcaagggaacggaggaactgcacaataaactgggaggccctagccctggaaaaactacaagatgaagatacagatgacatggatggccccttctcagaagaagagatttgggcggcaatgtccgaaggaaaaggcggcagggccagacggttacactggggctttctataagaactgatggcatataatcaagcgagagattctagaggtctttcaatgcttctataacttatcggggggaaattttggaagcattagccgagccatgatagccgtgctgccaaagaaagattcaccttctctggtccatgatttcaggcctattagtctgatccacttagtggcgaagctcatttctaagacactggccatgaggttggcacaacgcctagatgggctgatctcacatgcgcagagtgcgtttatcaagaaacgatgcatccaagacaacttcctttatgtcagaaacatggtctgctccatgcatatgcagaggaagccatgcctcttctttaaattggatatagcaaaggccttcgattcggtatcctgggaatatctttcggaaatgttgcaataccaaaggtttagccacaggtggtgtaactagatcacactactattgtcgacggcatcatcaaaagtgttgctcaatgggatcgcaagagagcaaattgcacacaagagaggcctttgacaaggagatcccttatccccatacctattcattttggccatcgaccctatctagagattactcagcagggctaccagccaaggactattgtcaccactagccaacaggacggcacgggatttatttcggaccggcaaccaatttactcatgatagggacaataagagaccggaaatcaatccactagttaagaggtgtggaactaatccggatgttttgttgtacctatcatgagtaaattggttcccagcccgaaataaatcccagtctctacttgagccgctactgagcccatttcgaaaaaaaaaatcccctcctcccaaaaatccctaattccctaaccctaaatttgcaagagacagccagacaggccagtggcggcgtgcgttgcggcgcgggagcggcgtgcgttgcgggttgcggccacgtgcggcggcggcctcgcggcgagccagcgaccatggggcagcgcaagcaagccaggcaggggcggccgccggctgggcgcacaggcgcagccgcggcgcagcgccgacaacggccatgcggcgcatgcgtcggcgtcaccggcttgagcgaccgtggccagccttccccttgacctcttccgccgaggcgccaacgaccgtggccagcctgccaggcaccactcgctgagaacccgagaccgcgaagacgccgacgggccatgccgcatagtgagtcaaaagcacaaattttaaataattgtaatgaagattttaggattgggaattgcaattgattgatgtagtatacttgcttgcttgcttagtttgtagaattgtagttgcctagtttgttgaattgtagttgcaattcattgtttaattttcagaattgaaacatgaagaggaagaagggtcctgctattgattcgaagtcttttttgagaaatctgctgcaaagaaggaaaatcgaagccaagcgtcgaaaagttaatctctaaattgtaagatttcttcccaatttatcattttctatcatttttgtattccatatggtggcactttgatatgtttatcaattagtatttctatatgttaaaacgtgatgatcaattctatcaatgtgtgaacttatgctcaattttatgttatatacgctatatattatataattattagtgtgtgatactatatatacaagctaattattaggtttttaggtgtatgaacaaatttttttcctctccccatttcgaatacacaagttcaaaatcctgggcccgccactgccactgacctacacgctgataaatttatatggtgttaggtagtgttaatgttctttaccatcactgtgaaatgggttgttgtttcacttaggggtgaaaatggatcggataatatccgctccgaatctgtccgaaacaacgatatggtatgggcttttagaaatccggcggatacggatgcggatgcggttagtatgaggcggatgcggatatggtatctctaaaatccgacggatgcggattatccgatatttttgtcggattatctgataagccgtttgtcggataatccgaaattatcaacatatataaccactctatctattgcatataatataagttggtacatccaattccctaattcatcaattaacatagattttttagtctaaggcttttatcgtctcatgtcacactcacgtaactatatttttcatactatggacatcatgtattcatattgtttagcgcttaatcatgtaattattacgataggtcatttactgattattgtattatttttccttggattgctaactcgatgttgcattgattgcatatacacgtaacatccgataaatttaatccgcttccgaaccgattccgcaccgactccgcaccatttccgacatccgaaacaatccgctctgtatccgcatccgtacactatccacacccgttctgaatccgcttaaaaaatatggtttaggatatggtataaccactatccgtccgaatccgcttcgttttcatccctagtttcactcgtgttcctgctaatttattactatatgaaattttataggtaaatcaattttaaagaatctgtgcgattgattttattattatttttacatttaaacctttaaatatattagatatattgggctcattttttatcatcgctaaaaatacagaaaagaagatgaattactctcactgtatatgctttatttgctacatgcaaacattctaatttatcatgtaattttctgaagacgttaaatatgcaattgaaaagaagccaagggattattttgtgaaattgtactgtttggacagggtatggacgataagtagccagttttttttttctcacacgcactttctcttccatctctcttgggtactctgcttcaggaatcatacgaccagtatttcaccacgtgtcagtaaattaattggtgaatgtgggagccgatcagctggcgtcaacacggccagctttagatatacagaaagataagactaaaaaactaaacagactgtgcgttgcaacgagaagaaaagatacaaaattgagaaaaaaaaaggtgagaaagatttgcattatataattaattaaaaatacaacattttcagaatacttggtatttctacgtaggttggtgtagaattaaattaatttgtaaagtaagtgtgagaaataaaattatatggctggatttaatttttataaaatattatccatgactagttacactctctagaattttctcataatttttagaggtcaattgctaattttaatggcaaaatttgctacgggatatcaaaaaccacgtaactagctggtggacatcgcaagaaacgcgaatttgctaaaggacaccgtaaaaaaccagtaattagctgctggacacccgtcggattattttattatatctgatggaatttgagagagaaacacccatgtaagtacggttttacctttcattttttttctttattctttattcttccttatcttctctctctttctctcctctttcttcaaccgagagcggcagcacggcgaggcgcagtccggtgcggcacctcggctggggaagcgctacgcggtcgtgcgcaagggtcggggctggctcaacgcggcggaggtggtgctagagtaggacgggaggtggtgccggctcggttgggcgtcgtcggcgcgcaggcaagcggtgctcaatgggacaaaggcggagctcaacggggttgtccacatccatgtcggtcacactaatgctggacatcctcatgctgcaacactcgtcctattaaagcccccgcagaacgccgtgagctcgtccagcggcgccgcgaccaccaccttggctggggctcacgacgacagcgagagcttgctcggcccgatgctggggcagctgccactgcgagggagctgcttcggcctggcgggaattggtaccatgccggctgcgtcttcctgtggcgcgggatgtgccgcgccgagctgctggccagcgatgccgctgcgtctaggcatgacgcgtcgtaagagctactcggcggcgccgacgtcttgtttggctgggttgccggccaccgtagggctgccatgccacctccatagccacacatctcgcgaacgtcgtgctacctccgccggtctaccagcgtcgctgcaccgtgctgtgctatcctagccccaccgcgcttggtgccaacacccggccaagctcttcctccgctcgtccgttccctcgttgcaccggcgctgctgccgccaggccgcgccctgccacacgggtatgccgccgccactcgccacgcccctctggccaaccactctttcatcgtcaccatcctaatagagattttttttttgtgtggtgacgcacggggcaatctgggcatttggaaaaaaatctcaccacttttaaccaggaaatgataaattaatgcgtctggtgtcctactatgactttcacagttgttgtagtgtcctggggtagtgtcatattttcgcggtgtctctcagctaattacacaatttttacgtgtcttatagcaaattttgccaattttaataatacaaacaccatttcaatattcacttaaataaaaatctaaatacaaaccatcttttctctctggaccattttcatcccatgttcttcctcagccagcagccgagctagcccactttcctcccttgtcctttgtcggcaaacgcacgttcggcccagatagcaaccgaaagtctaattagcctcccaaataccagcccactttcctcccttcttttcacctccgcctcagccctcagcccgcaagcgcacgttcggcccagcaagcaaccgaaagtctaattggtgtcccctgctcttcctctcactgtcacgtgggcccatcgctatataacctccgtccggactcacttggttgcccaaaatccggttgtattcttgaagaatgaggataatccaaaattgattaaggggtttctatcctcgtcgcctctttccatttttccaagaatcggagcaaatcttaaggggtttctatcctcgtcgcctctttccattttcccaagaatcggagcatatccgctttgtatagagcttggaattgagccctatcatcgcctctttccgtttccccaagaatcggagcaaatccgcttcgtattgagcttggaatcgagccctatcatagacaagcgaacctagctagaaacatagggtttcgtccgtttcgcttggaaaaaaaatcgtgtagcggatgttgacaatgacggagaaaaaatcatccggaaaccatacgtattttttaattaggtatagataggcttgtttaaaggaaaaactattcagcctagctcggtccaaaaaaggactgcaccaggcccatcctgaccattttcatttcattgatcgatgaattttctttttttaccaaaacattcatgaaataaaggagcaatgctgcaatatggttcacatgtatgctgatacatgttaccaaacaaacaaaatgtagcttactttatttggctttagagatattctacgtatttctagtaaacactgaaatatcactatgtttatctacttcattctactccatccgtttctatcttatataggagtataagatagagggagtactcatcttcttgcgttgttactccaagcttgttgggtcaaggacgtggccagcaaagagcaccgcatccgacttctcctccaccacgaagaacgcgaacggatggtccgcgacgaagtccacaggagaggttaaagttaaacacaagaacttcatcgtgcaggccgtggccgccgccgcctccgtgccttcctcgttcacctccacgaccgccctgtgcatcaccttctccaccaccaccagctcgccgtcgatcatgccggataggtcgaccttgccgacgtcgaaggcggccccaatccccatccccttcagaacctcgttcatctcgctgtagaacgacaccttgaacctcggcaccctcaggtcgccgaccttgatccgccgtcgccccggccggtggtcacgcaggaaggaggaggaggccgtgccggacgacgccactgccatcttgtcgacgagcgccggcaggccgtcgcgcgcgtccggcaggaagatgtacatcgacaaccccacgttctcgccgtagtgtttgaggatggccggagtgatgtcaccaccatcgccatggttcttcatggtccggtggtacggcagcttgagcaccttgaagccgtcgtagaagccgatgtactgatcctcccggctgctcatgaacggagcgtcgacggagctgccgtcgaggcggtggaacttgccggtggtggttctctccctggggaagggattggaccatttgcccttgaagtagatggcgttgacgagcacgagggcggtgccgccatgaactgatccatctgggaggatctcgcggatgagcttgttcgtcgccttggacacccacttgttgatcttctttcttgaactctttggctgcatgtcaaatttacacaccccagatcgatcgaatttactacgaaatttcagaaatcgtcaaaccgaaataatatatatcgaaacctggactgacctgtctttggaagtcggcggcgcggtaggccggcttcagcgcgagcctctcgtcgtgccagacgccgcaggcgtaggagacgcgcggcccgccggactcggactcgtcggcgaggccgacctccacggcgcggcgtactgactcctcgaggtcgtcgagcgacgcggcgccgagcagcgcgacgagctcgtccagggtggtgccccgtgccccggacgccaccagcgccagcgcggcgtacagggacaccggcgagaagacgacgttcctgttgctgttgtcgccgtcgtcggcgagacgcttcgccaggcggagcgcgaacgccgtcaggccgccgcagttgccggcgtcgtcttccatggcgatgggatggcaatgcaaccgaaggtagatcgtgcaggacgtaaagccccaagggtcgttgtgaaacgtacgtacgtacaagttattactgtatataagtcggtgcgcatatatggcagatggaagttaattaagatatattttccccttaaatttgcagaatatggagaagataaaactaccaaattaaccacgcataatttcccttttactattgtagccgcgcgcctcatcaaaggatacaggctagatttaatgctgcgcttcgaagcacacgggccgagagtcgaaaagaaagccatcgtcatcgcggacggcaccaatatgatattgtgtcaccactgcacaacatcatattggtgccggctagaaatctcgtgtaggtgccagattcccaaccagcatcatgaaagaggtactgatgagaggggattttctgtgccgattgagaacaaaagcgctcaacttaattagatctgatgctttaaatccaccaaaggtaataaaatcgcaaaaaaaaagagtcacaaaatcaacggcattccatcctaaatcattggaatcaacagtagtcaacttggtgcatgactgaattcattcgtgtatgagcaacaaaaaggaagaagtccgacgtggagaagtcctctgcctgctgtaagtggagaagtttgttcgctcgccggatccaaggagagagggacagaaccgctacgtccgaaagaaggggagagagccgtgccgtcgagtggaccgaatcgataggatcggaccgccaccgagatcgtggaggccagaccccgacaccccgtaccactaacatccaagtgaccggatctgacaatccacgagctgacccaagtcaattaatacaattgcgcaacataaaaagtgttaaattatcaaattcattgctcggattcggacaaagagaggaagagggaggcgacttattgcattccccgcctattgcattccctctgccagtatgtaggcctggtaatgggtagtggcccaccccgaaccccacccctgcccatttctatttatatattgcacccaaaccccaccctaacccactaacatgcatatttagcacagaccaaccccaacctgtaaccttcttagtgcttgttgaaccctaaccctttgtgaacccttggacaacccataaacaatgaagggactaacccattgggctcagcacgacagcacgtcaaccgtacaacaactgtagagccttcgcacatacatgaaaatgaagctttgtatacatgcatagcacagctatagggagtaagacaaataattttcagataagttaaatagagattaccacaaactaagccaggtttaagtatatgactgaactttcttaagacatacacaatagtttagcaaaattaggccacaaataggcacgcattgaaactaataaacatctatgaatcatatcagaattttttcattcaaaagtactagcaagatctattgatgcttaatctcagccttcctcttatgccacagcttgtccagtgcaatgtttccatctccctgtagaaacaaaatgaggttagaagttagaacctattgaaggaggcatcagtacaataatccatgttcctatacttaagcaatggaaattcagaattgctttactcctaccagttgcttaatcattcaccaattcatagtctatcaagttacaaacagaattagaagttgcaaaatcaagttgaacacaggggttaaaaacatttatcaccagtttaggtctatgttgaggacagaacaatccggtgcaacaataaatatatagtgcagatcaagctacatctgaatagatatgtaactctaagtatattacttagaaacaaattgaaaatttatactagttgacatcaagtaagttttattacagtataaattaaattacctatatagcacaagaattcacttaggccaaaaggacatgcagtaacttgtagccacacaacctctaacaaatagcatgcatttagcatcagcctaagtatattcagcacaatgcgccatctacctaagtggcatgaaaaaaatgtatattcagcactcaaaggcagaatatcagatccttgtatcctcaaattcagatcaacacatggccaccaactttcagttaatctcaaacagaagagcagctagttcgaccaacacagtttcagattatatatgtgtgtttatttaaaatccaagatatatacaacttaatgtattacaagttgcagaagtacaaatcattatatgcccagaattttctctattatagattcctaaaattcaatatgagttacagttaacttctcggaataatcatcacaaagaactaataatctaaaacatgatattcgttagaaaaatcatttcagtgtcagtagtacaactgaaagtggcaaagaaggcttttgacacaaagagggactagcaagaataacaatgccttgaaacaatattcgttcctctgcatatacttcttatttaagagaatcctatgatctctctatacaagcttatacattatattcaatgtctaatctaatcctaatagctttttacaagtttgtactgtgaatcggcaaacaaataagcaatccctagctggatcaacaatttcaacatgtgataaagatttgcttcattcagatgttagcagagcaatctaatctgctgcaccgaaaccaagaacaaaaatagcaatgcctgtagcaaagaaaacaaaccttggttgcagaaaccgacttgcagagaaagggttgcacggtgctgtggatctcgaacaggaggcggaggcgacggaggacggcggcgcggtgctggatcttgaccgggaggcggaggaccgacagctgatggaggcgtacgacgcgccggcggacggggtggcgcgatctggatgggaaggacggagcgtcggcgctcgcggacagggatcgggacagcgacggaggatcgcgacggggagggagaggaggaggcggaagcggagggggagagggcggcgcaaggcggcggcgggcggtggccgccgatccagtcgccgagctcctaccgctgtgggttctcccacaaagaagacccttttttactgcccatgggctgaaccccattctgagctacagtgtccagcccatcgtaaccctcattttatatggcccaacccaaccctgcccttatccttcctataacccatacaagacacaccattttcaacccattattgtttcaacctgtacaacccatgggttggccagcccattaccaggcttaccagtatgtgcaaatgaagtagagaagcagaggatggagatcaagttgctggttagccacgatctcgtagtacatgatgcctgtaagaaaatctattatatgttctagcatgttgttcgtttgacgtttacttattcggatttgctaactagctgtcgacagatttccgtggtctgcatcatgcgattttttggtcgttagatattctttgagatgtgtgcttggatcggcccacatgtggcaaggtgacatgggctctgtagagcagagtcaattgggccctgcaaggctgttcaattttgatttttgtgctgctcgcaagaccatctatacatttatcgataaattttcttcaaaaaaattgacagatgtaattatagtataatcgtagtgtaattacactgtaacttatatgtaattacactgtgacttgcatataactacagtgtaatttgtatgtaagtttcacgtaattttgaatcgttagatctattataagatttgttgtggtgagaaagaaaaaatcgcagcacacacatatgtgaaaggatttgtttcaacaacctccattttaccgaaataacatcttacagagagatttttgaaagttacatataagttacattgtagttacagtgtaattacatgcaagttacaatgtaattacactataattatactgtaattacatctatcaaatttttgggagaaaatttatcgataaatatatagcaaaattgtttgttcaatgtggctaagatgatttttgggcctgttaatgggtcttggtaaaagtttggttgtttaatctggctttagacaatttttggatctgttaatgggcctcgggtagttggcctcggtaaagggcaggcttgctatcccctttttttctttttatatatatttttgtaattgtttttctgctgaaacatctgagccgtttggtgttgatcccgtggctcaaaaatctgcatgatacaaccccttattttctgtcgaatcataaatagacagtcattcttactgacactaccggaaagtaaagcatattttatggttactgaaaacattcattccattgatcgacgtagacggggtgaccacaatatttgacgatttttttttttacaaaaacattcgtggactaatatcttgacttgagctctaatcttgcgcccattatgtttttacttctaattgtttatttcgagcattgtcgaatgtagatgcaccggaattcagttggtggattttgagttagaagaagtagtggccgtgtttcagttctttgaccgagctggagacgtttcgtgggatagcacaaattcaggatctagctgcttaatcggtcacagaataaatagaagaaaaacagaaaagctgcaagcatatgaaacatcagttttcgttagatactgttcaccatctgaaatccatcagttttcccgtgagcgagagggagtgatcaaatgcattttgcacttcagatgtagatgaaataaaggagcaatggttctcgtgtgtatgcctgtacatgttaccaaatagttaaaaaaaagtaggttaaattcgctctagattagaattttttttattttcggcgtgtcgctgactctatcattgaacatgccataacagctctattattctatagactattccattcgagatttgctccggcccaacaaaatcattttcaattgttagatctaataatcataacccgccgttgtacggcagcttgagcacgttgaagccgtcgtagaagccgatgtactgatcctcccggctgcgcatgaaccggacgttgacggagctgccgtcgaggcggtggaacttgccggtggtggtgctctccctggggaagggatcggaccacttgcccttgaagtagatggcgttcacgagcaccagggtggtgaggcgatgaactgatccatctgggaggatctcagggatgagcttgttcgtcgccttggacacccactcgttgatcttctttcttgatttctttggctgcatatgaaaattttacataccaaggttgatcaaatttcagaaatcgtcaaaccgaaaaattgggagccgcttgaactgactgacctgtcttcggaagtttgcggcgcgcgtcacggccttgtaggtgccgccgtgccggcggcggcggcgcggtaggccggcttcagcgcgagcgtctcgtcgtgcaagacgccgcaggcgtaggagacgcgcggcccgccggacgcggacgactcgttggcgaggccgacctccacggcgcggtagacggactccgcgaggtcgtcgagcgacgatgcgccgagcagcgcgaggagctcgtggagggtggtgccctgtcccccggccgccaccagcgccagcgcggcgtacagggacaccagcgagaacacgaggtttctgttgttgttgacgtcgtcgccgttgtcggcgagacgcttcgccagacggagcgcgaaggccgtcatgccgtcgcagttgccggcggcgtcatccatggttcttgattggatggcaacgcaggcaaggtcaccgtacgtgaaactcaaactacaataacggtgcgcatatatatggcagatggaaattaagatatgttcccttgaatttgcacactatagagaagatcaaataatcaattacccaattaattaaccacacaaatttaaggataataaaatggttgggcccagcttaagacctaggttttcctttcacctgtgcagccgccgcatgcaagctacttcgaggttcgagctatatatatgcccaaatgggtccaggcacgaccaggccttggccgatatcagtcaggccggtacggtctgacctacatgccaggccgggctgggcccacccacgggctgcaccgatggtccaggcatgctgaattagactcgggccattgccgagccggcccgaaggcaccacagtctattgtacttctttatggataagtctattttcaatcatcaatctctttgggccgtgtattatacagctggactaagtctattttgtatcccttttatctttgggtgtcttttttgagtccctcaaccatttttcttccgtgctcattgaaccgtgctttgccaagctggcccaccgtgctgaggcatcgatctaggcatgacccaactgtcggactgggtcggcatgggctcgacaccagtcatgccgtgttgtgcttggggcgggctgtcgggcctcaagctttacggccatctatacttggagcttcgtcgagaagaaagccaccattatcgctgaaggcccacacatgcatgccatgtttgactctcctgttcttcaacatatttggttagggaaatttgaaatggtgaattagtcgctctgttccatacaagtcaaatataagatgcttccattgcctcgaatccaaattcaaatctccaaatccaaattagatcaccatcaagatcgattgatatcatagaattgtgaacatacacaaaatcaacaacaaaaacatccacaaatcaacaaacccgtgggtagtgcacttgacgacgtcgagtgaaggccaccgcccgccatcgccgccactattgaggtcatcgagagcatatctggtggagggctccacgcgggggctagatccagaggccctcgagctcaggcccgttcgatctggcatcggtgccaccaccctcgccgttgccgatgaatccggcacagtaggctggagagaggcggggcactggccatcgggtgccgggtgatggccatcgggcactgaggagagatgccggcgaagaaggagagcaggagaagtggggatggggagagggagaagttaagtgggagagggaggagctgaggataaggataaggtatagagaggagctatagatatttggctcccacgcaattttttttaaggtccggttgtgtcaaattttttttaaaaaaatgatacgataacggtttttatctaaaaccggcactatatgtgcttaaaggtgccggtttttttatcccgtgaaagattttgtagcagtgaattcagggttgaacctatggaagaggaagatttacgtgtttgcctacctttattgtcctacgcctacccgtaaagcgagttcctgaagataatatatttttttcaactatccagagtttagagccatacaaaacattaatgtttatttagtatattttacctgtttaccatcttctatataattgataatgaaataatcttatttaccatgttttcatattcaaattataatttataaatcttttaaatttccaatgtcttgtggatttatgtctaaaattttaatctcaatatccataattagattagatcctcactgtattcaaatttcaaatcgctacgtataacggtattcatgctaggatttgagcttttattactctcttttgatagtgtagatctgagaggactatgaaaaaaatatcagtaccacagcgtacgtttttttacatatatatactacttttaaatatttcaaaaattacatttgtgaataaattacttttgatgaattaaattatacactcctgaattgaaatttttacatactttcatttatgacttaagctaaataatcaaacaaaataatcataattaacatatgaatgtgcctaacaagtttagaaattttaaaacattcctgaagatgggacttatgataagcgagctgagaaatcctccgtcatcagaattcatgttcataaattaaatatctcattgcatcaatcaatccacatcagccgttttcatcatccgttcacgaaatcaccaacttaatcaacactactcatacatctcataccaaacatagcaaaagtaatactaatatataattatcgtccacattaatttaactatttcttacttaatcactcaagcaaaccacacctaaacctcgaaaaaattacatcaccaagagactatacactgcactgcttatcatagacacacgctaacccagccaaacaagtcggcgccaccgccacgcacgccacgtcgacgctgacacgcggacgaacaccttgctgctccgtggcccggtcactcgctgccaccgccgctggcagcggctgcggcggcggcgctctcggcgacgaactcggcgatgcgtatcatgaggtcgcggccgtcgtcgaacgccgggaagacgtagaaggcgtggatggcgttggggtactcgaacaccctcacgtccttgcccttgccccgcagcatctcggcgtaccgcctctgccagtcctggagcgggtcgtagccgccgatggcgaggagcaccggcgggaacgccggggagtcgacgccgggggcggcggacggggcggcgaagttggccgcctcgtgggtgcggtcgcagccgtcggggaggaacgcgcgccacatccagtcggtgcgggagacggtcacgatgggcgcgccgtcgaggcggagctccgagtccgtcctctcctcgccgccgaagaagggctggatggcgacgaggccggcgacgcggacgttctcgaaggcggcggcgtcgcaggcgtagcggcgggcgacgtggtgcgcgatgttcccccccgcgctgtcgccgccgaggtagcatcgggcggcgtcgagcggcgggacgcctccgccgccgccgccgtggtgattcttggggtcgtcgaggtagcgcagcgcggcgatcccgtcgtcgtacgccgccgggcagcggtgctccggcgcgcggcggtagtcgacggacagcaccgcggcggacgcgtaccgcgcgatacgcctgcacgcggcgtcgtacgccgcggacgccgcggagaggaacgcgaacccgccgccgtggaagaagacgatgacggggagagggcgaggaggaggaggccgctcgtccttgccggcggcggcggaggggtagaagaggcgcgcgcggaggcgggtgggcgggtggacgaggacgtcgcgggaggcgacgccgcggcacggggaggagaaggccgggacgcgcgggtcgaggacggacagcgcgaggcggttgagcgtgccgtcggcgcggcgcgtggcgtcggtggcccagtcgacggccttgagggacagccgcatcaggcgggacatcggcggcttcggcttcgtcctccgccccagcggcgtcggcgtcgtgtcgtccgacgacatggccgccgctgccgtcgccgtcgtacgtgtcgcgggcgcgatcggtggagagaccgagtcggggcacacacgtatttatgggggattggacgtaggagatgggggtgagtgtggtgtcgcgtcggttgatagctacggatggttttcgtgtgccgtattgccaattgggtctattggctattgggtttcgtgttgaatttttgggtaggcacaaaggcagctcgcaacaaccgtggatggctattaataaaaaagtatacggaactgctaaaattgtggaattaaattttaaaatatacattatttttctcgattttgtatatatatacatgtgtttgaaaattgtgaatatggtttagtccaattgtgaatatggtttagatttagagacgaggaaaattacaatgtaaattttaaaatttacatgtaagatttgaaaattacaatgtaaatatataagagtttcatggtaagtacggtgtaattgcaatgtaagagtgaatgtaatttagtgtaaaaatgatttaactattttttttatgaaaaatatgacgccataaatatagctactcctgtatacatcagggttatcatcgtttggagaacattagttatactattggtcgaagccagtgatgaggacacgactagcttagatataaccatgactaccttatgtattaatcaaccaaatgtgcatatgttctatattagatttacttattatatatttgaacaaatgttgctacacaatgagttttgtgtgttttcgtttgcagaggtacttgcttgggcgaaggaaaagaagttgattggggactaaatcaagaccttctccaagtttacttctacctcaccatgtcacttttggtccatagaagacaagggataaaattctacatattttggattcggattcgggccttctgacagcatcaacttcaaacagacctagccgctgatttagaaggaattttggggctcatgtgtacttgttggaaagcttatggaatctactatcaaatggttttggtcccatgtcaaaattcctaccaagctgccaggaatctacaaaacaagccacgtatctcatccagtccgaatctgatttaggttttgggccttttagttgtgtcgtgggcttagcccaaggggttgtgcaccctaggccaaccctaggacgtccctaatcatacttaatcagtagccatcattgtttagagtcgggtttcgcttagattattctgtcgagaacagtttcgccgctagatcggtttgtaagaccccaacttgtaagcttaatctttcacctgcaattttggttgtattctaccttgttcttgtttgtgttcttcgattggtaaatagggattagtcttctcggtgaggtcatccgcgtttcgacacgggtgataaccagaggagacgtggtgctgcgattgcggggctcaagagcatgtttgttcaagaagccggatcaatttgtgtcgcgactccgctcaaatcgttggttatcagaacctttcagaagattgggaaccctagtacacatcagccagtgttgcttttatatatcaatatctcacgagtataatatttgaaatgacctaatctagtctttgtaagcttaacagtatggagctctcacatgtgatcgacgtcttaatagaagtgcaacattacacagatgtaatatgttccataactactaatccgataagcttatctaaattacatatatgcactagattgcatctatattgggacggaggaagtacagtaagaaaatggccatgaccgttgcaaatatccctattttgatccagtaacagtcacagctatgcccgctcaattgacgaagtctattgtggttttcttgtagaggcaaggtttgaagagtggtgaatttagaggtgatttacacaatcgtcgcgtgtgtggatttgtttacgttgaggtattattggaacaaaattaaaggatcggggaaaacgaatttgaagaacaataatttatagaaagggagggaacaaccttgatggagctcccatgacgcaagtaggaaagcaaatgggtagttgttcgtgcagctgaacaagacctgagctgcaaagcctgcgaaaccaagcaacacttcgtttcatgtcttcttaaaaatttaatagcacttgccaaatgaacagccccgtcattacgcttatacttacgtttatccatatcacttattaccaactaaaatataatttattaataaaatttttatatacaaacaaatatcgtaacttaaactacgatgaaaaaccacaaaatcaacttcataactaggttataaactttaaattttgacttatatacataaacataaacaaaatagtggcgcacaaaaagaaatgaaattgtatatgctctaaaacctattgatactaggctgaaatttttacaaaagaaatgttcaagctaaaaccgctaaaaaatgaattgtgtaaatcttattgaaactctgtaatattcttttttttctcaggaaagaaaaagaaaaacaatttgccggtacttcctctttatgggcatccatactgatactccaaccatgtttggtgaccgacctttcctgctaacacattgaatgaccgggaattttgttgaggaataagttcaccagccgtccctcaactttacgtcgagtctgtataacatcctaaacctcaaaatcagatatgttcacccctaaattatacaaaaccgtgcaatctcggtcctatgacagtatagatctctggttttgctgacgtggcatactagtcagcaaaataaaaaaataaaaaatgatgggaccctcatgtaagtctcttatttcttctctttttctcctctcctctcttctcttctgttttcttcttctcttcacttctcttcagcgatggcggcagaggcagagaggggacaggcggccggcgacctccgtcgcctcgagcgcctcgcgacgggagggaaagggggagaggggaggcggccggcagaagatggcggaggggagaggcgcggcgacggcgccatggccagcctcaccacttgtgggtcccaccgcggaagggcgcagccaccgctgcctccggatgatgacttggaccgccttgtaacaccctgaaaattcgacaaataaaacgaaacctgaaattaaagtactttcaaaaacttttaaataaattgcatcatgccgatgttattggttcttttgttgtgcatcatggtggatgttatggttgttattgcttgccaaactataaaatatcacaaatgaaaattaagctaaagctatataactacgtaaaaattataaagttatgatatttattatgaaccctacaaatatttatgcacaacacaacaaagcaatacaaagagaaggttaattactaaatcaatttataagtcaaatattaaatgctacacatgaaataatcgccactacgatgattctatatataaaaggagcgttccactagaatatttacattaatatttataatgttcattgagtctctcatggaatagaattcactcacataaagtaaatggtaatgcaaataaattgagctttatatatataatatgtttatgtgaatgtctaattaaacatttagatcaatatggtaccaagtctcaatttacttttgtgaaataaatagattaaacctatccatgtgtaaatacattgttatccaaattaactcgaccaatgtgccattgtattaataaggtgatattagtatattctaattaataaatgtccaagcctacaagttatataataattatgttaaaccaatacatggtgaaaacgaataaataccgaaatcccaaaagtataggaaatcataaaaggtatagtacaatttaaaatttttggacaatattaattttgaacaaaattcacatttgaatactgcatattgtcgttaaaatgcattggtgaaaatataaattgaaatagccctctttcctcaatttataaaatcaatcaaaaccctaaatttacagcctggcactgttcattgtgcgccaggtgttcgactcgggtctaacccggccaaacacccagcgcagcatccgcctccccgtgcacgcgcgcgcgccctccttgcccgtgcaccgcgtaaccacgcgccgcaccgcgccacactcgcgcgtgggccccgccgccgaccgagccgccggaaacccgcgccaaagccgcgccgccacgggagcgcgcgtcaacaacgtcacgtcgcccatcgtctcggagccgataggtaacggccgtgacgccaccccacatcacccctaaaccctatccaaccgccctacagccggaaatccccctctcaccgagccgccactctgccgtcgcccatgtgcgcgcgtcattgccgtcgcatccgtgacgccgcgccacgccaggcgggcccgcgatcggaccccggtcaagacgccatcctcacgaaccttccactccaagggttggggagcgaaccgagtggataggcgcgctgccgtggccacgtccgccgcctcatccacaactaatgattactagcgcccttccttgtgtacgatgggtaaaacggagccttcctctctagctagagctagaacacacagtataggggtcatagatgcaatgatctactacagaactttaatggaaaaggagcaggaaacatagccgcgtcaacctccctaatctaggccgtatagacagccattgagtgcaccagctgccgatcttatcctccacgccatcctggcttatccccaagccaagccccctaaaaactccatccttatctgccttttcctcgaatacatttcatcgaacaccttgtgagcatgtttcatcatcactggttggagccgaagccggcgtagctgactgcgggaaccgtggctcgggacgcctctactgctgctgctgccttggatcaacgccgggtgctgctggaactcgaggacctgctgacgaacggctgcgcgctcgccgccgtcggcatcctctgcttccttaccgcctccccaccgcgacgccgcgtttcgccgactcgccatcccacggtgagccctcgcgtccgtagcgtcctctaccctactattagctagcctcggttcctattttagcgattagcacccatggccgtgccggcccggctgctgttccgccgccggcgaggtccccgtggacatgctatcccggaggctttcccttccatcttgttaggaaaaatggaatcaccatacactgtagaagctttcgcacccatcaatttggttggaacctagccctaccgccctatccccttgcaccccggagctcggccatggcggccatgccgcgccgctcgcccccgcgccgtcgtgcgccgtggctgccggcgggaggtcaccggagattcgcctcatcctccccggccgcctctgtgccggcctcgcgccgtcccggcgtgcgcgctaggcgcatggcgcggctgcctctgcctggcgagaggtagaagacgacggggaaaaaaagaaaggaacgagagagagagaaaccgtgtggggcccacatgtaattagcacacagtaatgctctccctaatggttattagcccactcaatgacatgtggggtccctgttattaaaatctaagaaaacttaattatagattttgtgtccatgacagaggggacccaccggcaattatatgaccggcttgacctcagtcaacagggggccggacccacctgtcagtagcacatcacatttcccttagtagaataaagataaagaaaagaaaataagagtggacctacctgtcagtcactaccacttactgttaacgctgcaataaaaataaatcaattatgaacagtactgtttcacaattattggaattaattcaaatttgaatctttaaactagcataactcactcattttaactcggattcgaatgaaacttgaacctaaatttatctaaaatcaagatctaactattggtaccactttatcaatttaatttgtactgtttgaatttttggtgattttatttgaattctaattgaattcaaatcaaatctttcgcacgtaaatttagattccgaaggagttgctgagttaatcaaagatccgggtcagcaaatctgtgagcaaggcaagtcatcactaatctttgagcatgttggacctattgcgaacttattttgatttaaataaagtttgcatgctatttatatgtgaatatcctactttgttatatgccatacctttgatattgattatccatatgtcggtgacatgggatcaggagtatcatgactagaggtttgaggcagacacaatcgcacacgtggcctggtacccccgagggacgtcgggcccgagggtgatgcgttcgccctcctcttagtccccccgagggggtggggccgcacccccctcggccccgagggccgaggcgcnccgacccctcgtgggtttttgctccgcgtatgggttaggtgagnacagtggggctcacctaaccacatttattgcggtttggctgagcgtgtcacgccgcatgtaacgcagtgcagtgcactcgtttatccggtctgtgaccagtcacagaccggtcagatcgcgggttaggtggcgacaggcgatctgacgcacgcctcgccccatcctgtcaggacgagggcttctaggcgctcgtccccagctggagctagcgtgttacctcccagagatggcacgttagtcctggtcagatatatgccaggcttcatcctaaccattacaggcaagatgttgtgtgaagaagggcgagcatgtagattgctaagctgacacgtggtggacaagaatgaccgtcgtgactggtctgataccggtcatgttgtcagcagacagccacgattccacgtcgcacctgctcccggcgaaagtggaggtagttgtgggccgtctcatcagaaggtgactcggacggcaactatacaaatctccgtccatttatgaaaagggggggtaagtccccacaaaaaagagagaaatggtgcatgtggtgtccccttaagatataaaaggaggaacttgcccactgagaggggggactggacttttccagattagaaacccagaacaagggagaggctggctgatactttgtagctccttcatacacagatctcccaaaacacaggagtagggtattacgcttctcagtggcccgaacctgtatacatcgcccgtgtcttgtgtgtttcctgtctcgcgagccttccacatacagagagcttagaatctctccctgagtccccggccgaaccggcaaaggggggcctgcgcggtctcccggtgaggagccccacgctccgtcatctggcgcgccaggtagggggctctgcgagggattttctgagctctcgcactctttcgtgtgcgccaagcttttcttgttcagcccaatggccgagccagcaaaggcgcacgacctctccccgagtatgagcggtgacgacggggagccaaacccacgccgtcgagctcgtactccaccgccccctccacgccaaagtcctaggcgggagaaggcgctcgagagggccgaaggatccgcgacttcgacacccacaggaggtggagaagggcggcgagatggggagcgtcgcctcctcgtctacggcgacggcagcacgccccagggcgcgctccaagctgcgggcgcgctcctacgtcacccgcccatcgcccatgacccggagtctccagcccaacgttggctggacgatgtggccaaattggtcatgactgcacggcagcgcctagatgctggtgggcggtcctccgccaccaaggcctctggtgctgctaccaccggctccgcatcgtcaagacggagggcgcggcgagcggcagccgctgttcgccattcgaccgccactccttcgtcaacgcctccgacccgggaagatctgcgtggggaaccggatgctcgcatcagtatcgagcgccggcgtaatggccgacgtgctccccacgcaacggagggcgcctcctcgtccggagtgtcacctcaccacggacgcggggatcagccctccgtgcccccggttggtggtgtcttcggaatgtccgtcaccacggacgcggggatcagccctccgtgcccccggttggtggtgtcggctgtagagcctttgtggcgagccttcggaatgtccgttggcccccaaggtgccggcccaccatcgccgaaaaatatgacgggagcgtcaaccccaccgagtttctccaggtctacacgaccgggatcgaggccgccgggggtgacgacagggtcatggcgaatttctttcgcatggccctgaaaggacaagcgcggggttggctaatgaacttgccacccgcgtctgtccactcttgggaggatttgtgccaacagttcaccatgaacttccaaggcacatatccgcgcccaggtgaggaagcggacttgcacgcagtacagcgaagggatgatgagtcacttcgctcgtacattcagcggttctgtcaagtccgcaacaccataccatgcatccctgcgcacgcggtgatttacgcgttcagggggggtgtgcggcacaaccgcatgcttgaaaagatcgcctccaaggagccccagactaccgcggagctttttcagctcgcggaccgagtggctcgtaaggaggaggcatggacctggaaccccttcggttccggtgtggcagcttcggccacccccggatccgccgctcagatagggcggcgtgacaggaggaggaagaagaggtcagcccataccgacgacgagggtcatgtcctcgccgtcgagggcgcttcgcgggccacccgaaaggggaggcctgcgggaggcaaaaagaacgaggccggcgctcccaacagggagcgcccaaccggcaagtggtgcaccgtccacaacacttcccttcacgacctcgcggactgccgtgcagtcaaaagtttggctgagcggacgaggaagtgggaggaggagaggaggcaggagcgccgagagggcaaatccccggcggttccttccggtaatcggcgaagtgaggccaagcagaaggcccccgccgaggacatcgatgacggcgatgatgacctaggtttccaagagcctggggccaccattgccaccgtcgatgggggagggtgtgctcacgtttctcgccggagcttcaaggccatgaagcgagagcttctggccgcggcccctactcatgaggcgacgtgtcgggcgcggtggtcggaggttgccctcaccttcgaccagaccgaccacccaccgtgcgttgcccggggagggcagattgcgatggtggtttctcccaccgtttgcaacgtgaagttggggcgtgtcctcattgatgggggagcggccctcaacatcctttcccctgcggcctttgacgccatcaaggccccggggatggtgctccggccgtcccagccaattatcggtgtgacgccggggcacacgtggccgttaggtcacatcgacctaccggtcaccttcggtggatccgccaacttccgcacggagcgggtgaacttcgatgtggcggacctcagtctgccctacaacgcggtcctggggaggcccgcgttggtgaagttcatggcggcggtccactacgcctacctacagatgaagatgccgggccccggtggccccatctctgtccatggcgacctcaaagtcgcgctcgcttgtctggagcagcgcgcggaccacctcgccgctacatccaagcccgagggtggcgaagagaggcttggcgcttccgcccccgccaccccgaggcaacggatgatcacaggcgacgaggtcccggtcaaggaggttgccctgggcgacggcccgtccaagaccacatggatcggtggtcttctggacggcaaataggaagacgcgctcgtctccttcctgcgggcaaacgctgacgtcttcgcatggagaccgacggatatgcccggggtccccagggaggtgattgagcaccgtctcgccgtgcggccgggcgcaaggccggtccggcagaaagtgcggcggcaggccccggaacgtcaagccttcatccgcgaggaggtggcgcgacttctggaagccggattcatccgtgaggtcatccatccggagtggctggcgaacccggtggttgttcccaaggcgaacggcaagcttcggatgtgcatcgactacaccgaccttaacaaggcatgtcctaaggatccttaccccctgcctcgcatagatcagattgtcgactccactgcggggtgcgaccttttgtgttttctagatgcatactctggttaccatcagattcgcatggctagggaggatgaggaaaaaactgcgttcattacccccataggaacctattgttatacgacaatgcccttcgggttaaagaatgcaggtcctacttttcaacgtactactcgaatttctttgggtaaccaattaggacgtaatgttgaggcttatgtcgatgacttggttgtaaagacgcgcaaccaggaaatgttactctcagatctagcggaaacttttgagagtctccgctccgcccgcataaaactaaaccccgataagtgtgtgttcggtgtacctacgggcaagcttctagggttcttggtctctgcccgaggcattgaggccaaccctgagaagatacgggctatagagcggatgcgccccccagcaaacttagggatgtgcaatgcgtcaccggttgcatggccgccctaagtcggttcatatcgaggctgggagagaaggcgttacccttatttaagcttctcaaacgctccggaccgtttacctggacggaggaagccgaaaatgccctcacccagttgaaggcgtatctaagctctcccccagttctggtcgccccggagccagacgagcccttgttactctacttagcggcgaccccgcaagtagttagtgcgacattggttgtggagcgcgatgagaacaattctcatttcacgcttccccaccctgtgccgacttggcccgggagagagcagggaggagaggctcccgagccgaacggtggcccaaggcccccgacgaccggagttggccctctgcccgcttgtcagacggtgctaggagcccccgacccccaggaaggccctgaggccactgtgggaaggccgcacctatcgcccttcgaccccgaggctaaccctgtgctgacccgacccgggaaagagcagggagaagaggcccccgagccgaacggaggcctaaggcccctgacgaccggagttggccctttgcccgcttttccgacgacgccaggaacccccgacccccaggacggccccgaagccactgtgggaaggccgcccctgttatcctccgaccccgaggtcatcagcacagaagataagtgcgccccgcgaggctgcttggacgaagagtgccccagggatgcggcccctagcgaagaagatcggccccaccgaaaggtgcagcggcccgtctactttgttagtgaggccctccgggacgccaaaacccgataccctcaggcccagaagatgctttacgctattctgatggcctcgaggaaactgcaccattatttccaggcgcatcgggtcacagtagttacgtcttaccccctcggtcaaatcttgcataatcgagagggtacaggacgggtggtgaaatgggcaatcgaactttctgagttcgatttgcactttgaaccacgccacgctatcaagagccaggccctcgccgattttgtggcagagtggaccccggctcccgagcccgtctcgatccccgaggccagcacggacccctcgcagctgcctcacaccgcccactgggtgatgcagttcgacggctccctgtctcttcagggcgccggtgcgggggtcacgttgacctctccgagcggagacgtcctcagatacttggtccgcctcgactttcgagcgaccaataatatggcagaatacgagggactccttgccggactaagagtggcagctggactggggatccgccgcctcctggtgttaggcgactcccagctggtcgttaaccaagtctgtaaggagtaccggtgctctgacccgcagatggacgcctacgtgcgccaagtacggcgtatggagcgccattttgacgggattgagcttcggcatgtgcccagacgggataacatgattgccgacgaactctcacggctcgcgtcctcgcgagcccagaccccaccgggcgcctttgaagaaaggcttgcccagccgtcggcgcgacccgaccccttaggggagacggatgcgcctgaccggcccccgaggcctgtcggagtccaggcctcgggacccgaggggagtgctcccaactcccttagattgattgcttggatcgccgagatccaagcatacctcacagataagactctacccgaggaccgcgaagggagtgaacgcgtccatcgcatctccaaacgctacgtgctggtagaagggaccctctattggcgcgcggctaatggaatcctcctgaagtgcattcctcgggaacaaggcgttgtgcttcttgccgatatccatgaaggcgaatgcggagcccactccgcctcgcgcaccttggttggtaaagcttttcgccagggtttctattggccgacagctcttaatgatgcggtcgacctggtccggcgatgtagagcgtgtcaattccacgccaagcaaatccatcagccagcccaggccctgcagaccataccactttcgtggccatttgctgtctggggactcgatatcctaggaccgtttaggcgggccccgggcgggtttgagtatctgtatgtcgcgatcgacaggttcactaagtggcccgaggcttatccggtcgtcaagatcgataagcactccgcacttaaattcattaagggcatcacggcccggtttggagtgcctaaccgtattattacggataatggcacccaattcactagtgaactcttcggcgactactgcgaagacatgggcatcaagctctgcttcgcctcacctgcccaccccagaagcaatggccaagtggagcgcgccaatgcggaaatcctcaaaggccttaaaaccaagaccttcaacatactcaagaagcacggcgattcatggatcgaggagttgccagcggtgctctgggcaaaccgaactacaccaagccgagcaaccggggaaacgcctttcttcctcgtctacggcgcggaagcggttctcccatccgagctcaccctgaggtctcctcgggctaccatgtattgcgaggctgatcaaaatcagcttcgcagagatgacctcgactacttggaagagcgaaggcggcgcgcggccctccgagccgcgtgctaccagcagagcctgcggcgctaaaatcagcgccacgtccgggcccgatcactctgcgtcgacgacctcgtcctacgccgcgtccaaacgcgtgctggattgagcaagctttcaccaatgtgggagggtccgtatcgagtggtcggcgtcccccggccgggctccatacggctggccacgggcgacggcactgagctgcctaacccgtggaacatcgaacaccttcgtcgcttctacccctgagggggggggtcgggtgtcaggtttcgggctcgcgccaaccccgcacccccctcgggcgtgcagggttggccgggggctacaacatatgcatattcttatttctcttatatctgaatttctataaaagcagtttcaatttcctaaaggctgtatctgtgctgttttttcattttgaagaatcttgacttgaaataggtcactcgtgctcaatcctgccctcgggggctcgggtcggctaaaatcgccaaacggggcccagaaccgagccgtgccccgaggcgtggtgaactccgggggggaatcggcaaaaacccacaatcgggtcacccataaccctcggtcaccacgttcccggcctggccagtctcgacatgtggatctccccaggcactagccccgacccgcgccttttgaggaccagaacctgggcacaagcccttattcaagctaagacacaaaaggaccacggcacagatcatcctcatctcatactcacagcaagatgaaattaacacaaaaatttcttcatttttgattacagattaagttgatctatacaaaaaagaggcccgaaggccttagaagaaagaaaagaagaaaaaactgaagaatggcgggggtctgggggctcagtccgatgcgcccggatcgccggcctcgacgtcactgtcgtctgcaccaccggcattgccctcctcgtcggagttgggggcgaacgcaagccgaggggccgagccctcgaagctgtcgacgatatggtcggcggcatcccggacctgcgcgcgcgcgcggtcctcggtcccaggaggtaactcatccagcgccatccatggagagaaattggggtccctggcctggtaactcgccaggacgagctccaccgctccttgggcgaggttcctcgaagatgacttaattgtcttctcgagctcctcggggagccgttggagagccccggccatcttcgagaggcgctgggcgaggcctccctggttggcggcgtactttacggtcctccctctccagaggcccacttgccgaccggcgcaatctaggcgggagacggcgtcccaaagcatgccgggccctacctcgcctgccaagcggagggcttcgacctccccggcggacgagtccagcgcgccctgcagatcggcgatggtgcgttcggcagctgcgaggcgggcggctaagtcgctttcgcccgtggccgccccgccgctgcgcgccctcgcgtccagctccttcgcccgcgcctcgagctcagcggcccgttggttcagtacggccctctcggcgcgggcaccttccagattgcggcgtgcctgctcctcctgcgctgcctcgcggagggacaggttgaccgccagctgttgcgccgcggcctcggccccctcgagagctcgctcccgttcggtgagcgcgtcctcgcggaggcggagcgtgaactcttcttcggcgcaggcagcctcgtgcgccgccagcgttgctcgcggcctcgcggtccgccagatccctctccacgacgcaggcgcgctcttccagcgccatggcgcgcgcctcaagggcctctttgcgccgccgggacgccgcttcggtctccgccgcccgctgttctcgggcagcggcagcgtcaagcaccccctgggcggcgtcgagcttcttccctagctccgcctcccagctcccgtattgaaggcggagggtgtcctgcgcctcgttcatcacggtggtggcaatgagggcagccccccgctcctcctccacttccttggcgatctccgccagcaccttcttacgagtttcaagctccgagacgtgctggcggtgagccttacggcccacctccaccatggcctccaccgagcgtcgcccctcttcgacacgcgcccacgcggcgtcgagctccgcccgctctgcctgcaggacctccacctgggcacttaacccatccaacaccgtggtgtttgcggcggccaaggcctgcagaaggggctctgcgttcagtagggcgatagaaggcgtggggaagagccgccttggagaggatgccacgcggctcgggccgccgatggaagtgccggactcggggatgtcccccggacccggttggtcctgagcgtcgcccgagggagtaggcccaagcgacgcgcccgcggcctcgtcgccagctgccccggaagttgtcgcctgagtgtcgcctgagggagtgggcccaagcgacgcgcccgcggcctcgtcgcgagctgcctcggaagtcgccatcgcctcgtcctggcgaaatccggcctcctcccgagcggtttcctcggcctggcgagcccgggcggcctcctgggcggcctcctcggcttcccgtaggcgatccgcggcctctcgccggtcagattcccgcctgagggcctctgcggccgccggatcctcggcctcagactggccggacttggaatggcgggagggacgcgacgggatctcgctgaaacaaaagaaaaaaccagaagacgaacaagatgggtgagtgaaaactcgcgttgagagaatgaatacagccacgatgggtgagagacgaacctgcgagggggtcggttaaacgaccactttggaggggaaatgaggtttccccgagatggttctgtctcccacatcttacggggccgcttcttcttgcgctccccctcgggctgcgatgttggcgcggccccctccgggcgcctgttactggcacgcgccgccccgccccctcggggaggagatgggggaggtgttcctccctgcttcctcttcccccgggcgtcggcagggcggctgctccccgggcccctgtcgcgggacccagaagcacgaccccctctcggggtagattgttcccccctgcggctcccgcctgcgccgtcgtggccctttggagctcgctcctctgaggccccgaccgccatcataatggtcaggatggaggcgcggtctggatcgctgcagagggggaggattccttggggaatgagggccgcctctacggagttgagattcagcacccgttggaccaatatcttgaagtcctcaggagcccagtcccatctcactccctggtgggtcctcgtgaagtcttcggacccggtgtactcccaggcgccccgagcgcatcgctggagcggcgcaatccgacgacggaggtagtcgccgtacaccatggcccctgtgagcccctgggatcgcaggcccgccaggcggtcgaggacggcgtcatagccatcccccagatctaccggcgcccgccagctggaggcctgcgccgggggctggttcggaagtcggaggcgcgcttcgtcggcgaggggagtgtagaaccagtcgctcttccagtcgtcccacttcttgcggagggcgcaggggatgtagcggttcagcaccggcccccgtggctggaagtagcagccaccgactaccgatggcggcgacaccgactgcacggtgaagaaccaccggaacagccgaagagatgggcgcaccccaatgaacatctcgcacagatgcgcgaagatggccaatgtcatcaccgcgttgggggtgaggtgcgccatctggagatcgtagaactccagaacatccatgaagaaagaagaaaatggtggaaccagccctgccattgcaaaggggagaaagaagacggaccgccccgggtagtctggcgccgggcgtccctcgcccagcgtgactatctcccggccggtggcagattccggcatgaagcggcgcgacagcccagcctgcctctcgctcacgatacgggaaggcggcagcacgctaccatcgagcagagcggaaccccgtgccatggcgccggaggaagagaagattaagagcgagcgcgtgtggcgaaggtagggcacaggaaagaaggagttagggcgcaagacaaggggaataatggcgaaaggaaggaaacagatcccttcctcagtgcctttatactcttgccaacgctgtgcccggctcctcgcttctcgcgcccactatttcgccccctcgtttctcgcgcccacgctcccactaatcccattcgcccgcttgcggcgcatgaggtggatatgcggttgtggcagtcgagatagatcatatcgtgcgcgcgttaattacgctcgccgaccgaagcgacgttaccatatcttcagacgaaacgaatcgccatgtccagattcgtgtgctactcaagtaatgtggcagtcttgaagagaccgctcattgttgacagccgagttaccattgccgatgtgcgtggtttgtgaccgttgggtttctgcccaattgtggagaccggtcccacctgtcaccaggtcttaggagtggcgtcacgcccgaccgtttcccttaaagagggcgatcgccctggcataacgccgggggctactgtcggtgacatgggatcaggagtatcatgactagaggtttgaggcagacacaatcgcacacgtggcctggtacccccgagggacgtcgggcccgagggtgatgcgttcgccctcctcttagtccccccgagggggg

SEQ ID NO: 25727 - DNA, 17741 bp, Oryza sativa
  unsure (1)..(17741): unsure at all n locations
agctagcgtgttacctcccagagatggcacgttagtcctggtcagatatatgccaggcttcatcctaaccattacaggcaagatgttgtgtgaagaagggcgagcatgtagattgctaagctgacacgtggtggacaagaatgaccgacgtgactggtctgataccggtcatgtcgtcagcagacagccacgattccacgtcgcacctgctcccggcgaaagtggaggtagttgtgggccgtctcatcagaaggtgactcggacggcaactatacaaatctccgtccatttatgaaaagggggggggtaagtccccacaaaaaagagagaaatggtgcatgtggtgtccccttaagatataaaaggaggaccttgcccactgagaggggggactggacttttccagattagaaacccagaacaagggagaggctggctgatactttgtagctccttcatacacagatctcccaaaacacaggagtagggtattacgcttctcagcggcccgaacctgtatacatcgcccgtgtcttgtgtgtttcctgtctcgcgagccttccacatacagagagcttagaatctctccctgagtccccggccgaaccggcaaaggggggcctgcgcggtctcccggtgaggagccccacgctccatcaccatataatctttgtaatccatgatatcgtgtgtctttagtcaatatttgacaaatgcttagcccatgctaatttagattcatgcatattcatatttatcaaaatgctttatgcttgggcaattaccttagggaaggtaattgacatacggcatgtggagacatgagcgccacattgctatgataatgatgagatgatttgtgaaagaaaattaaactaaacaaatgttttcgactgaggcggctggaggacttgggtggtgtccggtaaaggctagtgccgtccctggtcagttaaggaccgagccatgaagttaagcatgaatcgaccccagtacatccgtatttctcgaatgggtatagacctagcggagtagatagccgagcggaggcagtatccctgcatacccgaaacaagcagatgtggacgaacaagcagtctactggcggatacccgaaacggatggccaaatggcggatacccgatacggatggccagagactgacttgtcaagactacaagactacaaggagataaccaaaagaggacagcatggattgggttcaactacaggaagcaacgtaggaatgcatgtgtttttcccatcccgggagcgccagaactcctctcgctgctagaaaccgtatacgcctagagtgcatgaggactcaagttcatggagcgggtactgccaaagtgaggttgttgaaaggctttgccgtggcaagtctcattcgttgggacgtaggctcatgtgttaggcaagtcgcggagtacgggtaaagtgtacatccactgaagtatgagtaaaccaatctattcgaatagccgtgctcgcggttattgagcaccgggacatgtattacacttggctagactctaatttcttaatatgatagggaagggatatgcatgatgattttgtaattgtggatcaacttctcaagaggcgagaaggggtagaccccagaaaaccattacgaccagtggcgggaagctatccttgggacacaatggatggtagacagaaccgtcgctgtttaatgaacaatggagttaaaacttgatcagtttatgctaggtcttaggcttatgaaaagaattgcaaaattggctttatgcaaataaaccattagcctttcattgaatatcctctatcatatgcatcgttgttatggtggcttgctgagtacggttggtactcactcttgctatttacaaattccatcagaagccggtgatgaagtctcggatgacccatatgcttactaccaggagggtgaagaagatggcgacgcttagtaggtcttagttacggtcgttgcctgtggcaatggtgtcaccgctgccttgattccgctgcttatctatttctgcttttggatgtattccggaccatttggtcctatgttctaagactgcctgcgggcctatgatgtaataattcgcgctagacaatctatgtatgcgcacttgatatttcagcaatgtaatcgtgagtaccagactacttgatccagggaaatggtactattaacacgagtgattcctgttataaaaatgggggtctacacgccttgacgaggtgtctcccgacgccctcgccttcctcgcgacgggccggcgctgtccgtcactgtgcacgacgcggcggcggcggcggcggcggggcggtccaagtcgtcatccggaggcgcctctgtaacgtgaacacggcggcgcagccgcggatgatggtggtgttggcggcgcgagcagcggcacaaaccaaatgaggatctcttcctccgccatgttgcagggctcctgaccgacgaacaaccgcaccctcttgactacaagttaattaatcgatgagtaataccaagatcttgatctcgagtagcagtaaatgtgatcgaatcaaaagcagcgcagcattggcacctccgccttaccgtccagtgcgacgacaatgtcgtgctcagcgccggactccagcaaccacgccctcgtggaccagcacccgcacccaacgaaccgctccctttcctcctgtgcaggtgcctcgacgtggccgcagagtcatgcatggcgatggacagtgccgtcctgtcgagaggaagacgacggcgtcgggagacacctcatcagggtggtcgaagtcgtcatccagaggcggcggcggctgcgccccctctatgacgggacccacaggcggtgaggcttgccatggcgccatcgccgcgcctctcccctcccctctcccccttcccctcctgtcgcgaggcgctcaaggcggcggagcttggcggccacctgtctgtcacactcggattttcccttcccttaggtttcaaatcactaataaatggcttcaagaatttgctttagttaaccagaagaaaaccccagttagcaatgcatttaataatcggaattgttaggaagaatttttttcgaattctctttgctctgaaaatcactaacagaacttaaaggataaacatcttcctcatttgcctttggtcgtgaattatgcccaattcactctcttctcagtccgcggtttcgttttgcatgacgaaccgtatctgttcgcgggaccgttttctttccttttctaaaacggcaccgcattgtttttccttgttgggaaagtctcccctctctgccaacattgttgaagaaaagcgaagagaagaagaaaagagaagagaagataggagagaagaaggaagagacttacatgtgggtcccacaattttttatttttttattttgctgagtaggatgccacgtcagcaaaccagatatccatactgccatgggaccgaaattgcatggttttgtaaagtttaagggtgaacatttctggttttggggtttagggatgtcatacaaactcaacgtaaagttaagggaaggatggtgaacttattccaatttgttgagacggctgagcagctacgcttatggcccagcttcaggccgaaactctaccccaggccagcccaacaggaaggattcatgtagccattagctagcccatcaccgactggaggtttttttttttaacacattatagatttggtttcgactatttgatatctggttcattttatcataggcattgtcatgaagtgctaacacaatcaaaatgacaacgaatgtatggctcattttatcataggcattggtgtaaaactggatgtcccatttcgaatttgatttctcagcttcattgtagttagacattattaggcatgtaaaaaaaattgtgactgaaatctagcctttgccaaatgttctgttttgtcttttgatgttcaacatggccatatgtaatagagaagtgaagccataaaatatgtttgtttaggaggcaaggcataaaagattgtattaatcagatgacctatattgccctcgaaaactgcatgccaacccaggaaaactgtagcctatattctgatgattcttgatctgaattgtgcatatacaaatttgtggatctgtagctatgtcatcatggattgatgctttctgactatctgttcaagctagaattctggttatcaatctttctacgtttttcattgaagatgtgtattggttcatgcatatacataaaaaaatctgcacgatatgcatgtctcaggtggttaatattcctgtttactaaaacccatttcataacgtaccgttctcttgcattaatcatgaactggagaaaccttttccgctcgaacaattatcactcaaacaattttttttttatgctgtgaacctccaaaaactagatatgtgagcaagtcatgtttgattcgtttaaaaactcatgttcaatagtcttttttttttgaattttggttatttaaaaattttattcctagttgaactcttatttttcgttttcaaatttcggaatttattttactttgtatctcgaattttaattaatctcatattatgttttatatggactattctttcaatatttattttttattctaaattttggttgtttgtaaattacttgaactcttattttattttttccaatctccaattttatttaattttttattccgaatttcaattaatctctaattgtgttctacatggactattcttttaattttttttcattttgaatttcaattatttctaaatgtgtttctatcagaattcttctttcccttttttctatttaatgtggttatttctaatttccacagcgaacgtggtgtcttattttaaaattgttttaataatacaatagacagcggttagagttgtttttaaccttgtttttttaattttatttacaagtattaccaccccgatggagtaaaaagtaaaacatgtaatggagggaagttctttatataatggttacaatcgaaactcaaacttaaatcactacctcatctgtcacaactcacaaacaataaatcatatttattggcaacctctactttttaacaaattattcatacacacgaggtatacggggtactactatgcaacaaagactactccacgcgtcatcttgctattggcgtcatcttgctattggctttaggtcgttagtgcctagtgacacacgtggctggcatgctgcctaatcattccacgtcatcacccactcccacatcacgcagcaccaatcaatcaccacttcacccccaaccacaggagctcgtcctcgtgcaccgcgacgccgacaagtcagtgctcgccgccgctgccgctgccgccggcggcgacgatgtccttaatccggagcatgaggtcgagcgactcgtcgaactccgggaagatgtagaaggcgtggatggcgtcgggtaatccagcacgcgcaccgccttccccttgccacggagcgtctcgcagtagcggcgctgccagtcctggagcgggtcgtagccgccgatcaccaccgtggccggagggaacgccggggagtcaatgccggcggcgccggcgggggaggcggcgtgcgcggcctcgtgggtgcggtcggcgccgggcgggaggaacgcgcgccagagccagtcggtgcgcgggacggagacgatgggcgcgccgacgaggcggagctcggcgggggtgcgctcctcgccgccgaagaatggctggatggcgatgaggccggcgaggcggaggttggcgaaggtgtgcgcggcgagggcgtagcggcgggcgacgtggtgcgcgatattggcccccgcgctgtccccggcgacgaagcggcgggcgacgtcgagcggcgggacgtcgccgtcgtcggcggcgagggggtggttgttggggtcgtcgaggaagcggagcgcggcgaggccgtcgtcgtagggtgtcgggtagcggtgctccggcgagcggcggtagtcgacggacagcacggccgcgccggcgtacctggcgatgcgtcggcacgcggcgtcgtaggcccgcgacgccgcggacaggaacgcgaacccgccgccgtggaagaacaccacgacgggcagcggcttcgtcgcaccggcttcgccaccgccaccgccggcttcgcctccggtggggcggcaggggtagaagaggcgggcacggagcgggatcgccgggtcgacgacgacgtcccgcgtcgcgacaccctccctgggcgcggcggagggcggcacgggcgggtcgaggaggtcgaggaggcggcagctgatgatgccgtcgacgcggcaggtggcgtcggcgccgcagccgacggcgaggacgaacaggcgcgtcggccacgtcatcggcggcgccaccctcttcgtcttgtccgaatccgaatgcatggcctcgtttcggaattcgggacagcgcgctgagctgaatttttttgagaattaatattatttttatgaaaaatcgcaaaagtagtggtcaaccggggaaaatcgcgaaaataggtccctgtcgaacgggtgcagttcgatagggcgcctatcgaacggccagagcgcgactggcgacgagatcggaaggctgccgttcgacaggacctgtcgaacagcccccgttcgacaggcagggctgtcgaacagcccccgttcgacaggctgggctgtcgaactgccgcagttcgacaggatgtccgtcgaactgccacagttcgacagggtcgcgttctccatttatttgtaataagttattttttttaataatatgtaatttattttagtgtgtaagaaaggaaaatatttttgtaatgttatatgtatgtgatttagggttttgataatgtttggtcagaaattgtagtatttatttgttggttaaaatatttgaattatttagtttcattatttgtatatttgaatgataatttgtcatgattcattcgaagggtatgctactgagtaattatccgaagaagtttatgaaatagtactgatagtactaagttaatcgtaaagtgtttctcaaatagtacggacagaacataaatgactaaaagtttaatacaaatagataagtcaaggacgatcagtgcccttcgcacgcttgctaggtcctcccttcttcctacgcctaatctgctcagtgggatatgtcaaattatcaggggggtgcctatctctagctgcctgctgtggtgtcacgtctggcccctgaccggcctccgtctcctgcgtcggctgtgtgacctgaggtgctgcgtgccagtaatccatccctacttccccctggggaggatcagtggaaaagaagtcctcaatgaatgctgtgcgaggggagtaagcaggcactccgtgatgcgtcgacgccgaaccgtactcatcgtctgtttgtacaagagggagaaaccaaaaaatatggcgtagttagtaacgatacatataattagaaactaaagcgtgttattgtttaaaatgacttacatgtgtgctgtgtgtggccctgctctggcgcacgcggagtgatatgaagtccccatgctggtctgttcaacacgttgtcccccgttggcatgtaagggaagtgtgccgacccagatgctccctgcgaggggtgaacataaggcggagtttggaatacctgcggacgtggtggtgccgtgctcgacgtgggtacccctgatccggctgaccccctggtgtactccggtgctggggtgtgctgaaaggaaggacgaccgtgagatgtgtgggccgcttcgtacccgcgacgtgaagaggatggaccactccgatccacgctggaacgtcggggtagtggtggtgatggccgtcggcccgacgtctgcaccacatctgccgcgctccgacaggagacacgacgtagtagtgcggcagcacgtgcacggaagttgcgaaggacactcgtcacgtcgtcagacctgacgactggaggtctcgcctctagtctttgcagcagggtgtcggactccacgtgaacgtgctcaacaaattccgcctgttccacaaataatcaaggcaattaaaattatttaaccagttgcacatttattaagagtatttaacaagatgcacatttgttagaaataatgaaccagttgcacatcatttataaatactgaactagttccacatttatgtaagaaaaggaactaggtgaaccaattgcacatttattagacatactgaactacttgctaactttttaaaaatattgaactagttgctcaaattccacaaataaacacgtaccattgagttgtaagctgatctaggctgaggggcaaacgtgtcagtaatcgctgcctggtgggggacggtgctatctccttgtggaggaaaacacctccatcgtgtaacactgcggtaccaacgaaggtaagctccataataactcccatcgtctggaggtgtctgaagtgccaagttatcagctgcgtgctcccactcttgtaccgtcggctgaaccgtggtcacaataactagctcgtaggaaagcccgagcccctttctggagtacctgcacaacaacaaattcacacatcagaaaaaatgttgtgcagtgatttattttaaaaaatgtaggattaaacaactgtgatgtgaactaacctatgaagactatcagccaaaggacgaccatctctcggagggaagtcctgatacatgcccaactgtttgagaaccctgtggacattgtgtggctcgacgtgcacgtccaccacgaggtgacaagtcgtcctccagagttgcatatctcgcgtgcaaagatccgcgagaccgtgcggtgcacgatcattgacatcgtgctgagtgtagggagtccaccgaacacggtcaggcgtaagctgatcaaagtcagctacaaactgagtgtagacacgacgtgtcgtcccgctaacccactgcggctgtaacaagtagtagttttcattagtcatataaggaaagtttgtgaactagtattcataatgataacataaacgaatttaacaaaaattacctcacggtgtgtccacaaggatcccatagtgggacgatcgtcgatgtcatcaacaccagacctgtacatctctcgcaaaccgtagtttgcgtacgagtcaagctgaggcctcccaatgtcgaagcgctcgtgcgcccacaacataagtagcaacgggcatccagggagtgaactttgcttgctgttcctcacgcaagcatcacacagttcggcatatgtcgccgcaagtaccgccgacccccaactgtactgtggaatctccgcgataggtaactctgcaatctgctccgcaaagtggatgaagtgcttgtccacggagtcagcgtgagttcccgtgaacatcacccatccaaacaaccacaacaggtaagcgactaagtgccgctgcacgatccactcctcctggtcatcagggaagacatcctgtcgaaactgattcaaccaacttttcgtaggcccgtgcccatctgtgagatcctccagtgcaacaggcagcacaccaccaaaactggccagaaggtcatccgcccatccagcattcaccattgttgggccaactgctggcccagctatcggcagccccaacaaataagacacatcctgcagagtgggcaccatctctccaactgtgtggtggaaagtgtgggtctcaggcctccatctatcgacaagagcactcataagcgccgcgtcaatgtggattcgttcggaccttgcacgtgaaggctcgaccaaccgtgcaaatgtcaacaacccagctgctctcagcctacaacatgacagagcgcaagttattaatacatgaaaatataaacaccttgtattagtaaaaacaatatattttcacacaccttggaacccaacgaggatcaatacgccaatattgatccggtcctcgcatctttagcacattgcagaaagttcctgtactaagacgtcgcgatcgatggttcctatcgatctccttgtctatcagctgcccatcattttgatcagccatacctgcagatcaaaaaccacattagtacaatgcacgtatggtaacagtacaataaatgtatgcaacataattcaattaacaaatttgcatgccatttcaatttaaaattacagtaccagcacacatagatacagataagaatagttcagtacatttcaatttanaattacaagcccacgacacatatattacgatattacaagtgcagtgcagttcgaaatttanattagtccaccaatacaaatacatgacgatattaaaagtgcagtgcagttcaaaatgaaaattacaaggccattacaaatagattcgggtaataaaagtgcaagaaagttcaaattaaaattacagacgcactaaacataaattgaacgataacgatcttcaaagtagggagtccaccaaggataatagcgaactaaggattatttttcttcttcgacttcccctttggaacgcgacgaacatcagcgcctgtggcatcttgccctacattgtacatgctgcaatctttacgggaatggttctccccgcaaagaatgcaagctttcttacgacgagaacgatctttcacttcagcttcatccataaggttcttgatcctgcgtgactggcgacgacccttagtatcaactaataaatttgagtcaggaacccaattggcttgccctggaggaggacgagtgaaatcacacacggcacgccaaccacgcaattcaccacgccaagttgcctcccacgattcctttctaaagtagggagaaacaaaaatgtttccatcaacaccccctttgcggaagcagcaagaacatgggaacatggccgatgtaacaggtaaggcttgttgcaattgcatttgcaagcgtgatactctggccacaacgtgcattccaatgtgatgtcagtagtcccaatgccgacaccactcttgtcacgaagtcgtatctcaaataacaactctctattcccagcaggccacactctgtggattcctcccttcttacttttctcatccatgtactgtgtaatagcggggctatacttaacactgggtttgctgaggttcagactagccatggaataccttttacagagatacttctgtgtacccctcgtgatgccctccaggatagcaacaagtggtagaggtcgtgtattcttcataacccaattatacacttcagcaagatttgttgtcatcacaccatacctcaatccatctgtatcgtacaacaacgaccatttctcccttggctcaaattctacccactccgtgaagcacttcgtggcccttccacgcttcctgcgccgagtaatacttggtgcttcattaggaatgggttcaagtccctccggctcctcctgtctggcaactatgggttttttcctaacctcttccatgtgtgtagtggtcaaatgatccagttgctcccatatggcatcaaactttctttgttgattctgcttgcataacttcttgaacaggtccatcaatctcttactcctgaattgtctataaaaattagccccaaaatgtcgcatgcaccatctgctatgtaaatctggccatggcacggactgtgtgacatcttcttgaagcttctgtatcgctgatagcaaaccggcgtgtcggtcatgcagaacacacacatttggtctgttttcaacaacacacattttaatgtgccgcaaaaaccatagccagttgatgtgttctcgctttcaacaaatgcaaaagcaacaggaacgacatggctatccgcgtcgactccgatcgcggttagaattgttcctctgtacttgcttgtcatgaaagtgctatcaacacagagcaaaggaatgcaatttttaaaggcctctatcatgcacccaaatgaccagaaagcccgacgaagaacattctccccatattcattcacctcatcgagaatagccatgtgtgtgcccgggtttcttgcctgcatcacctccaatagtgggggaagattgtgataagaatcctcataagttccaaacctcatctccaatgctttctgttttgccctccaagccttgtcgtacgatatctcatatccgtactctttctcaacgtcatgcattatggtgaaaggggacaaagatgtttttctaaccacctttgaatataccatttgtgccacaaatgccgctgtcaggtttctgtgcaccagacgggtattctccaacaaacacgtatgttgctcaaccctcgaagctacccataaagtgtcatgttgtggcttgtaaccatgcactctccaaggacatccaccctgtatgcacttcacgtcatacgtcgtcctatttgaaaccttcaccctgaactcacgcttctggacaaatgcccacctcttcaccgcatcttgtaagtgacctttgtcatgaaacatctgtccaactttcacctgcttactatcataacaccagtgggcatctaaaccatcgtttaccttcatacgactcattgatatggtcgtccaattatcgggtatgtaagtttcgttgtcccacagtgttgtatcttctccttccactacaagcgcaatgtattcctcgttttccacttccatctgatccactaccgcctcattctcctccgctgcatcaacacgcataggcgaatccggttcttcatcgtccgagtcgttggcctcacgattagtaccacgaacaatgacctctccttgtgtattaccctctactacttcttcccctcgaccttgctcagtccgccaaacattttcagcttgtccaccttccaacggagtttcttccaccacggcatgacttgactcccccgatcgatcaacacattttgtcttctgcaccactattgccaggctatagcctttctcccttactttactaacaaacttcctccaactcccagttgacgcaacctccactactctccactgccatccatgttgacccctcactggccacacggcatttatgacaaatttatcatgcactggatctaccccaaacatattatacaaccaccctaacacgtcgttcaaacccatatgctccggtgcattcagactagtatcatggaaggcatatacagtcaaatccaccccgctatcacatatttgtataggagcatcgccataatacagacgaatgggcatatcacctgacatcctgataaaacatgacaaatagtctcacgtttaatcatttaatcattcgataattaccctattacaacttatactacattgccgtgtactaatttacaactattagtaacaaacaactagtttaataatccaaataaaatataacacctttgtacatattttaacacacaacatatcaataatatgtactaactaagaactaatttaaccgtacaattacttaaatacctctaccaacatttagcaataacaaatatgtgctaaccatacatactaacattgaacaatgcgaaacaattaacaactcttaaaccaattttttattaaactttcatatgcattgtacttagggattactaatgtataccttaacttcactgctggagggcgtcgccaaccctttcctcccggccggcgcctcctctccggcctgctatcccctcccctcgctccctccggtgctcacggcgacgatgtggcgactctcgacggcggctggcgatgtggtcctcaaataaatcgaacaagcatcgcgggctggggagacggggctttaaaccggcctgtcgaacgcccattgttcgacagggtcggtggagggacctgtcgaacgcccccggttcgacaggcctggcggcgcggggtggtgggccctgtcgaactccctccgttcgacaggcgagcgtgtcgaacgccagccgttcgacagggctctgtcgactgcccgtcgttcgatagatgccctatcgaattgcacccgttcgacagggacctactttcacgattttccccggttggccactacttttgcgattttccataaaaataatattaatcctcaaaaaaattccgctgagctcgctttgtcggatgcggaagcgtgtgggttatttataggaggcgaccggtggctgacgggtggggccacagccgccgctctagtagtctagttagtcgccgtcgccggccatatgtatgcaactgggggtaattacggtgacgacgctattaactgcgatgttacccatgggtgcaattagtgcaactactcgtgtatgtagccgtcatttggggagatgcaagtgtacctgcagcgggggcgtgtcggccgtagggcatttcacatttgaccaacgcaacagcacacggtttcgatatatggcgtgtgacgagctgacagtgtttcaatgtgtgcccttatcttgcaacaagtgtctttcaaactgataagcgatatagaaatatcaacaaataataataaaaagataatttataggtacagtatttatatataaatataaatgtattgttcgtggtttacaaggcaaagggttaaaaaaatactacctcagtttgttaatagatgacgccgttgattttttatcatgcgtttgactattcgtcttattcaaaaaaatttatgtaattataatttattatgttgtgagttgttttatcactcaaagtattttaagcatgattcatatcttatacatttgtataaaatttttgaataagacgaatggtcagacatatgtttaaaagtcaacggcgtcatctattaaaaaatagaggaagtataacactgcgatgaaaaaaattcatagaaacataagtcttaagtagaaacaactataattaagtttatttactccctccattttaggttataagacgttttgactttggtcaaagtcaaactgtttaaagtttgacttagtttatagacaaatatagtatatttataatagtaaattagtttcattaaataattaattaaatatattttcataataaatttatcttgggttggaaatattaatacttttttatacaaacttcgtcgacttacgtcttataacctgaaacggatggagtaatttatttttttaggctgacatgtgaacgaacaaatgataataggctactaattatattaccgtgcaaaacttttatctatcttctcttccctcctctagttgacattgtgccgactgtcaccggctaattactacgtacgggatgtttcgttgcgctagttcgctacgaggataacaacataggacgagtagttcaaaaaatcggctaacttttctgtaaacaaagaaggaagtcgtcaaaacctatacgcactaaatgctctacttgataggaattttatctacagaagaaaacggggagaacgttaaactttaattacgtagggtttccctattggccttatccttgcgtacattgattgcagcaaatgcatctactactgaataaccgaaaccacgaccatgattaatgctagcgaaagccgctctgtctttgatcgaaggtgcccacactcatcttgttcgttgtcctcgagtattattcttctaagagcaagttagtacagtccactactaactccaattcatctatagctaatctaatagtcaattcatacaatagttgattactatactattaagaaaaaagtatgaattaccccctaaacaattgcggtcgaccgaattacctcccgtaaactcaaataccagacattttacaccctaaactatttataccggactaatgaccaacaccgttctgagcggttttgatttgagctagtacacgtggcgccacctgtcagcaaaaataaaaaagttaaataacccctaggcccacctgtcatccctctcttcgcccaacctctctcccagccccccgctctctttctatcgccggcgaggagatgggcttaggcttgatgcggttgagatggatgtagaggcagccgaggcactggacgaggcggtcggcgctctggacgaggaagcgcacgacgtaggcgtcggtgaggagttggagcggcggggcgacgtaggcggcgcggaagcacacccacgaggaagggaacgagtcgacggaggcgacgaggacgtggccacggccgttggcgttggcggcgagctcgacggcgaggaggaagacggacaacaggagcgatgccctgatgaacgcgtagagccgggaacgcggcgacggtgtctcggcgtcggcatcatccgtccgcccggcggcgacgcggcggcggaggcgaggcaccccgcggcgcggtgcgcctgagcagctgcaccaggtgatctgcttggcgttcttgcccctgcctcgccgtcgtccgccggccaagaactccccgtcgtcgtcgtcggcgtcggcgtcgatgtcgatctcgcagatggaccagttgggattgtccatcttgacgacgaccggcgtctcgccggcgccggcgagggcgggcttgctgccggcccagaagccgctccacggcgccatgcacgcggcgggagcgagaagaacactcgacgacatgacacgacactcccgccactcgctgagctcccaaaatagcaagctttcactgacacacaaatgcacactattcctggggctccccttctttcgagctgctgccaatgcccatcaaccggagccgcctcaagtcaccacacctccctactctccgcaatgcgatgcgagcagcgagctccactgccgccgttgcaatggcagaaaagctttagaagaagaaggtgctccatcccgtgcggcttcaccgcgctcctcgccggcgacctcccggcgtgcgcgccgccgctgaccgtgctcttgcacttcttcgcagcgctcgggtgcctgcccgagactaggtactccttccgtgccgccccatgagagagagagagggagagagtgtgaagagagagagaggaggggaaggggagatatgacaggtgggtcccacaacttttttttttaaagaaaatactgattgggttgtcacgtgtagtcacgtaggacaaaactgctctgaattaagttgagggggctaattcatccggtattgaaagtttagggtgagcaatgtctggtttttgggtttagggggtaattcggtcgaccacgatagttaatggggtaattcatactttttcctactattaatatatggtcccacctgtcatacatacattgcgccttgaagcctatgctgcagctggctacagatctatagcccgctgctcttctctcttatcttttatcttattaaaatatgtttatagccagcactgttaatgttaatagtgctattgtacatgctctaattcatccctataaaagctgaattctaaacggcacctttaaaattcacgtgctggaaaaataagtcttgacccgactcagtttgtgccggctctgccaaattcaataaagatcaatacatagttcattattattagaactagaagatagcgtgggcatgcatgataggatgcgttgtttggataagtttttaacctatttgttagctttatgccatataatatttaatcatcctttaaaaaatgagtaaatttcacaaaaatatacgtatagttttgtggtccaagttacagagaaccacacactttaacatttggcacttaagtatatatattttggtagtgt

SEQ ID NO: 25728 - DNA, 7567 bp, Oryza sativa
ccagaacctgcgtcacattaacagatgatgaagtgaaaaaataggactcagtaaagagaggaaatggggaggggatggcactgagcgaggtgctcatggagagggagaggataggagggtgtggcgatggctgctgactccgtccgggcgatcggatccagtggagggggaggccaaggccgatgaatcaaatggtcggagagggtgagggaggcagtggcgtggcagggatgaaagaggagaaagggcggcagcggcggctctcgttcctctctagggcactggatccgccggcgaggagaatggggtcatcggatccggtggccccagcctcctcattgggagatccggcgggaaagaagcggcaatggcggcacggcgagatggctggttgagggagtagtggcgccgatggcggcacggcgagatggctgagggagtggaggggttgagggaatggaggaggagggagttgcggcggcgacgacgcacgcgaggaaggaggagggctaggatgcggcgcgatgggaggaggagggagaggcggcgcgcgtggggaggagaggacgggtggctagggtttgtacgagttggggaaatccacaccgtccgttagagatccaacgatcccacgggtgcggaagggccgccacaggggggagcatggacggccaaatcaaccctatctcaagatcggacggtggacattgcgaggaccagcgcttaattaaccaaaagtatggggtatattttgtaaaagacggctgaggtggcacgctaatcttcagccattcccacggcgtttaagtaaactaatatgttgcttcagaatgcttacaatcaaaactcaaactagcttcaatcactgcctcaaacatgtaaaaacaataagatttaatatataaaaatggtatcagtatattaacttagcattacaaatactactctctaaatgaaagttttgctgttgtggaccactttttgataaaatggatctaaacaccagtagcaaaaagtaggcaagttggcatttgtcatttgggagtccatcgcagcaaatttggacaaaaaagcgtcgggccccatgcatgagagaggcagcagcaattaatggtaaaactttaccattcatctaaacaccaactagcaaaactttaatgccaaatcttttgccaccaaaacttttgccaaaaaattttgccacaacaaattgatctaaacatgcccatagttgttgagaaacgtccgagggtctccggctagcttcacaaattggtgtgctagtcggtctgggttcgaagccttacatcttctatttatttgatattagatcattccataatattccttgtacattagagattgtattgatgtgctaacgccatgtttagttccaaagtttttctttaaacttccaactttttcatcacatcaaaactttcctatacacgcaaagttctaacatttccgtcacatcattccaatttcaaccaaactttcaattttagtatgaactaaacacagcctaaaacaaagtaaattagaaaagccactttcagttatctaaaaccataaatcccattttattggtggcctctactttttactcctaacaaattattgacgacctcatcctacaccatgcagtataacatatgcgaccaacacaagtcccacgtgtcatcttactactggataagctcactagtgcctagtgatagctacaatacgtggcatctcgcctaatcagtccacgtcatcactcaccacccccatcacgcaaccccaccccaatcactcactcaccaccaccaaccaaccacagtactgctcgtgctcgtgtcgtgcactgcgacgccgaccagtcagtgctcgccgccgccgccggcgacgatgtccttgatccggagcatgaggtcgcgcgcctcggcgaactccgggaagatgtagaaggcgtggatggcgtcggggtagtccagcacgcgcaccgccttccccttcccgcggagcgtctcgcagtagcggcgctgccagtcctggagcgggtcgtagccgccgatcaccaccgtggccggagggaacgccggggagtcaatgccggcggcgccggcgggggaggcggcttgcgcggcctcttgggtgcggtcggcgccgggcgggaggaacgcgcgccagagccagtcggtgcgcgggacggagacgatgggcgcgccgacaaggcggagctcggcgggggtgcgctcctcgccgccgaagaatggctggatggcgatgaggccggcgaggcggaggttggcgaaggtggtggaggcgagggcgtagcggcgggcgacgtggtgcgcgatgttggcgcccgcgctgtccccggcgacgaagcagcgggtgacgtcgagtggtggaacgtcgccgtcgtcggcggcgagggggtggttgttggggtcgtcgaggaagcggagcgcggcgaggccgtcgtcgtagggcgtcgggtagcggtgctccggcgagcggcggtagtcgacggacagcacggccgcgccggcgtacctggcgatgcgtcggcacgcggcgtcgtaggcgcgcgacgccgcggacaggtacgcgaacccgccgccgtggaagaacaccacgacgggcagcggcttcgtcgcgtcgccggtgccgccgtctcctccggaggggcaggggtagaagaggcgggcgcggagcgggatcgccgggtcgacgacgacgtcgcgcgacgcgacgccgttgcgcggcgcggcggagggcgggacgtgcgggtcgaggaagtttaggaggcggcggttgatggtgccgtcggcgcggcacgtggcgtcggtgaggcaccccgcggcgaggatggagaggcgcgtccgccacgccatcggcggcgccacccccttcttcgtcggcttctccatggccgtgcctctcgattcggacagccgaggtgagctgtgctactgagctaactgaggtagtgagaggtttgtctgatgcggaagcggaagcgtgggagactgggatatttatgggaggagagaggtggctgacgggtgggaccatagccacgctgccggccggggagctctactggcctgtgactgtggtcgtttggtggttctgagagttaattcctcccgcccgcaaaacgaattgatttattagtacacaaattactatgaaggtgccccgcttatgagtggacacttatattatattattgaaagataagtttttttttcagaaattttgtcttataggttataggcaaactaaagtttagataatattattttataataatttaagggttctatttttttttcttaaggtatctttaaaaaccattcagaaacttttgagtaggagatggattaagtacttacgacttttgaattatgttttttctctctagttaataagaaactattgctagttaattatcatacattccatctatatacataccgtgtagtatggccgcaaatgaaaaatacgagtgcaagatactcaaaattcttgtgattaaatcgtctcacgaaggcgcatgatgtagtaataaagggaggaaagcatatgcatggaaaaaagaagaaaggggaaaatgaaaaaagggaggggaagcatacgtacccacgtacgtaggtgcatacctatgccgcgggaggagaggtgggacctcgtagtatttagtttgttctaatatcaatttaatctaacggtttataatattggacgtaccgatttaagtgaaaatcaagtaatagatactttgatttttttttcttagaatttataatatttgccataatttattagagcgccacgtggcagcttgagagtattttaaggaattttaaaggacttaacacatgtaattagaatattaaccgtgcaatatatataggggacatatgtaaaatttgttccagcttcgtttatgtttatatacatgtagagagaaaataattttgtggctagcaagccattagatgtctaattaatagcaattaattttgacacctatttacaattattcagagtagatcttacatattcatcttacgactttgatgattcgttgatcaccaatttactgattaccatgactcgcatgaaaaaaaatatgtacaacttaaggtttagaggtttaggatagctgaaattgatgaactatctaatttatgagatagctatttgagggtataaacgaatgaattgacttctaaaaagttaaaatgttgtctaaagaagacaccatttaaaaacttggaaagcgtgcgaacaaaaatctaaaatatgaaatgggaaaaaaaagagagggccttaaactccctttatcacccttgccatcgttagagttctatttatattcatcaatattgcgctcacatttataacataatgattcctttcacatgtacgaacaaatagtacaaaatccaaatacgacataacacaaatacaatataattattatgtaataaactctcagtttcagcttaaacagaactaagtgttgggaaaaacacaacccatggtgcttaattattcccttgcttcatcacacatttaattttcttctcatgttattaaaaaaattaatcatcttcatatatgatttgatatgtggaaaagcggtagctagcactacagcggttatgatcaccttagatgtttcacacactacgttttgtcacgcgtgcgaaaagtaaaggtgtagacgtgcattgtgcagcgggcaaaaagagaatttcagacgctttatttattagaaaaaaatacatccgatgattataataataggtccgccggttacaatgtaagtgtaaattagttagatttttaaattgttaatttaatgggtacataataaaatggtgtagtccttattttgatacagtacattgcttgagaataatagaccaatgtaataaaaaatagatccgaggatttacataatggggccatcagtttaagtgcacatataaattagttaatatagatcttaaattgtttatttaataggtacacaatataattatgtaaaatttattttaaaatagtgcattatttgaaaataatagtacaatgtaaagagtacaccggtttaagttatatgatggcagattttttgtttataaaattatgattatttagaaaaatatccattatatatatagatggaaaaaaaaggaaaaaagaaaaagggaaggaagtgcacgtatgtacatacgtacatatacctgccaatgtgtggaaggaggatatgcaggaccccatggtatttagtttgttttaagatcgattttatctaacggtgtataatattggaccaatcaatttaagtgaaaatcaaggggtaaatgttttgtttttttcttagaatttctaggattttctctaatttattagagcgccacgtggtggcttgagagcgtttgtaggaagtttaaaggacttttagtatataatagataatagattaattaattaactaattattactcccctccgttttaggttataagatgttttaactttgatcaaagttaaattgtttcaagttttataagatgttttaactttgatcaaagttaaattgtttcaagtttgactaaatttatagacaaatatagtgatattcataataccaaattagttttattaaagtaataactaaatatatttttataataaatttatcttggggcgaaaatattactatttttttctataaacttggtcacatttaaagtagtttgactttgaccaaagtcaaaacatcttataacctgaaacggagggagtaggtaaatttttgaagaaatagattaatacgattttatttataacttttctatacgaaatttttctgaaaagtacaccattttggcagattgagaaacgtgcatacacaaaacaagagataaggccttgtttagattataactattttctttcaatttccaacttttccatcacattgaactttctacacacacaaacttccaacttttccgtcaaatcattctaattttttcaaacttccaattttaacgtggaactaaacacggcctaagtagggaacaattctcaccgaacacagcagctactccctccgtcccattttaaacacagttatgactttccgtattcaattttgatcgtgtgtcgtatttgaaactttttataattaataattttattcttatttgataaatagtattttatacgtgatttatgtttttaatttaaaaatatttttaaataagatggaacattaaaattggacaatggataggtgtcggtcggtgtggccgccggcggcggcggcaaatggttaattacagcgaggtggccattaactgctatctacttctactgaccagctatatggcgcatatggggagagttaatgggagcaactactggtgtgtgtaatgagttcgcagatgcacgcactgtgcgtctacctgctggctgcgggcggccgtgggtgggagcgcgagaccagcgcaacggcaggcagcacacgggttccgccttccgcgcgcggcgccgatggtgtgatgcgccagcgacgcatgtgggtcgcctccagtaccgtccgctaacatgtgggcccttcaaatgactgattctgtaaatcttttgggcaagctccatctccactttcatctctcttggagttggagctcagccaaatagtttcagctccacctaaaatagaagaggagttgggtggagctatctcacagagaggtgtggttgggtttagacagctctacaactccactacagacccaacttgtaaagctaaatttagaagttggagctctatcaaacaggccatctatctagcggttccacgtatccgtgatgcacatcagataacagtgttgtagaggggatatccggatcgaagcacagcacatgatcattctatcatcttgtagtttggatcatttaaatataaggtataaccacccctaacccaaacactaagaaaataattattatcatcttgtagtttggatcatcctaataaatacgatgcatatatccaatagaattagataacatgagagtagaggattttaaaagtaataatttaatggagaatgagtcatagttaattacttacatgtatgtatattctatagtattatggaatattaagaaaagtggttgtgtcataattatattatcgaacgaatggaggacatcctgcaatctcttcctccatctacttgtacgcatgcactgatacaccgcgtggtagagtttgctagaattatctggagtctgtagtctgtacaggtttaacaagaagtgaaggatttcacaccactggcagagaaaccatttttagtcggtccaccagatttcacaatagtttcgattgtattaaaaattaagactaaaaatatttttagtcccggtttgaaagctctgaggaattttttgatcactaaagatctatttatagtctcggttggtaacaccaaccggaaaaaaagatagatataagctttactcccggttgatgtcaccaaccggg

SEQ ID NO: 25729 - DNA, 4386 bp, Oryza sativa
tccgatgaattggtcacaaatttctcatagcaaacacttgatatatataggactaaaaaggaagtaactaatgacacctagatagatgagaactagcatgatttaggactaattagtaaatactattatattattttgatgtataaagtgacagttgtttgtagctggtaataatttggatgatcctacagatttaggaaacatgaatgtagtcaattaatgactatagctacaacattcaaacccttcctaaattgaatcttttcaaatcccaccagatatttcatcaaaatcaaaattaagagactaacaagtttatcaagatgtgtgcacatagttagtgccagtatgcttaactttgaatggaacctctctacaaatagaatgaaaaagcagagcaaggactcgaagatgcatttatatttattttatctttgctcttgagtctaagaaaatcaaactatcaaagggatctaaatggttgcctgtgtcaatctgaagtgctatgagttcatatttttagaagagagaaatattttcacaacacttgcatgaactcaggtgtcaatggtaaggtttgcccggaacttcatggcattttggctcgaacttcgggcgactatttttctagccaggtgttaagtgttagcatgacctttaaaatagttaatagcccattctaacttaatatcccattgcaaagcacgagtaactaaaagaaaaacccacatattatcccatttgaaagtgagaaaaaaccacgggctttgaaagtgataaaaccatgtgtggatccaccatccatcaaccttgagcggtcactctcatacgatagaaattgaatgttttccgatgaattggttatacatttttcatagcaaacacttgatatatataagactaaaaaggaagtaactaatgacaccttagataggtgagaactagcatgatttaggactaattagtaaatactattatattattttgacgtataaaatgacagttgtttgtagctggtactaatttggatgatcctacagatttagtgaaacataaatgtagtcatttaatgactacagctacaacattcaaaccattcctaaacagaatcttttcaaatcccaccagatatttcatcaaatcaaaattaaatcaaaccggccaaaattcaaccaaatcgcctgcttccgcccgtccaaattttcaaattccagatcggttaaaacccaataaatcaatccatccccttgctaagccccgttcacactccacaccccatccaacccccaccaccatgtctcccaagaaggacgccggcctctcgccgccggtggcggcgccgccgccgctgtcgctcgccggcgtgcccgtgctgacggggagcctacgccccgcggagtgcgccgacctgctcggcctggtcgccggcgtgaagcgcccgctcgaggacgtcgtggcggacttcctcgcccgcatccagcccgagcgccgcctccgcttcggcgccgccataaacttcgtcctcaaggtaacccgcccctccctggattggattccccccctcgctcccgcccgcccgcgtcgtctgcttgatgcctcctggttcgaggcgagcgcccgctcggcttaggcccccccccccctccgcgtggtggtggggcgcttaggttttcgaggggttcttggggacgtgttggtaggtgggctggtttggagcgcgggtggattcaggaatggatagattctgaatcaatcgcttttgttggtaggggaattttaaggtttttgctgggttctagtggtgcgtggatagcgatgtttagcggataatttctgcttgtagtgttgctctatagtctatgtgcgatctcctatttcgagaaagattgagtttttgattggggactggttgtttccatttcttgacaaccagctaagctttctaatggtgggttttgtattttcagtggaacagtagatatgttggttgcttgatgaggtttttagtgttgcacagcttgattacctgtctattttatcttttgaggtgcagttgcaagcccaatcgactgctgtcttgctaatttttgcgttttccttagtcacgcgataggttgcggtcaaaattggtgacggtctatgtgttgaaatggattttgttagtgggtaaatttgtacagcatgtgttcttctgttgctcaggccactgttgttacagggcaaataattgctgctagctgcattgttttttttactgttttaactgtcttgagtccatatgagttttgtgttctgactttaggctttgaagcgattagcagatttgttatgttctgtgtagaaactaatattgttatttgatttaacaagagcgtagtgttctacatgttttagctgggcatgagtaaggggtccaagttatcagtgtgttgtttgatgagatttgcgtcgttgaaatgaatttgcaaaccattatacttgaggtttaaaatcaatgatctctttccccctttatctttttccatttcttaaattctaaaagaaattctttacatgggtgagtctttctgtacactatccacaatggatgaaacctcctggaattatgctaacatctcattcttccaacctaccatacgaaattcttccctttttgcccatatgctctgcctcttatgccttacgttgccccttctacccaacctgtcaaattgttttagaatgtactagctattagcttttcaaggttttagtcacttggaataaattaagcagtgaataatatgattaaaaagtcacacagttaccacttttagctcatggtagaaatcaatgtttcttctagtgatcataatttttgtgccgctgttgttttaatggaatataattgaatatgtggatggttgcttccttgactgcttatgggcgttgctactgttcgtgctacattactaacgcccacaacattgacatatttgcttcctttttttattgttgttcagtgtcagaaggactcaacatcatcgtctgttttcatttcccctttagggaatggtactagtagttgtagggggtctgtcttcaatgcatttagttttcacatcttctattggagttgacatgatatgttatagatgatttgttggatttggttgtttctgcacatcactagttttttcctgagtgatgatagccgcgtaaattgttatgttgatggtgatatatatgatttttgtgtgatgttattattgatatgatttgagaaaaacttattcacctccatatcaaaatctaagtcattgtgggatctgtgtggttaattatttctgacatttctctcagaaacattttgaaagtctgagcactgatatattcaattgtacatagatggagtaacaaaaataattccattggatctatcttgcaaaatacttctgtaatgtgtgattattatttcacttatacaaaggtagagcaatcaatgggttgatttgcaggcctgttatcctgttttgatcatttttcttgaaattatacccttcttttctaaattatattttcttaatgcacaatccatggaaactctgcaaatctgcacatttttttctccctctgtaagtagatggtagtgaaatgcttggcttagacttacatactgcaatgtgctgtcaaaaggtttagatgtttttgtactgtttacatagctctatggattcttgatggtagactcccatctttcaaaaggttttgatgtttagagaatgatataccgaaaggaaagagtttttctccaattattcttctgttaaggtcctttttgtctattccttgtaaatacaggacggtttttggcagcttgtttttcatttcatttaatgtgcctcctgtttctgggatttcttctctaggtataggagaatgaaaataacactttgactttatactactttgtttttttcaggacaagatgatgcttcgaccagctgagcgtttagttgcattcacaattcttcatcaaggttattcctcacagttggaaaatccctttgttcctctaataatacatgtaagttgcaaccttttttctttttctttttttgggggcataaatattttacaggcttcattaatgtgtgctgatagtctgaattggtcatgtttatccttttaatttcatcgaataaactaatttattgtaaaaacatatttgtcaaaaggataaatgtaccagaaattgtgatttctgtctgcactattttatttttgttgtcaatttctctcaaatagttccacttgcctgtccaatttctatgtttgagttccatgtcacaattgaaccagggcacattcctttcacttccaaggtttatcaactactattaggtg

SEQ ID NO: 25730 - DNA, 1612 bp, Oryza sativa
  unsure (1)..(1612): unsure at all n locations
ttatcacagcagcagtatgattctatccttttcagagtctgtttttttaaatagtgcactatttctcggtaatgctttgtgacttccgctacctgtttttttaaattttttgacaggctgcttgtgatgaaacctctgataaaccagaacagttgtttctccaacttcttttaaattcaactaatggggacaacgatagggaggtattttatcgctctatgatttcttgtttaactatatgatttatataggcaaaattggttatatgattttgccatttatatataaatttcacatgcatggaggttactgagccctgaggtatggagtacccagttttttttctggtcttatgccttcatggagcatgttacgaggtggaatcaacaatttgtaaaacaggaattggttgatgcatgataaatgataaattgctgtatattagcaagtttgagtaccatgatcagttctccagggatctaatacattacggttctttgcaaccatttcatcacaaatagtaattctcaccatgtgatgctaggattgaaaccctattaananaacccaaaaaaaaaaacctgtncccccccccccccttttccctaattggaaaaatttccctaatactatcttgttagaagtctcatggtattctttttaaggtcatagtttttcctgtcactttacttgtattgatcaacagacattaactcacctttactatgtatgtgagcacatgctctgtttgtatatttgttatggagatcatttggcatcgatatgatgattattttgtgttcagattctgaagcattctgctgcagattacttggaggaatctgcttatgcatctcaggttagatgattgttctgtcatataattatgaaattgactggacactttctctaggatgtaggatcttatttgtttcgagtggtgtctattatgtaggtcttgctcaccagagagcagcttgaaagacaatatacctgcaatgaggtgcaccccagcctagcactggtagtttcagagaagctactgttagaagtgttattccttgatccagatatttctcaaagctgcactgattcatcagagtacgtatactccaactttgttcttggaatgtgatgatggatatccataggggtggttcatttttctctcttggtcattgttaattaagtttgctcattatttctataggatatcaataaccaaatcaaatagagataatttggtcacttgtttacttcaacaaacatcacttgatggaattggtcctcagtggatacggcctcctcctccaagacttgaaatacttgatggagaggtaaggttgttggctaaaagtttttgtttagtagtacctttatttctgaatctaaggtgtacttcttgatgaatgggcagttgcagtggctgaacctagacaacaaccacgagctattgtgggacagtagtatgtgtgctgatactagtcgaggtgctgcgatccgagatttagttggaaaagcttgtaaaggaccactttcacctgcccaacaggaggttctattctattctttttctcaaatgaatatcttgatattgagtttttaattaagc

SEQ ID NO: 25731 - DNA, 2529 bp, Oryza sativa
ccgctggtcatccgagccagattcggtggtgttcttgtcgaaggatgtgctttggagatcatgaaaatgatttccgcaagcccagtacctgagatgtcctggttttccgaaattgattggaataatctgttgtcagtgtataactttggaaacacggtgattattcactagtcttgtgtttctgtttcgcctgacaaaacccggacaaaacagctaatctggtgttgttgctccatagtccacataaaacacaaaccttggcatgttcagagtatttcttgccacttcagtctcgagaaatactattcccatcttgatacacacatcctcaatagtacatgatattttggatttgcatcaaagccaacagctctatactactattgtcactaatgatgatgaattcggctttgcttgaaatatgaactccaataagtacaactcaaacagcaagacttccagctgatattcatatgaacagagcaggtacaggctatatactctacaattgctgccttcgctaagtaagttctgcccatcatcttcaagtagatcttaggttgaacctatctaccaggaactgcatttgacataagatatgcgcttatttatcagccgtagctcaaacaatcagagaaactattacacaggaccctacggtgattgagttcacttttgaaagcccctttttttttaaccatcatgctgcagatttgtcataatattgatcataacaactcatgcttaaaaaaccagatggtagtatggtactgcagagaacgaacggatcctgaaatcttttttgggttatttttttctttttgagatgaggggtaaagttcaatgatgacaactagtacatgacagagctatattctatgaagtcgacagctatcaagatctagcggtaaagtacaacatgaaaaactatggatgtacaccatggaaaatttttgtttaaaccatacatccttcttcactctaacgattttaaaagcctgaacaaaccagccgcttctcttattcgggaaaacgcaatgcagaacgcctgtacctcgatgaagagatcttgcactgcaaaatacagaacagtcaacaaaaatgtaaaagggacttcaatgtataaatgttacactattaatcaagacaggcctcgtgcattccacaagccatgataaatgagaaaaattggtatttcaaaatcagcattctaaattaggaaaacgaacataagatgtctatatctatgcacaaaattagggtacttcaatgcaaaatttattaaatcagcatctcttttgctgaaaactggtgggaatggtgcattagcattttgctattcctagatggcatagtaaaaatgctacttcttagatatggttcaataatcacgtcttggaaaatcatgacattttttcttaaaggaagaacagagagttaacaaaaagccaagatacaagcttgtcaggaaaatgattttggaccaggttctagtgattatacccaacatgtagtacttggcaaagtttgtcacaagaaaagaactgaaaattcgatatctggaatgtgaggactaaatataaattcataattcttcttaaaccattttatatgtctggcaactggcaaccaccataagacaccttactgaactcaagttttcagcaattggttgagttaatacaatatgaaggaaatttttgaagattaatccaatcaatatataaatgcaagatcacagttgtgtatgactggagaagtattcaagaatcacaatctatgtaggcccaaccaaacagaatacagaatgtaaatagaattgcacgcagatctaccaaatacatgacggtattttggtaaaaaaaaattacatgatggtacactcaccatttattatcttgtttcgaatgagactctgtaggaaaacacatactagccttactagcctgttttgcatgtatttatcctgtaaagaacgttaaacaaaaaaacaaaatctcagaattttctacacaataaacaatattgtcaatcacacgatcaagaggtagaactgatggtatcaagagtgtaaaaattaaaaaaaatacatatttgattggatgtaaaattgtaataaagttaaccggttatctaaaattttggattcagttctgtaagtgatttccattttcatacagtttatcgctggtcccatcaaagaatagaattggcatagggcagtttttctcctaaaacagtttcctaatcccctgataagaagatgtttgcaaatacaaaaaacacaaagaatggctgctggatccacattatcaaatgatttgatggagataagccaaccagaacttgatttggtaaaaggtacatcgactagggataagctggaaaaacaattcagctaaccatatagaatatgagaagaccaatgtatccaacccactcaaatacttttgtgtttaaagaaaaaaaatgcatttctttttatggtttgactttgttataaacatataatatgagtcatgtcactaa

SEQ ID NO: 25732 - DNA, 650 bp, Oryza sativa
taactctgcaagtaaagtctgcacccacattatttttgcaggggcattggcaatagctttgtattctgactctgtgctagatctaaacacaggggcttgttttctagcattccaggagaccagatttgaacccagaaatattgcaaatcctcctgttgatcttctgtcatctaaacagcctgcccagtctgcatcagagaagccactaactaaagtagatcctgacttatgaatttcaagtcctaaccgagtgcattgctttaagtacctaagaatccttttcacagcaatccaatgtacagttgtgggagcatgcaagaattggcaaactttattaacagagaaagctatgtcaggtctagtaagagtcaaatattgcaaagcaccaacaacactgcgatagtgacttgcatcttcaggccctaacaatgagccttcatgaagagagagtttctcacttactgaaagaggtgtattagcaggtttacaatctatcatgcccactttcttcaataaatcattggcatacttgtcttgattcagtacaatgccattctgaaccttgcttacctctattccgagaaaataatgcagctcaccaagatctttgagtgcaaattccccttttagatcctgaagtaaagctgcag

SEQ ID NO: 25733 - DNA, 651 bp, Oryza sativa
tagggttccgtgttcatcctctgtgaaaccagcggctttaccctgtttcatgttcttgaggagcccatgcatatccggatcattcttctgagcctcgcggatttgatcgagcaaggtaggcttggcttccaacgtagccaagaatccacgaccaactatgcttaggttcagggcttccaactgttgattaagttccggtggaatgccacggacgccaagagtgttgcaatggctttttcgacttagagcgtcggcgactacgttggccttgccaagatgatagtggatccccacatcataatccttgatgagttctaaccatctcctctgccgaagattcagatccgactgagtgaagatgtatttcaaactcttatgatcagtatatatttcacagcgattcccaatgagatagtgccgccagatctttaaagcatgaaccacagcggtcaattccaaatcatgggtagggtagttgccttcatgaggccgtagctggcgtgaggcataggctaccacatgaccttcctgcattaatacgcaccccaatccttggcgcgaagcgtcacagtacaccaggaagtccttgcgagtatccggtaagattaacactggcgaggaaaccagcttttctttgagagtttggaatgc

SEQ ID NO: 25734 - DNA, 685 bp, Oryza sativa
ttgaccaggctgcacagctggcgcaggaggacggggtgcacgggtcccttgctgaccctgctgttgctgcggctgtgggacgcgcaccacgaattggggtcggggcgcggagcgaggttgctgctgctgctgctgcgaggaggattgtcacgccctgaaaattttaaaatttataaattgttgtttaaatggaatttctagaaataatttaaagtcttgaagagaagatcttgttttaattaataaattccaatataaaatggggccagataaaatttcattaaatactttgcttaattctataattcctagatttttctgggatttatttgagctaaggaagtatttttaataaatggaattgcatttcatgaataatttaaattgaaaaaggttttaaaaagtctcttttggctttgggccgaaagtcggcccaaatctcttctctctctcctcggcccagccggcccagtccgccgcgcgcgcgcgccctcgctgtcgctgacaggtgggtcccgcctgtcaggtccttcatccttctccggccgccgccgccgaaaccctagtttcgcgccgccgccgtttcctttccaaatccggccgttcctttccttctccggccgaattgaaagaggggaaatgatccttgggatctcctctaccttttctcctttggaatctttgg

SEQ ID NO: 25735 - DNA, 1137 bp, Oryza sativa
atacctttcggcgcatgcacgattactttttgccgcaccgatgcagcctcctttattcgcgtgcgatacgagtatttgcccgccatttgccgcatacgaccaatgtaactttcggcgccgatcaggcatgcaacttcggcgtacccaccatgccccaccacgttcacatgtcaaggatatcactcgattttttgcgcctatataagtcgccttaacgagtgaggcctcacgaactcagtcacattcagtactctcttccctacttgcttcattacaaatcctaccggctttcgtcaatggctagacgccggagtgttgaggatccaaactggcgcagcgatccttatgtatacctactaccaccttggtgccagcgtcctctctgcctatgcggtgatcgatgccaactaatggcttcgaggaatcctgatattcgaggaaggcgcttttttaggtgccctaactatgaccgtgaagtattttattatctgcatatgcttattcattccgtatgggtaatcgctttattcttcgtaacactactctattcggcagacccgcactatggcttgcacatacatcgagtgggtcgatacagaaaatcccgttctcgacctaaccacttgtttacaagaaggtcgctggtatttcgcatccgaaagtaccgagcaatacttacagagaaaagcggtttatgaacgacaatatcgtgaacaacagagcgactggcgggtgctaactacggcactccctccatgggaagcccgtccaagatgcaggtgtggtgatcgttgtcaggttcttcgttctataaatcctacaacattgggtcgaaggttctttgtttgtccaaatattcttgacgacgatttcatggtaagaatattttgattacatgaatccttattttctcacaacatttactaactttgctcgctttacatctattctttcctcccaggaaccaccaaggagatgtcaatacagagaatggatagacaccagaagggttctaactccacctagccgtgttgtgcagcttgaactaccagagcaatacagggttactaaagcgcggtttgagaaaggagagggatcctcacgtaggggttagctattatcggacaacttggcata

SEQ ID NO: 25736 - DNA, 2109 bp, Oryza sativa
  unsure (1)..(2109): unsure at all n locations
caaaccctagcccgctgacgcaataattctcttttccttttcaaaaataattctttattgcgtcataattcaattaaaatccatataaatgttttaatccggtttaatctttaaaaattcataactaattcatattagctcggttttagttggttcaagtctctaaagttgtataaaataaagatctacatattaaaattatccataaattgaattaaatttatttaatcctttttaaataggctttaattagattaaatcttgtaaaattcgtaattatttcatatgaagtcagaatgagcccgttcaagtctcataattcatctaaaatcatgatctacacatttgtttactttatatgtattgtttatttggagtttcttagtctttttccttgttttgcgttttagcttgtcgtttccgtcgtttcgaaggttcgcgagtgcgccggaagtattcaagaagattaattgaagacccgttattgcaaggcagtcacacagatcccaaacacagttcctttgagcatgctgatcctatatttaaattctctatttatttcaactgtgcatttattttttaatgtcatcgggctctgtagacccccgtttttataacaggaatcaatcgtgtaaacagtaccatttccctggatcaagtagtctggtacacacgagttcatagccgagataccaaatgcacatacacgagagtctagtgcgaattattacaacataagtctgcaggcgtagtcttaaatcatcagaccgatgtcacatcctgatttttgtttcaggatttataaattatttaataaattattattagaatttatattaaatgttcattaatttacaagtgaagttaatgtgggaaataaaatttcctaatataaagcatggatggatttaattttgattaaattctccatgattaattacactctctgaaattttctcagatgtttcggagctcaattcttaacttttaatcatacaaagagcatttcagtaattacccacatattaaattaatcattaaatggtctgtttttaatattgttaaatactttgggtctccaagtatgttcaagatttttcttggaattatttgagcataggaattatttttaacaattcaaagatcatttcattgattaatttaattggaaaagtaataataatcctcttcctagtcttgggccctttccagcccatctccctcttttgtctgcacggccgtgcagcccaagtcggcccagccgagcttcccccttctctttctttctttgctttgatttcagccagcccaagacgaaagtctaatntgcctccctccacactgtttatcttctaccttctacagccgaactgagaccgattggctcgggtttcttctcaaatctgacctttccccctgtgtttttctaaaattagtggagggaaaatattcctcctatcctcctctatcttactccccaaacatcggagctaatcgttgagtatcttatccgaatggaactcgttttcgagtttatctccaaaaccgagtttttgatttcccggatcgatttcttgcgggaggagtccgatctcttcaatccaaggctataaataggaccccctagtcctcctctttcgtttgccccctctcccgtggtctcccgtgcctcgtagcgccgccgccacgtgctccaccccgccgtagtcgccggccgagctccatccgcgtcgcgccgccgcctccgccgtcgccgccggtctccgtcaccaccgttaggtgcgcgggagggtggagaagcccggccgctatctccccgaagccgccgaccaccgcagccccgtcgccgccgtcgaccgaagccgcgccgccgctagacctcgtcgccggccgtcgtcgttcgtcgttggttcgagggtgggtaccgttgggttcgtctcgtcgtcctctacgtgttcttgtcctccaaagtcgcagccgaccatccaatctccggcgaggtcgccatcttggttcggccattgatgaggtcatctgacgtcatcatcgtttttttctttttcctgtttttcccatagattaaatcttcggaaattcataactaaatca

SEQ ID NO: 25737 - DNA, 1109 bp, Oryza sativa
atatgtctattttagtccctatactttatgtgccgggcctagcctgccggcccatcgtgccgggccggccggtcgggccagcgtgccggtggggaggcccaaacacggcccggcagtcgggccatgccgtgccgtgcttgggccgggccaaaaagccgtgccatgggccgggccttcggcctcgggccttatggccatctataattgagagcgattttttttttctgtggaaatctaccaatccagaagcttatccacaaatcatcaatttaacatgcatcatatatggttcggcaccattcagattcgccagtggaaactgattctatgtacgcctactaacttcaaaatcttcttattttcataggcaacctgtccagctgttttcgataacagaggtacatggcgatgtggttatgtttgtagctttcttgggagttctgaacaaaccatttgtaacacattagcaggtgattacatggcttgttttcccacagaaattacagttttgttgttaaggggcaatacccgaattcttggaggatcattgtttccatttcatttcgttcaaaagaaatttgtttccatttcatcatctggtagactggtatgttcatagtgttagttagcatgaaaggttcggatcatgtgatcacgacctgacagcttgcatgcatgtagttgttgaggttagtttggattaggttagtctatccatgcggatcaggttagcctttcctccacatgcgataacagatgtttgttagagtttgttttctgttttctgttactgcatgcagtcgtttcatcaatctcggcttcggttgttctcagctgcgccgaactctgtatcgccacgatgggggctgttcccatcacatatatattaacacgaaggcgacgcacaggattagtgcgatcgtttccacccaaactaattcacatggtatcagagcgttgatcaattccctaatagatcaatactcatggcctcgtcgtccagtacggctgccacaaatccgttccaaggccacccaatctcagagaagcttgggaaggcaaatcatgcgctctggagaaaattgacatttagccattgtcaaaacggg

SEQ ID NO: 25738 - DNA, 832 bp, Oryza sativa
aaatatacaaaaatcctccaagcccaatttgactttcaactttgcacattttatttttgaaggctttcacaagcattttaattattctaggcataatttagaggatgtattttagggtcgatttgggaccccacaattatgcaattgatgtctgaattgtatggaggggctaggaatgtaccctacactaaaaaagacataagcaatttcaagtcaaagttggggagcgagtataggagtataggtgtagagatattcctgaaacaattgctcacttcgaggaaatcaaaaaggatgacccaaatttcttctacaagattcaacttgatagggaagacagggtgcagaacatattttgggttgatggagcagcaagaaatgcctacaatgacttcaaagattgcatctcgtttgactgcacatatatgacaaacatgtataacatgccttgtgcaccattcattgggataaacagacatgggcaatcaatacaggtactccttttttttgcaaaaaagtaattctaaaaaatctgtaataactttggaaattatagtacatcataagttacttgttgcattcattgagttacatcaagtcctgataaaagttacttccagtagaatgtgaagttacatttttttaaaaaaaaaaggtaaaaaagtaactaagtttacaagttacatttttagtgtttgttctatagttcaaaattgtactgatttacttccagcaaacacaaactgtacaaactacgcaaaaatgtagtaacttacttgcttcaaaactgtactgactcccttatgtgtattatttttgatattcagctggg

SEQ ID NO: 25739 - DNA, 2278 bp, Oryza sativa
  unsure (1)..(2278): unsure at all n locations
cggcggtcggccttagagattggacaaaaggcatctgctcagaagctaaattgcaattccatatggcactcaatgtcatccaaagactcgacgtggcacaagagcacagagaactctccccccccccgaaacgcgactgagggcggctctcaagcggaaagtcctaggactcgcttctatagaaagggcaaggaaaaagcaagcctccagggtaactcacatccgtgaaggagatgcgaacacgaagttcttccacctcaaggttaatgcgcgaaggagaaggaatacaatccaaagattgaaaaaggacagtggttgggcggtgacgcacggtgaaaaggaatcgacgattcatgatcacttcgcaagcttcatggggaggccagggccgaggccaaacgagctaaactgggagacgttggacatcacaccgattgatctagccacgctgggggaacccttcactgaggaggaagtgcatagggcaattaaggaaatgccagccgacaaagcaccgggaccagacggcttcactggggccttcttcaaagtttgctgggaaatcatcaaggatgacattctgctagtcttcagctccatctataacctgagatgtgcgcacctgaatttgctcaactcagcaaacatcgtcctaatcccaaaaaaggatggggctgaaagcgtttcggactataggccaattagtctaattcatagcatcgccaagatcttcgctaagatgctagcgctgtggttaaggccccacatgcatgagttgatctcggtcaatcaaagcgctttcataaaggggagaagtattcatgacaactacctcttcgtaagaaacatgaccagaagataccaccgcctaagacgggcaatgttgctcttcaagttggatataacaaaagccttcgactctgtgcgatgggattacctcctagccttgctgcagcgcaagggcttctcgacaagatggatagactggctaggggctttactgtcgtcttcgacatcccaagtcctccttaatggctcgccagggcaacggatcaaacatggaagaggantacggcaaggggaccccctctcgccgcttctcttcatcttggcgattgatcctctacagcgtatcctttccaaggcaacagagctgggtgcaatttcaaaattacgaggaagaacaactcggctgcagatctcaatgtatgcggatgatgctgtgatcttcattaatcccacccggaatgatgttgcgactttcgcgaacatcctacatcgttttggcacagccacaggactctcaccaaccttcagaaatcccaggttgcggctataagatgcggcaatatagacctggaagaggtcctccaaggcgttccggcgaagcgggcaaatttcccactaaaatacttgggcctcccgcttgttctgggaaggctgcgaaaaacggacttgcaaccggtctttgacaaaatatcagggagagttgcaagttggagggggaaaaacatggcagtagccgggagaaccacgcttgtaaagtctgtgctttcagcgcagccaatttatctcctcactgccttgaaggtgacgaaggaatccctggagcagcttgacaagcagagacatcgcttcctttgggctggtacgggggatatcaccggggggaaatgcaaggtcaactgggcaaagacatgcttgccgaccagccaggggggccttggtgtcctaagcttggacaagttcacaagagctctgagattgcgatggttgtggaacgaatggagagatccaagcaagccttgggtgggtttggaaacgccttgtgatggtgtggatagggacctcttcgccgcctcaacaaagataactgtgggcgatgggaatacaacgcgcttctgggactccgcatggattaacggccaaagaccaaaagacctaatgccgttggtctatgagatctccaaaaataggaagaaatccctacggcaagggaaagaagacgactcctaggtgcatgacctgaccctcgatgcgggttcatctatcacaatcaaccttctcgatcagctagtccgcctgtgggaggcggtacggaatgtgcacttagacagcgaggagccggatcagattgtttggaaattcacaagcagcggccactatacagcttcctcggctaatcatgcccaatgtttgggggcgccaaacacaaacttcaactccctaatctggaaagtttgggcgccagggaaatgtaaatttcatgcctggctca

SEQ ID NO: 25740 - DNA, 3942 bp, Oryza sativa
cgacatgatttacacgaaccttggatgctggtacagcagagttattctgggcagggacaaccttcacgcgtcggggcttcggacacttgtcagcataatgtcctgggtctccacagttgaaacacaccacgggcttgctgccttgctctctcttggcaggttgttgctgtgctggagctgcaacaggacgtggagcttgattacggatgttgttgccagcattgttgttgaagaactgacgctgcggacgaacaacagacgaagaacctccctgtggcatggactggggtcctaaagtaagacgcggcttctgattatttccctgttgtgccttgaagtgagcaatccgacgtttcttctgctccatgtgattgtacttgtcctcctgacgtatagccttatccactaatttctggaaatcaggataatctccaaccatgagtgggtaagaaagctcatcattaagtcctcccaaaaacttctcctggcgctcttcatcattgcgcacatcttccggagcataacgagcaagacgattgaactcgtgcagatactccgtaacagagcgagatccctgggtaagcgacctgaactccttcttcttgagagacactactcctgatggtatatgcgtcttccggaaagcagcggtgaattcaagccaagtgataggttcagcagtagtcctgttaaggcggaaatgatcccaccattcagaggcagggccatgcaactgatgtgatgcaaatgagaaccttctcctgatcagtacactgaagcaaatccaacttcttctctatggcatgcagccaatcactagcttcaacaggattagtggtactagagaaaacaggcggcctcacacaaaaaaattctgctaacttgttctggggaggtgcatgattatttccttggttttgctgattctgaaattgctgcatcatcatgttcataagctgtgtctgttgagcaagaacttgagcaagagtgggattctctccattgttggtgttattggggttgttgggaccattcccattgctgtgagtgttcaccatttggcatgggcagggcacaaaaagaaaaaccgggggaaactacttaagatagagaattactttaacttttattgatcttaactgagttttattattacaaactaaagactctcacaccactaaactcaccaacttcctaactctcaaaagcaaacaaacgcatgcacttacatcccaccactgatgtaaatcacatgcaagacccacacacacaagcaaacttaaaacaagcaaactaacacatcgatctaagacaacggcttaacaagtcactctagttcttccaagcatcggaggtcgattgaaggctcgtctttatcaacttgggttgctacccactcaatcttggaattgttgcgcttggattcttcttcttcatcactacttatgatgatgaccggaggatccgcttgagctggggcaacttctttctccaccacacgaacctttggcgccaattgatagcgaggaacaaatagagctctcttccttgcggtaagacaaatcctggccttctgcggcggtgcttctccctttaatgcggctaattccttctccaaacgatccaccttgtcttctaacttgcaaatcttaccacgattccaatcttcacgatcttgggctgctaacacagtctccgcacgactttcatccatagcccacaacatctcaaccaaatgctttgtggtaacatcattctcaattccttcagtctcaaggtaactgccacggtcacttccctgtggttggcgaggatggtagcgatactcagtgtcggccaattgatcactgtagcgatcacggagctctcctatggcgatccttgccacctcctgacatgcatggatgtagtttcttcctccagcttcaaacatcactgaggggatatcttcactattactgttcaaggtgactttgactcggcacttctcttcatgacgatcatgagcaatctgggcataaaaaggggcagttccaaatccaatgacaaaggacatcgtacgcaactcctggacaaaaccctcaacaccaaacaggtactcaggcttgtaacgcggcatctaaagacaggtgaaaggagggagttaagacatctatccaattaatagcacaagtttttggattaatttgaataaagtttgaaaatcaaagtaaaaaggtaagtaaataaagtaaaccaagcttgcgagataagttaaaacagttggaaacgaggtcacaaattttgtaattttgaataactggtttcaaaagaaatgaaagaaaattataaaatcaacatgctaaatttattttattgcagcaagattaaataaaacagtattgtaaaacttttgctggtaaatgagccattagtacagtaatagatgtacagtactaataacactggaataaattttgaatgagaaccattaaaagagattatgaaatgcatgtgccattagtttggtttaattaaaagagaaagggaggagaacagttctacttttccaatatttttagagggcttctatggataaccatttggcataacctaagggtcaagggagctctgataccaacttgtcacgcccggaatttctatccaaaattccaaacgcttacatgtgtgtgaaccttcgtccaggaatcagccgaggcacacaataacaaattgataatagagtacaaatattactctaattaataagcgaataaaatgtcattacagaggtagatagttcctctcaatcaataaagatctaagcagcggaaaataaataaacggcgcagacggctccactccacaggcagcttgaccaaggctacacctaatcctccacaccatcagcctcattgtagaactcttcctctgatgaatgattgcaaggtgagtatatgacatactcagcaagccacgcagcaaatatgcaagtgcacaggataacaaaggatggcataatagggtttcatttgcaaaagcagcatttagcaaacatttgagaatttaataaaacagttaagtaattaaacaatattaatccaacgctatacaacataccctgttgtataggcccaaccattttgaacaaccatcccggctgcacagttctatctccaaaccaggaatgtaccattccaaaccaggagctaatcaaattattaccagtttaagcatcttttacaatgatgagaggtgtgagactaatcacgaaagacattgttagacccgcccataaccgcgggcacggctattcgaatagttttactctgatcagaggtgtaccactgtacccacaagacacaaccccacatcatgtcaccatgtgcctcaataccaccacggtatctcggaaaggagttgtgacaatacccctcgcataacacaatccaccgcagcgcaccttcctagatcataatcacccccttataaacaaggcatggactccccagcgacccccgtgggcttatctccgccacttctcagtctggtgccccgcaatgaaccatgctatacaaaagataaagccgttgcccatgctggcttgtggttggcacggttaatgtttcacaaccgaaactcgtgaaccggtccttaattgtcatgagcacgaccaacaaaaccatgtgctcacaacccaccattaccaggttttagttggcacattaattaattaactaatcacgattgaccatcgtgaactatcatgaaaccatcattaaataatagtgagtcattagttatcccgaatgtgtactaatgtttctaagcagggctaagcaattatatctaatatctagttgaaccaatataaataaagctcaactagtcaaattgtaataacccaaggtatcaaggaataaggtaatcaagtacgaaagggccataacaaagaataggtca

SEQ ID NO: 25741 - DNA, 645 bp, Oryza sativa
gtcaatgcactcttgtgacgaaatatttcgtgctagatcatgtaataagtcgtgcattacataatatggcctactatcatcaccttccttcatgagaaaaccattacctactagttcgttcaaatactttaatcctacatggtcagctttattattttgatctccataagctatgatgcctaatgcttcccaaaaataagtaatctctaaattaccaaaccggtagtcctcagggtaaagggaacaataagaaaaacactttttcagaggaaaggtaggtagtcatagcttatttgtagtgctggcattatgccatcaccatcttgctgatttttccactcatttctttcatgaacttccatccaactttcctgggaaaggttattcttcaataatcgaccaacggttttggctgctagtgggaaacccttaaatttcttggaaatttttcttgcaatatcaatcaattcatcttcataacacgcaggtttttcctgaccaaatatacattcttcaaagaatgtgaagaattcatcatcctctagaccttgcagttctattggcttggttgtttttaccatttgtgctatagatggaaaacgagtggtgacaataaccatacttcctttggcttctcctgttttc

SEQ ID NO: 25742 - DNA, 961 bp, Oryza sativa
ggccagaacccccggacaggcaggcagaattgagcccctagcagcaggacaccagccctgtgctatgacatctcgactaccgggccgcagcccgtgtagccttcatttgtcctaaagatgtccatcgacccccgacttcgtccatctccatccgtgtacttttgtttataaccagactgagccacaaactaagccttacccactagacatgtggaagtacggtagtgctttgcaacagaggcccgaagaccggtccttatgtggccgaggggctactatcaaaaccatgcaccccaagcctagcctaaaaccattttgagagttttgaatagagggggaggtgtgcatccaattccacaataatccaaccattccaatatgtccaggtgatatgaatattcccaaagtctagagttataaaaccacctaatgttgcctaattaatcagcgaagcatctacctaaattcttgctagtggaaccatgaatagagtgcccactagttggggttttgtttattctagggtgaacaaggtaataataacaataacaacaataataaggtcataacaaaggtaaataggcatggctaaataaaacagtgataacgcgggaatttaaataaagcgataatgcaataatttaaatcaaagtaatttcacaaagtgggatccaatatgttcaaagaatgatgtgacttgcctttctcgctttcccaaacgtcggcttcaacctccacgaagagcggatcttccaaagctgcagcgtctacacgaccaacggaaaagaaaagggcttttactctaataaactccatataacaagcaggaacaaagcacaaaaatgggttcttgacttcttaaggaaaaattagagacttgaacggtccaattccgagttcaaatggccaagttatggccatttgaagtttatatgcactttaaatgaatatttacgaattt

SEQ ID NO: 25743 - DNA, 684 bp, Oryza sativa
ctaactaatatagcattgattcagatagcagataaagaaaacagctcaaccatatggactaaactaaaagcagctgcctgaacttagaaagaaaccacaaaatgaaggactgccttggttttccatgaactgaccttttagattgctggccttcatgtaatcttgtgtagctcgcattaatttactaagttggttagcgatgaaaccactactccacatgaggtaaatcattaatagcaaaacaggcaaaaattagttaaatatgaaaatttacagatttaataagggacaaatacaggaattaggagaggacatgctttaccacgtaaacctggcgttgatgcttttagtttcttgagttgatcctttagatcaacactgatgccctcgtatgcaaatacatatctcagtgatgcggggaacccttccttgggaagcgctctgatttcaggacatttatggataattagttcacgaagtgaagaaaggcgatgtaacccttctgggagggactgcagacgggaacacacatagaatcctaggcattggagggaggtgaggagctgaagcgcctcctcctgcgtttcggtgaagctttccatccacatgtcatacgggaattccatcttacagagggtgctagccaggaggttgcaaatgggggcaacaagcactgctgagatg

SEQ ID NO: 25744 - DNA, 593 bp, Oryza sativa
ttttgatgaagtggagaagcttggtaaagggtttacatcggccaatccattggaggaagtagacataggtgatggaattaagccaaggccgacatttataaataaaaattgagagccgattataaggttaaaataatcgagctacttaaggagtatgtggattgctttgcatgggagtatcatgagatcccgggtcttagccgtgagcttgttgagcatcggcttccaatcaaaccaggttttaggccttataaacaaccacctcgtcgttttaatcctttgctatatgaccgagtcaaagaggagattgatcggttgttgaaggatgggtttattaggccacgttgttatgcggaatgggtttctagcatagtcccggtggagaaaaaggggagttgtaagattagagtttgcaaagactttagagatttaaataaagctactcccaaagatgaatatcctatgcctatagccgacatgatgatcaatggtgtctcgggtcataaggtgattagctttttggatgggaatgccggctacaatcaaatctttatgggggaggaggatatgtacaagaacgcttttaggtgccc

SEQ ID NO: 25745 - DNA, 752 bp, Oryza sativa
gtgagttgtgttgtacaaagggtattgtcacagcctctattcgggtactttccagtatcgcgacgcatggtagacatgatgttgaggttgtgtcttgtgggtacagtggtacacctctggccagagtaaaactattcgaatagccgtgcccgcggttatggacgagttgagcaatgtttttcgtgattagtctcacacctctcacaataattatggatgttataactggtaataatttgcttagctccggtttggaatggataattcctggtttggagattagatctgtacagccgggtatggttgtttcagaatggttgggcctgagcagcataggcatgttgttcagtgttgattaaaatttttgattaattactccactgttttacttctcttaaatgttttgttaaatgctgcttttgcaaatgagcctatattatgccatcctttggtatccttgtgcacttgcatatttgctgtgtggcttgttgagtatgtcatatgctcattcttgcaataatcaatcaacctcagttgaagacaagttgcgaaggagaagacgtttggctcataccccagttgagctgcctgtgggagtggagccggagcttcgctagattttattttccgctgcagttttcttcttggtgaggacttagtgcctcttaagtaagtaattatcgtttagttaatttgatgaatctgtatatccaattgtcagtttgtgtacctcggctgattcctggacgagg

SEQ ID NO: 25746 - DNA, 679 bp, Oryza sativa
ctgaccaaccaactgatatctggggactacgctgacgttgagaggctggttgacaaggcaatccgtcaggaggatcaacgcaacaagatggacaggaagaggaaagccgcacagttcagggcacctcagggaagtcaccagaggccgcgcttcgctcccaggcagcagggtggacctaccaccatgatcgttcgtcagcaccgcccgttcaaccctagcaactttccccagggcgccagtggcagtcagaaccaccatggaggtcagtccaaccgcggtgcagctccacgcccaccaatggcaccggcacagtcaggcccgcccgcgcaagccaagaaggagactggagcaaaaccagggtcctgcttcaactgtggtgagcttggccacttcgctgacaaatgcccgaagcctaggcgtgccgggccaaggtttatccaggctcgtgtcaaccacgcatctgcggaggaggcacaagcagcaccagaggttgtactgggtacgttttctattaactcaatccctgcaacagtactttttgattctggtgcaacgcattcgttcatttcaaagaagtttgttgggatgcatgggttaataagagaggaacttacacaccgatgcgggttcataccccagggaatagctccacttcggttcaattcagcccttctataac

SEQ ID NO: 25747 - DNA, 754 bp, Oryza sativa
agcgggcaacgggcagtcccctctcgtgcctaggtgaatccggaaacgacagaggccgtcgcagggcccgccccgctccatcacgcccacctttgcctggatgcgtcgactagatgagagctacactacaagcccagccgttgcccacgctggcttgtggtaagtacgataagttctttcgggcatcccgcgaaccggtccttaactgccatgggtgcgaccagcaaaaccatgcacccacagcccaccatgtgatttattttaattaaccaacaccaaagcggtggcactaatccaacaaaaccattagaaccaacagtctaaacattaataggattttccccattgtgaactagttgaactaagcatggctaagcaattcctagtccaaactctaatcatgttgtaaccccaagctaacaaaggagcatggtatccaaaaagcatagctgtaacaataggtaaccatcccatagtaatattataaaacaatgcaatatttgaaagaaaacaatagagcatttgcaatataggatcaacatgttcaagtgacaagcatgacttgccttgctctgctgctggaggaacctcggcgactatttcgaagtacaccggagcgtcggaggagtggaatctagcgacatacaaagcaaacaatgcaaacaggctataagactactgaaacagggaacaaaaccatttttaatggattctacacattactcttgatttactgagacttgaatgggcttaa

SEQ ID NO: 25748 - DNA, 697 bp, Oryza sativa
agcagtactgtaccttgaagtctctttccacacacccatctccatccttacatccacaacacgtcgccaatcctcattggcagcatacaagtttgacgctagcacataattccccccgtattcaggctccatttcgatcacatgatcgaccaccttcctcgcgagaatggcatttcctagatcccgacatgctccggtcaatacacgccatattacagggtcaggcctcactggcatagccaggacgaactcaaatgcctcttccagcataccagatttgcacagcaggtccaccatgctcccatagtgctccatccaaggtgtgatgtgatactcttcaaccatagacttgaacaattggcgcgcttcattgacgagccccgagtgactgcaggcattgatcacgctcaagaatacaagttcatcaggctggaaaccttgtctgagcatctgcgaaaactggacaagcgcagccaccccatgcccgtgcacggcgagggcctgaattatggctgtccatgagaccactgtccttacagtgatcgagtcaaatatctcacatgatctccttaccctccccatcttaccatgcatatgtatgagtgcgttggcgacacgggtattctccaagaacccattttcatgggcatactcctccacccactcccccagctctgacctgcagtccaacattgtg

SEQ ID NO: 25749 - DNA, 1654 bp, Oryza sativa
aattcctgcaccccacatctttatgaccactgaattgctgttgtttcctgaattttagctctttactgatcttgtgattgcacttttgcagccgggaaacgaatggcataactgctattctgatgaacactatttgccaaccctctttaatgtaagaactctcaaaaactcttaaatgatgttttcagttgtgtttacttcccagtgatttcaggccgttattgtacctgcagatggttgatccaactggaattgcaaattggtcagtgacacatgttgattggtctgaaggaaaatggcatcctaaagcttacagggctgttgacacaagctttgaactgcttaagaatatttcggtgagctctggtatacttgtacatgcaaaagaaggggaaacatacatgttttatttccttaatggccaattttcgcaaaaatctgcattcttgggatttgtctaattaataatgaaatttttgcagtccattgatgagagtattcatgttacaagcaatgcaaaggtagagttatttgatcttttcctcttcttgctttctagtactagaatcttcaagttagttctgtgagactgaacaagttctccccttctttactgcatgcatatttgacatgttcctacctagatttaacttgaaattctaatgtgactgactggctgaacaaatttcttgaatcaacactgtttctacaaatcgatttaattttttttcacattttcacaattcttttgaggaggattttgataaattgtttggtcttgcagcaccaagtgatgagaagaccgtgcctatggaatggcatgaagaggccttgctacctatttgcacggaaattctatcccgaggcactcgacaatctgatgaacattttctcaaacttcactatcatctaagggaaggatgaatcaaaaacctagttcgcatgtaacactacagtataggccttggaaaatcagaaacccagagagactcgctgaattgttttttgtgatctctcttggaacatcaaatgattttcctttttcgcgaagatgttgcatggtttgcagttgaaagagcagtcaaatttgttcctcactgcgctgttctgagcaaatgatgtgttgttcataatgaacttcgtagtcatccatctgcatattcatgggtgcagctacctgatcagtttgcctgtaacgctgcagtgttggcaatgttgtagtgtttcattgctgaggaagatgaaaaatccagagagatttgccaattttttcttgaaagctctcttggaacatcaaatggttttctattgcgaactgtaatgatgatgtttgagcacaatgattttgatcaacaacttccctatatgaagaatattcagtttgaagagtaaaattgtttttgttcagcaggaaatcgatcgtatcttccttattaggtaggcatcataatgtgaaatagagtaaattgcactttacactagataaagtgtagcttgtttaacgtatactttcactttacaccaacaccaggttatatcaaaacaagtttttagtttgcattaggttgtatcatataattaaagagagatcttgtaaaacatgagtaaaatgtacgaaatcttcttgaatttagactgttttaccccgtttctt

SEQ ID NO: 25750 - DNA, 635 bp, Oryza sativa
attcctgcagccccgttggtcggtggcgcgacacttgtcgacatggcgaacggatcccgaggatgatccatctgggctccttgctgcctccttgatgcatcatcgtataagctatcaagcagcagcttgtcgaaccctccagcctacaagagtcattgagtgcaaaaattggaaatgactctagtcacagtatgatcaaaagaatggcattgagcaatagagagttcttgaaataagcaatagagagttgttgacttaccagcttgctctctgtcagtagttggttgctgctgctgttggtgggttcagtgaccaacgctagctcccaacctgacgatccaagcatgccaccgaagccactgcctgcaccagcagatgtgttgctacctgttataatccaaaaggatgtgattatgcatggatttgggagaattactagtgattcttgaattatctaatcgggagatagtataggcagatgcatgctaatcacctggtgatacaatggccagagccagtgcattgttctcttcaagctgggcggcagcagggttcacttcatttaaaccctgcagtccaccataaattggatcaactgctaccatttattgcagtaaatagctgatatgaataca

SEQ ID NO: 25751 - DNA, 1589 bp, Oryza sativa
tatacatttctagagaatcaaaatgcatgcaactctacagaataatgaaagcacactgtgattacgcgtaccagatgtcctgttcttctgtagatgtcgaaagctttgatagcatcaatttttgtcatgtcgaagaactacaacagttcagaaatttaatttgatcaggatcatatccattagatccatcgatgattcaaatgcagagaaagctggtaaataataaaaggtaccatttcgacaagattaatgattccatcattgactgcacaataaatcttgaaactttccttcagcacctgagtaacattttcattcatcatgagcaagagcaattcggataaattgttctaactagtagtatctgaagttcagatatcagaattaaggtcagccacaataccagagctaatgcatactgtataagatagtttccaaatgcggctccttcaggcttcacacacagttacagcattggtaaaaatgagtcagaaactaatctagatcaagcagataacataccacaaagttaggtgtgtacattacctggcagccgactagccgatagagcagctgctgcagtgcaggaagttgctccaagagctcatccttacctaagcttctagttctactctgaccctgaacatcatatttcaattggtacatatttctcaccaaatggaacaaacaaaacatcacaagcaacaagatcactcatgccgaactatcaccaccgaatcattccctgaaatttagaagccataatcacaatttcacaaacctttggagctccctctgctgtcctcagacgctctgcttcaatgtcgtatctcagaactctgaagcactcgagcctctcctccaagaacagcgcgtacgtgcgcacccacgccgagcaatcccacgctgagcaaagcaattggagatttcaaatttgcaatcacaaagaaatgagaacgatcggtgacaaaattttttgaaccgattgagttcatgttaatccagttcagtttatgcaggaattcagattggattgggagctgacccagcggggtggagtcgtccttgaagctggacatctgcaggcaatggccgccgcggccgcgccggtagctgagaagctcctcccggaacgcggcgtcgccttcccgcagcgcgcggtgtatcaccaccagcgtcttgagcgccacctgcatcaccatccatccacccccgtcgtcagcagatcacgcggcggcgagcgatgaggaaaacattggcgatggcggcgtaccacccagttgtgcgtcttggagagacggcgggcgagggcgtggacgcagtaggacacgtcggcgagcgggcgggcgccggacgcggcggcgatgatctctgcggcgacggcgacggcaatcgagttagcacgcgaggtcgcgagcgatggattgggcggcggaggcgaggaggaagaagaggaggagaaggaggcgtactggagaggtggcgctccttgggcgggcgctcgacgtggttggtggccttgacgacggcgacgtcgaggtccttggagtgcgcccgggcgaggcccacggtggtggagtccttgatcg

SEQ ID NO: 25752 - DNA, 2008 bp, Oryza sativa
  unsure (1)..(2008): unsure at all n locations
ccgccgcggcgaggtcgagtcgtggctcgcgagtggctccattttttaaattttcgcctccatatatatatttctcatcctcccaaaatcacactaaactccctcaccttttcattattcccaaacttagaaccataagccatccaaaattgcaagtgttctatcagtccaaaaataatcgacgtttaagtaaagattgaaacttttgaagattttgccgttgatgttatactaaaataaatttgtaaaatctagcaaattttacatttttcaaagaaattccacacgtttttttgttttttttaaaagtaaacatatgagtcattattatcaacatttaaaaatttgatcaaatcttgtcctaaagtcaaatattcatgagcagagataaaaaggctacgaaaagttgtgaaactcacaggggtgtatttgcgtatgagaaacattctgggatgatggcacgacacaatccgataatgcgacgtgcgcaattgattcataaacactattggaataatggcgtgccaggccggccgcccattgtaatttggaattggaatcagttgaaaagatgcaatcttagacgatttttcaggctcccaaatttgatttggttcaagtcaaccccttgcttacatctggtgttcagtgctaatgccagcaatgctcaaccaagtgctgccattagcaaccagccatctggccctcaaatctcaaatttcagattgggccaatcccagttaggatcaatactagcatgaattgagaacgagtacatggtaaatttcagatatttgaactcaggtgagacatgtgcaatcttgcaaatacatgccaatatatatatatatgaatctgctatgaaatgcatttcagtatgggtttctttcttttatcagtttattattattacacagtgcaatcaccacaataggggaatcaatcaatcaataaaatcatgtgcactgttgttttgtggagaaggcatgtcagctgtaatctagtctaactctacattgtagcacaccatgaattttgctccaatgtgcttttcaccaccttggcataggcacctttctttcagcaaaatgtgcttttgttgcttttagaattcccaattatagaataagtgtgctgcgacttccttgtagtttagccattaatatgtgcaccaacagcggagatcgaatttttcagatccaaactgatggtcattgtataccaaaccttggaatgctggttgtgttttcataagaagactcggtttcacccctcattctaacttacggntgtctgcattgaatccgaacgatctgggttgtatatttgttgactgcactcttcaaccacctttgttggagctttgcttttaagcagcatctcattgtactctgcttctggatctgacaatgctacaatagccccgcctgccccaatcgaagcttctccattgtgcaggacaactgttctgatcacgatattcaagtcaaaagtcttgttatatgaaaagaatccaactgatcctgagtatattcctctcggactagtttcaagtgaatcaagaatctccatggatctaactttcggggccccggtcattgaacctcctggaaaggcagcctttacacaatcgacagggcttaggtccgacattttggttccacgaatggtacttaccatggtatgtacagttttatatgattccacatccatgaggcgaggaacatgcacactcccaggttcacaaaccttaccaagatcgtttcttaggaggtcaacaatcatcaagttctcagcttgatctttttcactgttgaaacacataagaaaatatcagtattgtgaggactggtaaaaccaaaatcataatgtttgaacagtgaaaaaagtatctatcagatacttgcctgtatttcaactgcaaacgtaggcattcatcttcctctggtgttctgccacgtgctatagtacctttgattggctttgcttccagaattgcatttcggtc

SEQ ID NO: 25753 - DNA, 622 bp, Oryza sativa
tgcccccccatgaatagttgctccagaatcaatccaccatgtggatctagagtaaccaacataatgagattcatttacaaatgtaataatgttctcacctttctttgccatgatcattttcaaaaagtcaggacaatctttcttgtagtgtcctgtcttcttgcagtggagacattgatctttctcaacagcgaactgttgttgttgaggcagatgctgagactgtttaccttttgaggtgggagacttgtggttctttttcttatctttaacatagtttattgaaccaccatttgattctttgattctctcctcctcttgcacacaattagcaatgagcttctcaaagttccatttctctggacttatgttgtagttgacaataaaattgtcaaactgctttggcaatgaggccataaccagatggaccagaaagtcatctgttatgcccaaatccattggcttcaatttggaagccatgttgctcattctaagtatgtggtctctaacaccacctgcatggtacctttctgtcacaagctgcttgatcagctgtgtagcataagtctttgaagagccagtaaactgactctttattctttcaaagtactctgagacagcg

SEQ ID NO: 25754 - DNA, 744 bp, Oryza sativa
ggtagagtgcctaacgcccatgagaaccctgtagccatctaactcacttgcatcgtttatgctgggcatttttccatcagtggtactgcactctgactggtttgttacgaataagttatccaatgatccccacaaggtactgctagttatatcaggcttatcgctttcaaggaatgagagcatttttggagaagcagtccatgctattgatataagatcctcagatagagagtctggttctattacaagtgagtgatagcgcactacctgaaaaataacaactgtaagtagagtgttctttgcggtgcatatagaggctgaaaccccaataatatggctagcaacatgagtggtacactaaccttgaatccagagtttatacctgatgggatgtgattaaagaggtagcatccattgtgttcaagttcactgacataaaaaaaaggggtatcaaaatcaagacatgtgttaactacttaactgaaagaacacctagaacttagaagattatgcatgacacacactaatccatagcaattgcacaaaataaaaaataaatgctgtacaggtcagaaagctgaaagtattaagcatgtaatagagttcaaggccttacctaagccggccatgtatagcttcaggagcatggacgattttagcaccatggacaaatcccagggcctgcagtggtaaaacaaaacggccatttcagttcaacctaccaccaaattgtccatgaatttt

SEQ ID NO: 25755 - DNA, 1193 bp, Oryza sativa
ccaaaaaaaatgggatttttctctacttactcagcagcagagggaggccgaccttccactgatccccagtttggggagccatctgaagctgtcaattccgatgttgcttcatcaccctttggttttgaagatgtaaactgacctctattgcgctgcatcctacacatacatagaaaatattttaaactatgaagatttcctgtacataatctaagcagaggtaatttagaaaacatgaataacagcaaaatataaatcctactatctgccacggtaatatcaaaactgaaagtaaccacaagaaagacactgatacttaaaaaggtactacctccgtttcatattataagtcgctttgacactgatactttgatctttaagtttgactaagtttatataaaaatatagcaatattttcaacacaaaacaaacttattatcaaaatattgtaaatgttagttctaacaaaactaatttggtgttgtacatgttgctaaatttgtctataaacttggttaaacttgaagaagtttgactacgaaaaaagtcagaacgacttacaatatgaaacagagggagaatagcttaataaaagcagccagacaactcaaaactaaaacacgcttttggtacaaatacaatgtataagttgccaagtttagattatattattcagttcacttccactatattaagtacattgttagcagagtgtattactcacagatcaaatacagcacgcttgactcttcctaattcaggtcaatcagcattcaaataggaacaaaattctatagcatttcagtacgtataaacatccacagccaatgctaagctagcaccaacctaagtgcaacttccttccgaacagaataccggatcttcttatcaaagttgcgctccttccgcttttctctgaaccgcatcaaagatgccacccggtgtggaaaattcaacctctgaaaccaagggaaaaaaaatacacaatgaactccagagtgcacaatcctgtcaaacataatgaactgatactacaaagaaagacagttcaccatcacccgtgccaaccttactgtatggcgcagatgacgatgctccagagcccaaacctgggttcagctcccttccaccgagtagcaagagcactgcttgaacctgcgagaagtaatcgaacactcagccttttttttttt

SEQ ID NO: 25756 - DNA, 522 bp, Oryza sativa
ctgcaccccactgcagaggtttctaaaacctttgatgagaagataaggaattattgtgacgtgacattgatgtcactggcatatgctgggacagggaacgtgcttaaggtgattcccaattaacagaagaattgtgcataggttgtaggattacatttttttagcgcctatttgttttgatgaatcttcccgtttgatttgcaggttcagaaactccttggaatttgctccgagcatcttgagaaaggtgaaacccaccaagggccagcagttcttggaatctccctaattgccatggctgaagaattaggggcggaaatggctgtacgttcccttgagcgtcttttacagtatggcgagcagaatattagaagggcggttcctctagctctgggtttgctttgcatatccaatccaaaggtaacagttctttttgtatactagtagcattaaatgtgtgctatcttcatgccgttgcacacaatcatttaattggattgttgagaaagaactatttaatag

SEQ ID NO: 25757 - DNA, 1506 bp, Oryza sativa
cagcagcaacatgagtcagtatcctaggcagctttcagtatcagattctgcttatctaactgacgacactgaaattgtgggaaatgctagtgtaactagaagattgacacagtgggtactagaggagagacaagatcgatctgtcatgtccatcttcggcatgggtggggtaggcaaaacaactatagcaagcagtatatttaaaaaccaacaatttatgatggcctttgcttgcaatgcttggattactctatcccagagttatgaaattgaagacttgctaaggcaaatcagcaagcaattgatggaccaacaggtgtacttggctagtaatgtcgaggctatgaatcgaataaaattaattgaggaacttcagatctacctaaagcgcaggaaatatctaattgtcttggatgatgtatgggataaagatgtttgattattcttgaattatgcatttgtcagaaacaatcttggaggcagggtactgatcaccactcgcaaaaaggatgttgctttcttagcagatcacaattgtgtagttgagcttgaagctcttccccatactgaagcatggcatctattctgtaagaaggcgttccgtagattggaagataaaatgtgcccagaaaatcttagaccttgggcagagaaaattgtgaccaagtgtcaaggattgccactggctatcgtagccatcggaagccttctatcataccgtgaattcgaggagcaggagtggaaactgttctacaaccaacttggctggcaattagctaacaatccagagctcaattggattgccaatattctaaacctgagcttaaatgatctcccaagttatctgagaagttgttttctatattgcagcctctttcctgaagactgcaggataaaagaaaaatgcttgttgagttatggattgcggaaggtcttgtagaagaaagaggagatggaacaacaatggaggaagttgctcagtgttaccttacagagctcactcagcgttctcttcttgctgtcatagaaaggaatgcatgtggaagggctagaacatttcgtatgcatgaccttgtgagagagatggcctcaatcattgctaagaaggagaggcttgctttttcatatgacaatgttggtataacccaagttgcccatgaataccgccgtttatggatccaaaaggacgctcagtccctcaggtatttaggaggttctaaactccgatctttcgttctgcttgatatcggagaaccatcttcttggatttatgatgctttatcacgtttcagactgctaagagttctgtgcctgagatttgccaatatcgaacaagttccaggtgtggtcacagaactatataacttacattatctagatttatcgcacacaaaagtgaaacatataccggcatcattcaaaaaccttatcaacctacagtttttagatatcaggtccagctatgtggaagagttgccgttggaaataactttgttaactaatttg

SEQ ID NO: 25758 - DNA, 1107 bp, Oryza sativa
cccctttgttttacaaaccaggcatttgagagttattgattgatagagctttaaaagtaggaccaaatcttgttctaaacgttaaatattcattatcgactatcgagtcgtgtgagtagcccatgcattcagatttggacacattaactccagatcatttcatagaggcttcaaagcccacatatattttacagccaggagcacaagtataacaacatggaaatacagcatcgtactgactattattttctttctactaagctacaaaaaattacagcattcctcagcttgaagctttcagaggcagacatagctctagctcacctggagccacttacattagtctacttaaatcccatagctaccactgggattctcacaaggtgacctcggtcccctttcatggggatctctccaaaactgtaggtgccagtcactgacctggccgtgagggtcgccgttatctctctcgatgcgccggggagcactgtcagcgctggaggtgagacctccagcgcgatctccggcgacattcttgtcatgatggtgtaggtttcggcctcggcggccacgcttgtaactgtccgcttcaccgtctgcgtgcctctaagctgggagatggtgattgaggggatgttgagatcataggggcgctgctgcaccttggagctggagctgcaagttgaaccagttatgtttgatacttcactgtgttccacgtcggggatcgaacacaaaaatgtgatgtaatcttgatgagctaccaacaaaaaaaaattcaaacttagaatggtcttcagattattgtctgaataacatggagcagtttgaatttattaaaaaattgcatacgaaaaatttaacttacttgcatccagaacaaggccaggatccagggcggcttttgggttaaccgcaccactgccataatcaaacggcgtagccgtgtaagtgtcataatttctgatgtagagtactgttgtgctcttaaaggatggctccccttgtccaatgtattagatgtagtcatcaaggcagattttattgctgagggactccacttggggttcttctgttttattagtgccgcgataccagcaatatgtg

SEQ ID NO: 25759 - DNA, 508 bp, Oryza sativa
ctgcaccccgtgcatgggatgaggctcacatggcgtgctatgataaacgcgaattgcttcttcagttgaaaatcatcagttgctgtaaaaatcggcttcaactccagggactacaaatcaatgaaatatttgtcagtgccctaatgtactggacagcaaataggacatgacaatattcatcacccaccttgtcataaagcagaagtgcaatacgcaaagcatttgcaaaatctccaaatttcatgtaaatctcaaaagctattttaagtgccgacatgtcatcaggagcaggaagatatctgcaagtttgcatcccaacacaaaagagtaaatgaagttcaattaagtaaaactagataatactaagctttaatcaagtgagaccaaattcagtggcatacttagaagaactagtgaggtacaagcaggtccttttgtagttcgtggagtcaacgtgcttaactagcaaatcaagcttttcgacctatgaagcaatttgatatcacac

SEQ ID NO: 25760 - DNA, 814 bp, Oryza sativa
ctgcacccccagcatagcaaatatatgtgtaaacgtggccacttgaaagttgacacttcatagtgtaatataagagcatctaacattacaagccttgataataccgaattctgcttcacgtactcatacaacacattagtccatatactacaagtagaggtccacaggaagaacaactccagaatgctgtcttattcgcacatatttacataagaggtcacctgggcgacatcgccatagcttaagcttgataggcgcgacaatcgcgaataagatttatacaaaaaaccaacatgtgaagatcttagtgtagcacgttgccttcacatgttcgttcttgcctgtcacatattcactcctgcaacaacctctgggtgatagtggagcatctcctgccacatcatctcccggatcatatccacgccaagattttcatcgatgtcgagatcgatgggcacttgagcaggagggtttgcgcttggatcatacagtggagacatgtaagggtgctccagagcttcagtgacactaatccttttggagggatcaaagacgagcatcttctgcaacagatcaatggcaagaggatgtgcttgcgggtacatactggtgagggggatgccaggagtgtatggaagggtcttgatatacttgcgggcctttgggttgtcaatgaactcaatgtcagcttcactcatggtgccgagaacgttgactatgagcttgagctgattgaggcactcagttcctggaaatattggcttgcggccaagcagctcagcaaagatgcagccaacagaccagacatctatgg

SEQ ID NO: 25761 - DNA, 697 bp, Oryza sativa
aatgatttattctcatgggttgcagctgtagccaaatgagaaaactgtaaattaaccacaagtagaaatttctatgtaactgtcagattgcctgcatttgttgacatgattgcaatctagtaacatatttgctatgggatgcagtaacatatgacagtggaattacaaaggaagaaaaacagaggattgtctctttcacacaaagtattttcacaatgagataaaaaaacacaatttcgtataaagatctacctacagtcctacaccctacataacaaaaaaaaatcaagtgcagctgatgctgccctatcattcatacttctctaaggctgtgttcggcagcccctcttcccaacccatctccctcgttttccgcgtgcacgcttttcaaactgctaaacggtgcttttttgcaaaatgtttctatacgaaagttgcttaaaaaaaacaaattaatccatttttgaaaaaaaaaatagtaaatacttaattaatcacccgctaatcgctgctccgtttccgtgcgggcacttagtgttgggaaccaggggttccgaacacaccctaagcgcagacaacaacattgagtgatttttatttatttatttattttgggggggggcgaagttaaaaggtaggccacttagcttaggtcattttaattcattttgtacaatttttgttgcccatgaatgca

SEQ ID NO: 25762 - DNA, 693 bp, Oryza sativa
ttctttcattggggtgaagaaatacattatgcaattcatatgatgatatggattagggtccaacctggcgcttctggaattcctgtgcaatttcaccagccaagtttctagcaagcgagacattgacattgttagaaaatccaattcaaattcaaaagacaaacatatgtattccaacagaagacctgaaaagaataactttttatcaataatttcttgagtacaattcaatatttttttaatacactgagaacagttaaatatttgaccacaccataaattctaaataagctgatatgaaggtaattgtttggtaattcatcataaactacctcaggaataaatctttacaattaagattcacaagcagcaactgtctcattaataaaattgcaagctaaacaatttaggaggcctggaaattggtgtcacctcacatattcatgaccccatgaaccaatgtcaccttcagagcctatcattcggtagttgaggctctcctgaaacgataaaagaaggcatattagccaattcttgaaggattgatactgtacagttaatggtgagaaaaagttgaactctatctgtctatcatttaaaacccacgaaaaaatgtatgactatttatagaagtaaatcattctcagaagttagcatgcaagcaaattaaaaaagcactgggaaattgacaca

SEQ ID NO: 25763 - DNA, 29597 bp, Oryza sativa
gcactcaccattcctgcagcaacttagctaatacacttatgcacctctgcttagtaaattaattaagcaggaaactgcaaaagttacagtagtgcagaagctaagtgcagtgactagtagtgtgacatcgtcggaggcgaccggccggaactgaagaataatgaaggcgaccgcggcgatggtggtggtcgtgctgctcgtcgcggcagcgtcgttgcatgccgccgacggagccgcggcggcgccgcgccgcgtgctgggagctgacggcggcggcggtgatcagtcggagagcaaggtggaacataaatccggctgcacgaacaacgataacacacccccttctggtgtctgcccgccgaacgcgccggggccgtgattaatttgttcagctacacgtcgtcgcccgcatcgcaaaattaatactcctatataaattaattaatcagtataaattaatactcctatttggctgatgaattaattccttcttggccttgatgaactatattttttccgtaaataaaagtaagttcaggtgtgtacttgttgcatcgcgtttgatgcacgcaacacgtttaattgattcaacgaatgttgatttgttcagtatactcattgggctcttcctgtaaaagtaaatgatgaattttgttttggtgttttgttttgtgtgccccgcttgaatctgcacaatacattttggaataattatattaaggatgtcggtctgaacaaacacccatgttaaatacagtaaatacaaacgtcatctctctctatctaatctacctatctaaaaaacgagaaaaaacaaacagagacatacaaggatttgaaccgtttagacgtacacattgttatctagacatgtggccacgatcctgctttcttatatactccctccgttatgagatatatgacatttctgacagcatcgacgaaattaagtatacaacggtgaagtgaacatggcttaactagttaactagttatgttttttttaaacaacccacgtacctaggttcatgacctagactagaaatggattctcgtatttacgactaattattttttcagcgctagccgacatacccgtcaacatcgaggtgcccatggtgacttcgtcaatctcaaaatatctcaacatagtctttcggatgtgctaatagggtagggtgtatatgtgtgttcatatatatgagtgagcatgggcgtattgtgagcacttgcatttgcactgtgtgtgtttttttttaaaaaaagtatagagcgaatttactattttaccctttattcctcttcatcgatgtgtttgtccatgccgctgcgtcgccaaagccttggacgacgaggaggaccgagggggtttccgtctcccttcacgccggctcgttcgccatctctcccaagccacctcgaagctggctcactcgccgtctcccacatgccacttctcgtgaccacagtgtttagaatagaaaaatatggatctcacaatgcttagagagaaaataaatgtgggcgtgccagtgtatctaaatacacaaaatataaaacatgtacaacatatacagatacacgtgatctttattaattgaattaataagatatagttttcgtgtataatataaaaatcatgcaccattgcttgtcgttgggcagatcttgacatcagcgatgtgatcttctggttctcaggacctcgagaggctactggttattacctccataggttagaacctattggagaacctccgaataaactgcttgtgatcatctttttgtcttaacttcgtgttcttcatgcataatgataagatgggtgttgatgtagatgtgtgtgggtgccaacaacatatccacggcttcgtcggttcgtgcgccggtatcggtgacaagccttcatatagtctcgatccgcccgccattattgttcaacctcatcggtcttgaacaacgtgtaagtgtagtttgttggtgaagacatgatttgcgtagcttgaatagctcgatgtcacaatagttgcatcgagattatattagaaagggagaagccattggagaccgtccgtgttgatgatagcctaattaatcgtggcttggcacctcctacggattacgacggctctataattatgtaagaactagaggttggttgcattgaaattattacttcacgactgttaactagcattagcatatgaatctaaactgcaattttattaattatttgcatgcaatacattaatatgaacaatagcatactgaaattatgcactgccttgcaatatttgatgattatttaaaaaattaaaatatgacacactcaatttccaattgtcagttcctcattaattatttgaatagagaaaaaagtataaaatggatttaatatttacctgaaaccagcttgacctgaatacgcctgtaggtggtagctagttctggtgatcgatcagattgtgtgatccaaatggccgctagctcaggttatccgtgacgtcataggaggaaacttcatatgcattacatcatcagattaattaattgatcggtcattctatattatcccaggcaattcaacgaagtcacgattcaattcaactattcaagcagtctttgcgtcaaaaatgaaaatattcaagctgtcaatttgatcaggggctgtcagtatatttactgtacatattcttgtgacaattcagttctcaactggtatcgtacgcaaagaatgctagctggcacgtacatacatgtgcgaccgttattccaacagacatggcagtcaaccgggtcacatcatgtaaactagctgcatttaattgtatgtttagttccatgctaaaattaaaagtttgactaaaattgaaagtttgaagaaaaaagttgaaagtttatatgcgtagaaaaattttgatgtgatggaaaagttagaagtttgaagaaaaagttaggaactaaacaagggctaaaaactggatgaaagacttacaaaaaagagagagagagagaacatttgtatgtacgtagagagtctattttaaactctcaggagacttcccttggttacttgcatgttactcgaatagttatgaaaatttttttgagtagatgtattaatatgtgatattaatatcactctacaaacattcaacttttaactctataaacattcaacttttacatgtcgccacgaaaaaaacattttgattgtgaacatatcactgctagagaaaccatctttggtcggtcggccaaaatttacaatagtcctggttctaataaaaatcaggactaaaaacatattaatttagccccggtttaaaagctcaggggtactttttgacaccaacgggactaaagatcatttttagtcccggttcaaaaaaaacagcaggcggggttagacacctatattttttttagtcccggttggtgttaccaaccggaactaaagatctatttgtagtactggttgacggttggtaacaccaaccaggaaaaaagatcggcatacgcggagattgagaatgaggtgtgtgcgtagattggatcgaggaggcatgcgcacgcggtttctatctcctcttccctcccgggtctatctcctcctcctctcctttatctcctctcctcactcacccttctcttcctctccttctcctccccctcccccctcctccccctcctccccacttctctggcaggcggcggcggcctcgcgtggcggcggtggccgggcggcggctggcggtggaggccggcgcgccggcgaggaggccatggcggtggccagcggtggaggcgggcgtggccctgtatgattttttcttttttcctttttgattcgatctgtgtgattcgatgtgttgatttgatctgtgagaatgaactatattgttgtgaatgattttgagaatgaactatgtgttattgtgaatgatttgagatgattatgtttttgtggatgatttgagatcgatggtgagagatgatattttttaatgatttggagatattgggtgcgagatatgaaaaaaagaaaaaaaacctgttaccaactagaattaaaaataggcatctttagtcctggttgtataaccaggactataggggattacgaaccgggagtagaaagcctttctccagtatgttaactatttgtagtttaatttgctttttttcattgcgacatgcagaaagctgaattttaagtttgtcgagtgatatatcacatataaataaatcttcttagagcttttattaactatttaaaaatgacatgcaaacaactgtaagcatcctctgttcagaatagtttccctatgtatgtacatacattacagagcttatcagttcggctttatcgtgattcatgatttcaaagtgttaaacggaatattttatatattagtaaagttttttcttaaaacgttatataattttatttttgaagaaaaaaaaccatcatatagctacacgaagatatatatagttgaagaaactttgaagctatatatactatgcaaaatgaatcgatccatgcaaccatttggattttcaacgtagaaaacggagaaaaatataaacaaatgctatcgatcaatgttggacccgcagtctcgtatgaaatgaacgattggagaaattttacaacgtttttcccacataatctattgcacgaaaaagctaaggtaatctcctgcttcgactcgagacacaggagactagctagtcaaacgtttcgcagtgaaaaacaaccgctgggaaaggagtgatgctgaacattctttgtttgactagcttgacgcgactctagctagctagctgaacgatcagtacacacgcgttttgttcatctgtgatgcgatgcttaaattaaacaggtcgtctcttagctaccctccgttttaggttataagataatttgactttggttaaagttaaattattttaagtttgactaagtttttacacaaatatagtaatatttacattaccaaattagttttattaaattaataattaaatatatttttataataaatttatcttggatcaaaaatattactattttttttataaagttagttaaatttgaagcagtttgactttgaccaaaattaaaatatcttatacgctatctcgatcagtacgttgccagaccaagcatgcacaacgtttattatattttcgcctctttttcttacgtaacatccatgtcatcatctagccttagctttcatgaattaatgatgaattcatcagtgtttttcttcatccggctggccggtggtctcatcattaattcatgcatgcagcgtacccttagctttcccagaaattctcggtttaattcctcgatatatcgatctcaaccatgcgtgcttcagaagctgttttttagatgacagattcagctttgaaaggaaagcccaagaatgaaacatatatatagtctggccgaaagcgatcgagttgatctcatcaagacatcaaccatatatagggacatcacgtgttcatcaaattaatcttcagtcagttcttgaaagttgaatcttggactcaaaacttacctccaccgttttacaatgtaagactttctagcattgcctatattcatatagatgttaatgaatctaagagaccttttgcagcacttggaaggtacccaaggtacctctcctcaacttaaacatccaccgttgattctcaaagagtagattaggaattgaattaacataaacatgggcagtttagtaattgttctttagccatcgtaatcaaccgttctttattcttttgctatatctttctgcacacctggatgtaatttttcgatccatccagccgcacacatacccctatataatggatgactcaaatttcaaaactaggttttatacatccatccatctttattgtctttagaaagtaatccatacaaagagacggaggcgcatcaatcaatttttcgtttggaaatcttcagagtcacatgcaaatctcatgcggatatatggaaagacgcgtggatcaattacttagttctaatcatcaattatgtggtcttcaattagcatctagttacacgatctgcaaacattaatcaagtactcctagacgccgtagttagtttcttcattagttatacagattaggtgcaagccgtgtgcagtggcatcaacagactgaagacgttatcatctctctgcgctccggccgccggagcagcagaaaagtttcccgtttagttcttcctctctttatgaaatatagaaaccaaattacatatctaacctttttcaagtaatgcctggcccacatatttaagtaccttttcacatgtatgtggatcgttagattggaagccatgaacagatttgacgcactccaaacacagtagaaaatctctgaatatatatatatatatatatatgtctagattcattaacatttatataaatatgaaaaatgctagaaagtgtcacattattaaatggagggagtagtacttcttcatcagaaaccatgcataccaattcttccagtttgatccgtcaagaacgctgtcgatcaatcgtgcagctaggaaacttcaccctattttttctcttgatcgcgtttgaacggcgagataatctcgatcgagcttggactgggagctactagtatatattataagtacatctcatatgctcgatcaccacacctgcagcaattaataacctagcgcatatcaacaagcttagccaagctgaagcgaactgcaagatagctagctaattaaggaagattaagccggaactaattaatcaagattgatgaaggcgaccgcggtgatgatggtgctcgtgctgctcgtcacggcggcggcgtcgctgcatgccgccgacgccgccgctgcggtggcgccgccgcgccgcctgctggccggagctgatgccggcggcgccgttgagtcgccgccgccgccgccgccgctggtgtctgcgagcaagacgtcatcgggggcttccgactgcacgcacaaccctactaagccctccactggtccatgcccgccgaacgccccgtgattaattaactaattgaccagctacacatatctattaattaattccttcgtggcgttgattgatacagtagtactacattatactccaaatatttactcatatatatatgtagtatatatattatggttcattaactatagttggttgtcgtaaatactattataggttcagttcgttaattaattagttgttcttgggttgtcgtcaataataccagtaggcaaacagtgccacacatatatacaagtgtcaccgtgtcgtagcttgctgatgcgaaccttagatattgctgtagtttgatttgttctgttgatttatgtacgtatacctcacaataaagacaaacaaattagtccattaatttgttcagtatttgttgggttctgtacttctgtctgtaaattaagagcatgtacaatagtaaactataagccaactataaccatatatcgagaagaaaagagaggagagagaagaaagtgtgctatagatttatagccggctgcaacacggactccaaaacgttgtgtgtgtatgagaggtgggaccgagtattaatggtgtaatatatttttatagttaactattgtatgaatgggttattatattaattatagttgttttggagccaacagttgactatattattaaacttgctctaaatgacgatgaatattttttctttcgccaccacgaattgaattccctgatgatttttgtttggtgtcgtgtactcgtgttccccgcataaatttgcacaatagatttgggaattattaaggatgcctatcctgaacaaacacccatatgcatatatactagaatcagtataaatacagtcgccatctctcagtctccctctcggcatgcatgtggacacaacccacggctttcttgtgtgtccttttcccaacattcaaatagaatctgttttcaagttttattgtatttttatttacattcctacatttttttggttagtcaattaatttgttttatatgacccaagtcaaagcaggttgcataagcaaccactacccagaaattggactattcctgatggcaggaaaaccatcactactggagaattgataattctccggatggatggtaaaaattacattagtttcggttcaaatagaaagcaggattaatttttaggttcaaaagccaacgaaacttttttatctttagtcccggttgataacatcaatcgggactaaagatcattttaggcccggttcaataactgtcaggccgtgtcaggccatatatttaatcaaatatctctctcacacatccttatctttatttctcgtccttatctaccgggcgcgcctctctcgcctcacctctctcgatctttctctcttgctcgctctctcaagaagctagcggcagcggcggcgccctggcggcgaaagctgtagtggcggtggctgcaccctcccctccgccagatccagctggaggggaggcggcacgatgggaggccgggcggcgtccgggctgcggaagtagcggcaatgggagtttcctgtcaggagacatttgtcctgatggccacggttaacccaagcaaccataagagataaggtccgagatgatatatatacagctatatacaatactcggtggactataatcctcaaatatcctctcatttttgcaggacgagatagaaaaagataaacatgcaaattgaaattcaacatatcctcaaatatcctctcattcataaaatattaagaaaaagataagatagattattatgttatatatcattctataaacatgcaaattgaaattcaacatatacatgtaggaaaaaaataaatttaactgtgaatagtacttgtgtacactactacataaatactcatctatgcaggatgagaacccctcatcagtaccggttcctcaaccaaaactacaacgttgacactgatgagtgggtggcaccaatgctggtcttggacttggcactcattgtttgttggttttgttatacgatgaatgaatgaattactccttggtcttgatgcaaaaagaaatagggcttagacttttggacggagggagtacttgttgaatggaaaatttgaatgagattattcatgaattaatgatgaaattcatcagtgttttttttttcatccggcttggccggtcgtcttatcatgcattcatgcatgcaaccccttagctttcccagaaaatctcggtttaattcctcgatatatctcaacgatgcgtactttagaagctgttttttagattaacagattaggctttgaaaggaaaacccaagaatggaattaaacatagtctttgccgaaagcgagtcgatctctcatcagtcatcatcaaccacagggacatcacatgttcatcagcttcatattcagtcatgctcttgaaagttgaatcttggactcttaaaaaccaagtatagttcttcagaaaccatgcataccaagtcttccagtttgatccgtcaagaacgctgtcgatcaatcgtgcaggaaacttcgccctaatttaattttctctcgttttgaacggccggcgagatcgatcgatcgagcttggactgggagctattataagtagctcttcatatccagatatacctgcagcaattaacctctagcaagctgatcagttaattaagctgaaacgagctgcaagctaatcaagctctaagagagtgcgacctgcgacgtcggcgattaattaagccggaattactgatgaagatgaagccggcggccgcggtgatgatgatggtggttgtgctgctcgtcgcggcggcgtcgctgcatgccgccggcgccgctgccgtggcgccgccgcgccgcctgcttggagctgatgcatgcgccgccaccgccggcggtgtccgagagcaagccgtcctccggctgcacatatggccctaacttgccacctggtatttgcccgccgaacacgccgtagctaattaaccagctatacacgtacgtacgtcgtcgacgtcgagcatcgcatcgcatacaagcaaaagatttgggctgattaattcattccttcctttgatttgtagctagcgttgattgatatatatatagatcatatgtgcatatatgttactacctgtcatgaatatattggttgtccaaaataaaagttttagttagttattagttagttgctgcatattgttgatgcacgcaacaacgcccaagcatagtacgtggtagtgctggcagtagcttgttgaccttacagactactgtagtattttaatttcttctgtagatttatgtatgccccaggagggtggtttcacgatataaataagagggaaaatgctgatttgtttagtcttcattaattgggttctgttgtgctgtaattaaatgatgattttttttctttcgccacgaattgaattccctggtgatgtttgtctaggtgccgtgtctacatgccccgttcccgtggcatgaatcttgcacaataaagtttggaataattgggatatatgtcaagttttaatcaactattcaaaatagattattaaatacaccgtaacactggatcatggaggagcgtccatatataatttgtgtcatagggatgtcggtttcggctgaatcttgttaataatatcgtgccctagtgtgttgtcgtgtttctgttcttgttatcgatgcgctatcatatataacagggctctagtggacctactctaaaaatacactctttagggggaaaatgtttaggttaaaattacactccgagggagagtagaatttatctaacagtatctctttaaaataatagaatttatgatattcgctttaaagaagctacaaccaattattacaaatgttgtagatcgagactgtcacctataaaatcacaacttaaaacaagagaactacatataactccaacaaaaaatagataagaaaaactttcatctagagttagtgaggaatcgcataaaacaattgtttcgcagaagattacaagttatgtagcatcttcctcaaatcaggaaatcgtatccccgaaattagcgtccgatcatttttccgattgaatttcgctcacatcaccatcgatgactgaaatcgaaccgaaacggaagataccgttggagagaaactcactaatcaatatgtcattcgcatgcagttgccactgtaatagccatcaaagtcgatccaaaaattaccaatgtcacacaaagcctccaaaacgatgccttcatgaaggacacaacggagacatcgttacgacttgtctgaaaaaatgccccagctagcggtggtgagtcgtttgcacgtcgtccatggcgcgcttcgtcaattggtctctgtgcaaaaaatgttatacgttgatcattcttggatgagatagtactactcaaaagatattcagactgaagatcagttatgctgcctcctgtcctgagtgagtaagagtgcgacacagataaataaagttaattgttcatttataccaacaaattaacagatgaatcagcgcatagctaattaactacatatatacatacattattctgcaacttgctagctctgaaacgatcaattattctacgcgtaaaatttatactattataatttataaacatcagcaattcatcggaagtgtacgtgtagacagtgtagtgatatgtatacatatcaatcacggcatttttggtggcgcgcagggacgtccagaaatatgggggtcgttgctgcagccagaaggccctgacgacgccttgctgacggacaccagcggaggcggctgctgacggcggccgccgccatcctctccgagacggcgcgccgccgcgaccgcgacgccggcgttcagagacgccgcgacgagcagcagaaccagcagcgccgccgcaccttttcctcctccctccatgtcgcaagttcagcctgaaattaagcctcggttcttcgttgctaactaataagcagctagtagctagattgaatgcttgatcaagttggtgtttctatggatgcaaatcaaactgtaggatatgtgggtatttataggtttcagatgagtatgatcgaccaagttgatgatatttttccgcgaaattaactgtgcaatctgacgcagaagacgtttttgacggattaaactggtgtcttattcaatttatcggtgaattttacgcgcattgtgcagatctgtgatgtcctgaaatcaaagttctgctggtttctgtactggactgaagattgatcattgaaaatgaacaaagctgcgacaaaattctttacgtcgcagctttgttcaagttcacctgggtaatggacacatgatcctcttctggaaagacaattggctgcaagaaggttgcgttcgatctattgccccttccatctacgtacgatcatgttccggcccacgtgcgctggcatcggacggtggcagaagcgctgctggatcgcagatggatcagagacatatgtggggcgttgggtatccaggccatcccggactacctcaagctttggtcgcttgttcaatctgttgatcgcagtaccaccaacccagattcactcagttggaaatgggagagtttgggccaatacaattccagatcaacctatatataaggccatgttcttcggtcctttctctcagccccaatctggaaatcgctcgccccgcctcaacgtcatttcttcatatggttggtagctatgaacagatgctagacaaccgatcgttttacgcaaccgtgggttgccacacctggatcgttgtgtcctctgcgatcagcaagatgaaagcattgaccatattttggtagcttgctcggaatcaaaggcaactttggtggtagacgttgagagcgatagagcatccagactgcttgcctctaaacgagacatctttccacctctgactttgcagaagccgaatgaagattcctaagtcacatcaccgaggatttgacactgtcgcaacgctggtggcttggacgatttgaaaaagaatgaaacaatcgggtattcgatcaacagaacaggccttgggtcgaggtggcaaagggaaaggttgaggaagcggtgctttggtgagcagcaaactcaacgattcccttcattttgccgttgcgaggtcgtggtagccaacttatttttcttcttgtttgcttctcatgttttggtctcctgctgatttttaatttactttgtatataacttttatttctcttaatgaaaaaaaatgcgtttcttgtgtattcctgaaaaaacttgaacaaagcattgtaaaaagtttgaatccgtacaatatatacttgactgaaagttaatcagctggtatgcataacccatttgacggctaagtatatgttggaattttgatggaatataacgagaaatttagctagtcaacaagtgcccaagtcattggttgatcacggtaggcgcaaatctccagtcgtgatcgatcaggacagtccagataccacagaatattcagagcaaatctttgccatggttgaaatgttgacagccttgatggcagacagtgatctggttcgctggcccaataggagtatccgttttttaatagatgacgccgttaactttttctcacatatttgaccattcgtcttatttaaaaattttatacaaatgtataagatataaatcacacttaaagtactatgagtgataaaacaactcataataaaataaattataattacgtaatttttttttgaataagacgaatggttaaacatgtgagaaaaagtcagcggcgtcatcaattaaaaaatggagggagtactaactaattaattagtcgtatgtaggagtaagaaaatatgtacaagtaatgacaacttatgcacgcaaaggtcccataaacaacacagagaatttacttgacgacgatgttcttttcagttacctggaaagcaaaaagtatatacgtactgtagccttgtttctggatcttccatggtttctcgacattgacatgtatgacaaggatatatgcattgttcaatactttgatgaagatgtcctgctagtcgtaggtctagtcttctacactgactataaatgtactagactgaatgcaaaaacattctcaatcgttgtcgatgtttcagagaattttacacatggatatgcaggtttgtaatatagaatgataccggtttgacttgaatatacctgaccgactatatatatatatatatattaaatttgtttggtgctccatggtgcccgggtaccattgttgaaattgagtatatacccaattcaaatgagtatgaatctttttcaattacttaggtattaacattaactactttactaactagttcaaagcaagtttgaactgaatttgaacttgtttttgttagattttgattctaggtatatagcatccatacatataattagttaggtatgtaatcatggattgtgaaataaagttaaatttgagttgttttgttgataggtataggtatgaatcgaattattataactaggtatatactcacaatttaaaattttgaaaattttgagtgattttgtgcattagataccatggtgccccatatgagtgtcctatatatatatatatatatatatatatatatatatatatatatatatatatatatgatgcgagtcacacgcataattggactgatttgaagccctagaaactagcttgacttttcaatagtagaaaaaaaaaagttcgacttaactgaatggatcgtacgtaagaggatgcatggaccgacttgcgcttaattgatcatagacaagtcaaaagcttaagttttcatatttttttagtgaaaaaagcttaagtttagtgtaattttaccgtccttcagaagacactggacctactaaattttcaagtgtaaaatttttgtacgtctaattaagtactaattaaacatctgttttatgtaaaatttagtaatctcgagatattttctcgaagaaacataaaaattctcttctcgttgtatctcatcactcatcagtcgttttgtccgtgacgtcacaacaggaaacttcgtgcatcacgtcagattcgatattgtacattgttacggcaatttttcaatggatgccgtacgcaaaataggatctggcacgtacttacgtttattacgtgcgtgcgttccaatagacttggccgtgaagctgggtcatgcatatatgctagctgcgtttacctttcaaacattcaagtgagaaatttgaccaacgaatttctagcaaagatttgtatatatcaaaagggtataccatttccttcactgttttactgttttagtacttaccgtaacatatatagagttacacttaaataaccattcaaaacttcagttttatttgacgatagaactataaaactccgtgataaggcgcggagtgccaactaatagtactacatacacacactcttacccttgcctcaactttcgagttgtagtcttattggactaaaaaaaccatttttctatatgatagcttttttttctagacaagtatggacatggagcgaaaatgccgcctacgaaaatggtaaccccgtgtaagtttgtagcccgccatcaaagataggtttttgcaagtggaccacataagggcgccgcctgcaaatcatctttggcaggacattaattaatacataaataatatcttaatattatttatgcattaattaattatttaattacaacattattgataaaaaattattactaaaaaattggcaggaaattttaaattttggcgcgcacaatttcctaggcgccggggccttcttatcgtaggtggcccctacctttttcccatgtggtgcgtcgtgctcccttccacctaggaaaatcatcttcccgagcggaccgactggccgcctgcgaaaatcaattattttcgtaggcctttgcctacaggtggaatctctatccacctggaaagaccgttttcggccgcctgcaaaaatatttttcctagtagtgccaggtcattggtttttcttcaatttcatcttcgtccactatgactggttgccaactgtttgtctccaatcctcttctagtactatctttatttttcactagcgtaagtcaaatttaaacttcaaaattttcaggatagtacatatgtacattgaatgtcagtttttttcaaacaaaactgtaacaatttgtatgtattttgagaaattgaggggacgtccaactcaagtcaagggagaagagatacttaatttcctcatggaaaatgctctttgttggttgtccagaatggtccaaagtctgcaatgcaaactggtttgacttgaatgtctaaaccggttacaatggctttttccttgtcagttctctgcagccaggtttttccttgttttttcctttttgaaaagtaaccaagggcaccctgcaactcagcaacttgcaggctgaagagcgctaaccgtgtggaaatacatatgcagcttgtgagagtattgtttgcctgaaaaaactgagggcctgtttagttcccaaacaaaatttttcaagctgccacatcgactatttagacacatgcatggagtattaaatatagacaaaaaaaaaaccaattacacagtttgacaggaaattgcgagacgaatcttttaagcctaattgcgccatgctttaacaatgtgatgctacaataaaatatttgttaatgatagattaattagacttaataaattcattttgcagtttcctggcggaatctgtaatttgttttgttattaaactacgtttaatactttaaatgtgtgtccgtatatccgatctgacatgcaggggcaaaattttgtgccaactaaacaggccctgaaatggtgaactaaacaagatttgtcaacaagaacctgcagcagtatttgaaggtagaccaaacaatttcctatggaaagttctgaatatctagtatccccagatcacatatcagtcgaccaaacaatttcctatgtatgaaagttctgtataccatatatttccctttaaatttctttgctgcggcagtaactctgtaaatctgtatggccgtcaaacaggttaggatacagactagatctagaatatatttctcgttctatatactctagatgctctgcttgtctgctagtcccagatctcaacaagaagaatagtcatcgaatcagaactattagacgaagactagctagttacctagttcacgcttgaaaaattctggagtttacacatgcattatagtattaatagcgcagataatacattgccttgcatggatgaattcagggaaaaaaacttgaggaatatccatgttaattagctccccattaattaaggagaatatagtttgcagcgagaaaaaactgttctaaaacacgtgcattattaaactgatttgaataccagaaaccagcttgacttgaatggacgtgtgtaattcgccagagacaagtcaaaagctttaaattgtagatcaaattgtagtagtagcagcatctcaaattgtagatcaaattatagtactgtacattcctatgacaatttgatatagtactgtacattcttatgacaattctcaactgtagtcgtcgtacgcaaagaatgacggttattccaacagacttggccgtcaacagggtcaaatatcctgcattcaccttttattccagtttgatatatactcatgtattatgcacttttggaagtaataattgcaattaaagcttgttccagcaggtttgaatatttaaagatataccgtacttgctaactcatgggttgcatgcgctattattgttgttattatggattgaaaaaattatgctaaatatgttactccctccgggttgataatatttatcgtttagacaaaagcacagtctccaaaaaaacaactttaactattattttccattataatatgtataaaagtgttaacaaatatatgattttattaaagtacattttaagactaatctatacatgtaatcatcatatttgaaagataaatcttttaaaaataattcataatcaaagattctaaagtttaacctcaccctagtaaaacgacaagtattatcagcctggaggaagtacttattattttctaaattaaatataacagttttggattaaaagaagagtgaatgtcaattacaacttggtaagtaatgattttaaatttcaaaattaatttaatagaataataaactgagagtcctaaatgggaacatatacaaccccatatttattgattccagaatcatttctaaattatagcagactagcttgaacttaccatgtaaataaagtttcaactcgctaattactaattttgaatttgataattaaattgatataaaaagcactaagttgagagtacatgatggttagtacaacatatttactgatttcgaatttttagaattattatatattgggaaaaaaaaagtccatgttatctctaattgtaaactccgtctatcccataatataaggcatgatcaaactcggtctctaaaactaatttttagcttatagtttctcatatactacaggtttacagtaattaacaaaattataaccatatgaaactaaatttaaatgtcaatccaatgatattatttttagcaaataaaatttaattcatattgtactaattgttggtcaaatgttttaagagttgaatcttagtgtgtgccttatattatgagatggatggagtattttatctaacacggattctggatacaaactagtactagttagatcatttttaacttaacacgaaagattactcagattgcacaattaggtttagttattatataatacaatgaagtttaaagagtaatatgtaaaaaactataacgataaaggtggggtgacatattcactatcacctgtcactattagaatttttttcaaaggagtatagaaagctagaaagttcatgatacttaatggtatatgttttatttaattactacgaatacaatttatagttgtgattatatgatccatataatcaatggccgaataatgttcttggtgggaactccctcaaattgtccaattactaaacggacggatattaattcctggttagcgtgggagctttttcaaagtgtctccaattactatagtactccctccttccctaaatgttagacgccgttgatttttttaaacatgtttgaccgttcgtcttattccaaaacttttgtgaaatgtgcaaaactatacgtataaaaaaagtatatttaacaataaatcaaatgataggaaaagaattaataattacttaaattttttgaataagacgaacggtcaaacattttgggatggagggagcatatatcatcaccggtttaatccatcaaaaaagtttacaacatagtcgacgctcgacggtcttgatatcgtctgacatacatctctatatatgtatccatgtgacatcgagctcaggtagctgtatataagtagccagcactgcgccctttctatcgatacaacaagctatagtgaacggcaacaacgtatacacacacagagagattttcagccatcaaaagcacacacgcaccaaaaatacacaacattctagtactacacatatgatgatgaagcagggaggaggaaattgcaacggcggcggcgcggctggcgggagggccacggccacggcggcgctgctggtgtcgctgctgctcgtcgtcgcagcatcgcagccgcacgccggcgtcgcggcggcccgcctcctcgcgccgcagccgccggtgctggcgacggcggcggcccagtcgtcgtccccgctggcgacgtctgcagccggcagcagcaaatcatgcccgagtaactgcaccaataaccccaacaatccttccggttgtgtttgcccagcaccgccggcataacgagctgagaaatccacctacgtacacaacaaattgctgcagaatgtaccaagtcgcttcgatcgagttgttaattaattaatttgttttacagaagtagccgagaccgcgagacgagtgtatatatgcacacgttactaataaattgtttgtcatgagattctcatgcatgaataatgtagaaacctagctccgattctagctaggattaagccaatataattaaagttgcatttctgattgttttaggaataaaggctattatagagtatctgcagtttgtatatctttaatttcatttgtgtagctttgtcgctggagtggtttcttcgtttgtacacatactgcttacagagctatatatattttcaaaaagtctgtcacgaggtgtactaattctgcgtggttaattcgttcatcttaccatctagagaccccgagtttattattctgtcaccgagaaaagtaattccaatatgtaccacccactactactaggatgaaaacggatcgaatacggtcggaaactagctctatcatatttgttttcatattttttttcggaatcggtatcggaattggaaacccggatatgaaaacggaatcgaatattatcgaatacaaatacggagcaaatacgaagcgaaacaaatacggtgacggatattaatcggaatataaaaaaccctcaaactaagcatcacaagtcaacgaacaaatataactcgttatttttttaataggacatcagccatgttagtcgttcacccttaaacgacagtcacaactcaaaattgccctccagaaaattaatcctatgacctccatttcctgcgcttgtgtttgttcagaccggatcgagatgtttgcacggtcgccggtgtccactccactggtctgcaatatagctgcaggtgtgccactaccggcgggctgcaacctccgccagcttgcccggatcgaagccctagtgctccgtcgtcctcgtgctcctcgtcttcctcgtctcttccaggcgctacagcagcagcgccatggtccagttcgtcctatggggcgccttcgcggtgtcctacccgctcgccgccggcctcatgcggcggcgccggaggctgtggcgggcgaggaggcggcgccgacgaagaggcggcggctgtggtgatgggagacgagacggcggcggcagcgaaggggcgaggcagcggtgggcagtggcggcggccgcctagatgcgtgggggatttgggaggcagcggctgttgtgttgcctgttgctagctagctaggtttagttgaaactttacataacacagtacacacatagttgggttgggttgggctccttgggctgattcatatgaatggctgatgcagtactccggatatccgaaaaaaaatcccggatagtttccgaccattttccgattccgtcggatatcacccttactgtattcgttttcgtatccgagaaaaaaaatccgaattcgtttccgaatccgagaaattccggacagttccgaccgaatttttccgaatcctaaaattggtccggacggacggaaactatccgaaccagtttcatccctaactactacacaataggatgtcctcacatatatggcaattagatctacaagcggtgcatacacttgtccagatacatggtaaaaaaaggttttttttaatagagggtgtaagacattttcagtccacatactgagcctcatagaaggctaaaatttaaaaccggcacatataaaagaaattatattaccaccttacaatttgcatgtcttcttttttctttaaaaaccaacacatatgtgatattatatgtactggttcttaaacacatacttcctccgtcccaaaaaaagacaaatccttggttttcgtgtccaacatttgactgtccgttttatatgaaatttttttataattagtattttcattgttattagatgataaaacatgattaatactttatgcgtgacttatctttttaatttttttcatatttttttcaaataatacgggcggttaaacgttggacacggaaacccagggtttgtcttttttttttggaacggagggagtatactattacatgatatgtaccggtttagaaaaaactgggaaaagaaatcgagccgagatgggaccttttaatcaagcggaggctatagtctctagaactccagataagtccatatcaatctcctccatcacacacacacacacactctctctctctctctctcatacacacacacattctctccctccttgcctcctacctgtcctcgctcgcatcttcgcactctccccctactcaccacctcccactccgcctacaacacgcgactacctcatcttcatcttcaatgcactcctcgtcctcttcccggaccacccgacacgccacctctttcattggctggatccatttgtagctactagtgcatcaagaatcttgagggttgctggatccaggttttgtgaggtcgatggccgccgcatcggtcgaattcaagctcgtgacagctagatccttcatcgtgcaagcttgagggttgctccatggcgacgccgagtgtaggcagctagcgggaggcacataaacccacatcagcttatttggagtggaaattaaatcatgaattacccactatggtacaacttcaatttaattatcatgttacatcctcaatgaggccatcagattatatctatacatttaacgtctttgcaatattctttgtcataatttatagataaagtttatatataaatcataatttatatcataaattgttaccacattttcacaactctctagatgacacgaagagagcgaggggacatacagtagtccaaagcgttgttatatatggcatactcgcgcggttgtaatctatcagtctcctaattgattccataagaaatatcatagttagatttttcaacatacataacagaagagagacattttatcggtcaatgttgaaaatgagaatcaacgttcaatcggatggagtacgtatcacctgtcgctaattttcgtttggaacaataataatcaattaatgctgaacattctttgtttgagtcatgttgacgcgaccggctgatcatcagtccacatgtgttttcttcgtctgcgaagcgacgcttaaagccggcgccatctgctagtcgtccaaactcgaaacgatcgatcgttgactaaccaagagtgactttcttctgggtaatatgtactccatccgtttctaaatatttgcgccgttaacttttttaaatatgtttaaccgttcgtcttattcaaaaaatttaaagtaattattaactatttttctatcatttaattcattgttaaatatacttatataaatacatatggttaaatatacttatataaatacatatagttttacatatttcataaaagtttttaataaaacaaacggtcaaacatgtgctagaaaattaacggtgtcaaatatttagaaacggagggagtactacgtaataagtgacccagcacaacgtttaatttagtcgtgcgtgtacttcgtcgttttttgcttacgtaattacgatgtaatcagcaattcagcatgtgctgcctgaccgatctttgctatagttaactctgaataatgtattgttgtaaatgcacatattctgcatgcatgcaacgccgctggtatatgaaaatgtgaattagtcattctatttaaagtcaatttttaattctactttttatataggttaaattttaattaatttatatatttatagagtgatatatcatatatttatctatattttttagaaaaaatatgtttctgtagacgacttgtaaacaaggggaggtttcctcgagggacgaattgcacactttttaaaaaaagaattggccatgccctcataatatatatggtttcaacatttttcaccactctctcttgatgtcatgaacaaaacgagtatgtattgcgtactcgctcgtttctcatccgtcctaattgatttcaaaagaaggatcttagaacattacattaatatatggagtatactaaacgttacattaataaaagtaatatgcaaaattgaaagatctcatgtatatacagagagttagatttgccaacatccaaaatagaaaaaagaagacaaaaatattattgatcaatgttgaacacatgagagtcagcgtttgtcactcgcagacaatccgatggagtactacgtcctagtacaatgaatctaacaaagtgtcacatcaactctcaggccccctttgattcaaaagaaattcataggaattttagaggatttcattcctataggaatttttcctacaaagccctttgaatcaaaggaatgaaccctatggaataatatgaaattcttatggaatgcctcttcccatacaagttttggaagaattttaacaagaggtagaacctcatgaaagaaatcctttgagtttttatctctcctcaaattcctgtatttttcctgtggtccaatcaaacggtcattcctatatttttcctgtgttttgcaatcctctgttttacacttatattccagtcagaatcctatgtttttccaattcctccgttttttcattcctgtgattcaaatggcccttaggttggctttttttgacggagggagtatctcctgtcgctaattttcgtttggaataataatcaacgaattaatgctgaacgtccattcgtttttctcactcgtttgacacgactagctgatcatcactgtggccacgtgttatatatgttcatcggtgatgcgacactcaaagccggccgtctcctagtcgtcgaaactactggtcttcctcgttgactacaatatgaccaagagagtttacttccgggttatatatatgtacatgccaaattaccagcacaatatatgttcatttttgcttacgtaatagtattgatgtaatcagcaattcgatcagcatgcaagctggcccggccggtcttaatttgctagttaaatctgaatattactacaatgtactataaatgcacatatattaattcttcagtgcatgcaacgacgcaggtatatatgtaggaacggaagtgtgaattgaactatgtgttttattcagagccaaatttattatttttaactctattaatgttggttaaattttggagtgatatattacacattgatttaatttttttcaatttttaaataattttaagaggacatgaaaaacgagggggagacgttctcgaggggcaaatttaagagactttcgcatgcatgcatttatgtctacaactagctgggtttttctatctgaaaacgtgtgatgactggagttgtggactaccggtcgatctcactagctttcgatggtcggtcggttcatacttgttgggtgcattaatcgtatcctccaagaataacgtagtagctgcaggaaacgattgttttattgctgccctaagttgaacaatattcccagaaaattcccagttaattcctcgatcaatctcgcatatatgcgtgcgtgcatgtagctaggcagctgccagtatataaacacctccgtgctttcatgtttgagctcatcgaatccacacaggcaatatagagatctctatctccctcgatcgatcgatcacctgtattaactatatattaatccagctataactaattagctgcagtctcctgcacgtacacgtcggcagcgatggcaagatcgtcggcggtgatgagggtgatcatggcggcactcgccgtggcggcgatcatcctctcggcgacgctgcacgaggcggcggcggccaggccggtgcacggctggaacccacaggcgaagggagcggcggcggcggcgacgactcggcacggcggcttcgccgccgttcagctcgccggctctgtcccgtcctgctgcaccaacggcggcggcgccgggaattgcccaccgggtgtcacgtgcccgtaagtccggccggccggccgacacggccgccgtagctggaggagatgatcgagttatgcaatgcaagctgcggaatctgcagagtacagggggattaatattaagcacacgcttcaattgattttttaattttgttcgtcaggttcgaataaattggccaggccgtatataagttacaacggcattacagatttactaaagttcattggttcatcaacaatgatcattttgtatcatatgtatcgatcgatgtcatgacattaattagaagcattgattaattcttcggtatggatggatagatgtgtcatgtaagtatatatgctttgaattaatactctatgcaacaagcttgttgtgtacactctgtgcatgccaactaacaaattttacagaaaattctaaaaaaaatggacacatatatgtgtcaaatcttatcttcaaatccattataacaaaaaaaattctaacaaatttttactcttaaacctgttagattttttttcacttttctggtacggttaaaatataatgaatttaaatataagactttccaaataagtttaatactattaggagcagatgtccacttttttatataatttttcgtgatatttactagtgtgcacggaaatattgtgtgcataggatatgttctcatacatatacattgtctttctcaaactatgaaagcagcgtctctgaaaccagtggctgattctttgttgatcaaatttcactcctatcatcgtcggcgaactaacgggaaaaatcaaatatcccctcatttttttacatgttacttaaaagacataaaaaaattagtaggttagatcaatatgtcatatgtctcttcacaaatatgcaaattcaaattcaacttatacaagtaaaaacaaaaataataaatttaattatggatagaacgcgtaattaatggtcaaatttgtttttttttttgaattgtataagtcgaattttaactcgcatctttacgaaaagatatatcatatattgatctatcttgataatttttttaaatttttaataactttttagacgacacgcacaaaacgagaggatgtcccctagagggacaaaaatccacttccgaactaatgtcaaactaaagcggaagaaaacattgggagttagctgaattgtagaacagacattctcctggaacttaccaccataattaccattgaacccgatccgacaaggaggctgtcacaaggacattgcactaatagagaacctccatattaattcgacgacttcaaaaaaaattacgatattttgaatgttcatcatcgctattccggacatccaaaacaaggttttctcctcttgatggttcacccataggacagatgagagaagggacgtcaccacgccggtatatcatgtctaggaaggtgtatgatactcacaggtatcaccgatgttagtactcagatcaaacagaagcacaggtgcgacgacaaaggccgaccgactcaacgtatcctaactgattggacggtctatttatttggccgtcaaatgggttgtaattatgcatacctgctgcatcaggtttcatccaatcactaaacatttcagtatttgcgtgatctagactggtcacatatgcacgcaattgcatcaaaaaagaaaaatctagatgcatgcatgtgctacaaaagtaaattaccagtgccatgcttgttaataattagtaccacaggttgaattgctaacccctccgtcaagtacgttgcttataggcagaaacacatccattaatccatcgaaattaaactataaatagccatgcatgcgaggttagattaccacactggtggagaaaccctttgtagtcccggttccgtaacccccctttagtcccggtttctaaaccgggagtaccaatccaggactaaagatcgctatctttagtcccgggtgaaataaccgggagtaaagatcgatctttagtcccggttggtaacaccaaccgggactgccggctgagtcatctttagtcccagttggtgttaccaaccgggactaaagatcgagctgaccgttttttttttttgcatggccctgttgctgcatggtttatatatatatatatataacccatgcatatatatgtttcaatacatatatatgcatacatatatatatatgtatatatatatatattatattatattatatgtatatacatgcataatatatatgtatttatacatatatatatatgttatgcaaatgcatatgtatatagatatatatatatgaccaaaatatatttacattatagaaaatgtgtacacatgcatatagaaacatatgtagtcatgtattaattacaatccattatatgtcatagctagctacgatttcgacgtagtagtactcgctgctagctcagaagctaaggaccggtgaattgtgtttccgtcgtagtagaattcacccttgggatcaaggatttcttcgttgatgaatcccatgagttgttcttgaaccgccgcgataaattccttgtgtgtggtcaggttatccctcatgcgaataaactatatgaatgtatgaaattgattagtaattaaacaagaaatcgctacataatgaaattttgaatttatttgtacgtacatcgagctctcttgtggtgatgatttggtctgcaaggcagtggcaatactcgcacacgtaatagccgcacaagttagttccctgcttttgctttgcgcactacaaataaatgacaaacaacgagagatctaattaatatacacttgtatgtatttgaatcggagaaatataaatgtagagcatgtgtactcacaggaaatttgaacttccgcctaagtctttctctccatttgccgcggaccaaatgacggaaccgataccaagccctacatggagtttaaagctatgattcgtagtagcaattaacataacaagattttcttaattaacaaaggaacttatgacggtacctgtctataagttcgaaaaccttgtcaaacgtagactcttttttatccattgagtcatatacgttgacggtgcaggcctccaggtcgaagagtaaaagcacccagtggaatctgcaatgtgcgtgggatgcattacatatgaaacacttaggaagttcgtacgggaatgaaatttggtatgtaggaagacagtaaaattaaactaactctgtgttgtatagcaacagtatgaacgtcttgtaatgctgcgccttcaggagatggacgagattgtcctctgtttcttgtggatattggtcgagcattgcgacgtttactttccgagggtcgatgaatccagtatcgaaaaccctccgccgtcgggccctttgaatctccattctacaacgataaaagggagtatattattttctatagtctacttatatacaaggacctaattaattaaaggagacgtatagtaagaaatctaactgaacgatatacttacaaaatccagcaactcatgatagagac

SEQ ID NO: 25764 - DNA, 2321 bp, Oryza sativa
gagatcaacccatatttatgcagttagttgtttgacacgaacttaatcatcagtagtatagtgcactactgatttgtgctgaggtgaaacaaaattaaatctttttgaaggtgcaaccggctcatatttctctgtacggtccagtagtaggttatattatttgcaatcgcttcaactgcagttataattcaatactccggcatgatccactagataatctatcagctcaagatatatatagaaaaaaaattaagacgcaaagacgtcttagttcctccttataatgtcaacaacccatggctagtcagaatcattatactgtcgacaacaggacaatgttcttattcccatgtcctttgatttcaacatgtacagaggtacacaaggactatatgctactacagccaaggatgcagaagaggggggaaaaaaagaggtggcattggggtaaggcaatgataacattacaagttaactcgagcaacaaacagctgacaaataaacctgaactggtttcagtacacaatttaattacacgatggaggacgaaagtagggcggccgctgctcctgaagggagaagaggaaaaaacccgactggttttggccggccaagtcgcgaagcgcttgccaagaggggtggtatagcgactgtacaatatcaatatggcagggtcttaatctctctcacatgttatgatggaatcgctctcacatgaagtagctcagtgctttcttcttcctcgaaccgccctcgccatataggtcgttccattgaagaagttcattcatgtttgctgaatcagatgaaacgcttgcacaaacctgtggtaaataaattgatcagattatgaactttcaagtaaagagctcaaaataaatataaaatgtgctggtctcacctgctcatgggcagatttgaaatcatctaaggtcagaggacgaatgtcctcactaccatacaatgcaggctcaggcctgccttctgcttttgccacatttttctcctgaatagaaaggaagcgaaccccatattagcatataaaataaaaagcgttgtcacttaacagtataattgtagtagaagaataaggagtgcatctaaagacagcataaacccaaaaaacaaactttatctaggtcttcagttgacagcaaggtacaagcaatgccaaccttcttttccttctcaaggatttctcgaatggggtaatgagctgcggtcacgcatagattctgggaacacaagcaagtcagtgaaaattgtgcaaccatttccaatcacttgtgttatttgggaagcgcatcattatcaagcataccttcaggtcacttcctgaatatccatcggtcatagtggcaagagaatccatatcaatacctggagccaactcttcctttgccaatattactttcagaatcttttctctattcgatgcgtcaggtaagttaaccattaacctacagtagtaattaacgaccaaatggttagaaatcaacaaacagcaatttttcattatcccaaccccaacacaagggtatagctgtcacctgcgcgggaacctcctaatgacagcctcatccaggtcgaaaggcctatttgtggcaccaagaaccagtacacgttctttatctttagtgcgtaatccatcccaattcaccataaattcgtttttcatcttgcgcatcgcttcatgctcccctggattctctctccttcctagcatactatcaacctgccaaatgttgcattttgtatggatcataccgtgaccaaataaatcactaatgacaataaaaccaacccacatgctcaagcatacctcatcaatgaatataacgcttggagctattttacttgctaatgagaaaacagcttttacatatttctctccttcgccaaaccactgaaagtagaaaaaacagcatttagctttgagaatcacatagtacactgtacacctcattaatgcaaaatttggatgccatcataccttcgatgtaatgcttgacattgatatgttaatgaagttagcacctgcttcagttgctactgccttagcaagcatggttttcccagtaccaggaggtccaaacagcaatattcccttgcaaggctgcaagtaacagatttaccagaggcaatttttaagataggacttaaatagagaaaattaggtagccaacatataatactccatccgtcccaaaatatagcaacctagtactaccctgggatggaggaagtactgacaaccaaatttcccacatgtctaattaacttaaatttacccattcaccactaaaaaattgaacaagaaa

SEQ ID NO: 25765 - DNA, 618 bp, Oryza sativa
aaatttcagtttcaagaggaatatacagaatactcggttcaaaacccaaagtgccaagcatgatatgtgaaattgtgttatctgcacagcttaccgtgcgaatgctaccaacattggatttagctttaagggtttcaacgtcacgatccagttgttgcttccaatctgtgagtaatgtttcatcctgcaaattcagttgcttggattagataatatacttgagcataatacttgaacaagataacaagggatattagcacctgtggaagttggatcgaaattttgttagggaaaagtttatttagatgtttcattgccttcggactttctttgttcctttatgcaaccgactaccaaaactatcctgcattttagatataacaatgcatcagatagttatatcagaaccatgggttcatatagtgcatttataagcactgatagaaagaacattgtgaccaataagaatgaaaattgttaccgggaaaaggtcaaatagcgtctggctgctactagcaaactttgtaaaaagaaatccacctgggtgggcctacaacagacaccatagcacaacatcaggatacattttatagtgtacttaacaagcgataaatgata

SEQ ID NO: 25766 - DNA, 952 bp, Oryza sativa
ttatgagataccggtttataggaaacaaagttttgatcaggtagaatctgagttcatgcttgtttatggtttgcagggttcagaggctcagaaatttcaggctgcctctttttaaagcagcataaaaccagtgagttgctatcgattaaaggccgctatatcactgaaatgtgttggatttatgatcttttggtttgtaaacctatctgcacaatgtttcgctcgatttgggttctgttacaggtaaagaactccaattacccttcgtatagcccatgtttcggggaaagaagaaaaaaaggttatcccaattgtaacatgcaaataagttgtgaaattgctcaggcaaatctagtaacagctttggcgacgatacacagtggagtagcaggtgagaaggatatcctggcgacgatacgcatgcatagatctcctgcatctggagaggttgcttctcaaaggtttgcatcaggctcatcatccatagatgtcaaacctccatggcctcacagaacacaacaaaggcatgtattcaagttaagctacatagctaataaccacaacaaattcaccattatctttctccagccatcacaaagcaaattaaggagctcatgaatccaataatccggaggttttttttaaaaaaaaggactcatctcagcatccataacaggcaaacgatagttgtttccgacaccaacattggaccataacgagtcaactgacaaccatagactagaccaaaaatacggcggactgcatagataaaacatcagtgtcgagcagaaggaacagctcggcacttgacccccttcagcccatgagagaagtaaaggaaggttgggtcggtggctccgtccttgtagtaggcaaacaccaagccgccatcatcatgcatgctctcaccaaaaaaactgaaacagatcataagacacagcataagaagcag

SEQ ID NO: 25767 - DNA, 1846 bp, Oryza sativa
aatacaaattaaacaatcaaaagaatacaatatatgttttctcaaacatacataatagaaggtttaatattaaacacgagttattatatggttaattacaaagccattctagtaaaaataacatcgcaactgtttcattgtttcgaaacattatgagatttatttatccctcgtctagatccattgacatgcatacgaatttggatatatataaatcgtctcttagcggggatacaaagcccttcttaaaaaagataaatgtattcaaaacccaaaacgtcttatagtgggatacaaaggaaggtattcctaatgtacgccttcagaatcaaagcatagacataaaaaatcaaatcatccatcaacatctaatgtttaatctatatctcattttagatagttcattatctactatcggtttcttataaaccataaaaaaatagctattcctatacatatgtcaccaaatagaattttccttctattttatcttgttcacatggcccaaatattattaggaggagcaacaccattattcattgtgcaaatcaacgatcagcagttaattacctggaatattatcctaatcaacaccattaagcttatgaggtatgcaccactatttctggaatactatcataatcaatttgcacacttcttaaatgaagttgattgttgaatcgataatcatgaggcaaacaattcccagaaaatctgtccactcaggaccttggctctgaaaaaaaccagtgaatgaacggatattgaagaaaaccattatgggtttctttggatgaatttagcattgttaacaatcatcgatgtttacatcctatattccaaagaacacaaatcagatcacttacaccaccatttgctaagaccaatgccatcactgttgctgcccaaatcacttaggacaaaggattccacataaagctgaggaacttgatgctcttgttctattccaaaaggaagtaaaaaatatgaggatttcagaacaggaatgtaggtaaacaatgatcagaaaaaggcagataaacttctccaatctgcttgcaccggacagctgcaagcgttctactgcatcttctgatgaaagccccacgtgaaatgtattcagctcctcaaaaaatgtctacaaggagcagattcacctgttattatatatccttacaaagcacagcattaagactatatgtttcagaacccgtcaaagtctacgatatgccaaattatacaaaagtctacaccttgcgtatgtactggtgtctggtcacctgaaatatagatattacatgaagaatattgccagttcagacccatggcaaagtctcagatgcaattaaaaagtttaccctgagatagaaagtagaaaattgttagcacaccgcatcattctgaattttaagtcgaccaaacatatatatgtgacaggaaaaaattgcaaccagttgctatagaaaaatataaatttcgcttaaaatatcttaaaaataatcaaatccaaccaaaggtgcagttgttccaacctatcttttcgaattctcaaagacaagatcacaaaacacatgaggtgcttcaatctgaatgttttggttcaagatacctttcggcggcggaggaacggcggcgtggctccgtataggcggcggttgaggcggaggccgaggaggaggtcgccaaagcagtttgtcggaggagaccggcgatgcgtgacgatttgagtggcggagggacggcggtgatgccggttgagacagtccgaggagacttcagcggccgagggacaacgacgggagaccggatcggcgatgtcggttgaggcggcggcggcaggcagtcg

SEQ ID NO: 25768 - DNA, 702 bp, Oryza sativa
catgtttgaaagccttctgactgaccagatgtaagactaatgacaatatcaacatttctgatggtcagatcagaatctctagaaaataattgcaagtactacataaaatggttccctaacaaccaccatataaaaggataaagccaaattatttttctctaaacaatgaataaaagggacaagaattaccacctcaaggatccacccaatatatttaacattgttcacatgctgattgacatcgaggtcaccccatctaggctgttgcagtaaacaagagtccatcaaagatcatttaaaataaatgaggggtgagatcaaatattactatttttcttagataaatgattgcagttgaggcataatgataatttagtatgtaactatgtctagctgacttacagtgagcccctttcttatgaattgctctgtagcatcatcaccaactttatttcctgtcttggctaacttttcactctgctcctctgttatagctgaacggtcattgaaatatgggcctatttcagctctaacttcatctggcatttttgaaagtcttctagttttcttgtgcatcatcacccaaacactgcaagaaaggattggaaaaggagcacaattagcaattatcaatgatgtgatcaagcagaaataccaagattggatatcctcataaaaaaaacgatacagatgattcttgca

SEQ ID NO: 25769 - DNA, 1450 bp, Oryza sativa
  unsure (1)..(1450): unsure at all n locations
tttgtaaatgtaaataaatcacttgctaatttatttttaaaacggagcttatcgctggaaaacgaaagtacatgcccgttctggcattcccactcaacataattcaagatccaaggaagcacagagaagacatcatttaatgaggcagctttgggcaatgaataaggcgtaacaaatgaagttgctcttggatctaaattactactccactaataactgacgtctaaaggagagattactgttcttctttgtttttaactgatgttgtgtcttttgaggacaacatagagcaaggatagctacagacttacagtgctgtaccaaaaaggccttggggcatcagaacttttatgttgcatgtactaaagctagattatgtctttaatgaggattactcaagatgcaaatcctgtttctaaatgcaaagaaataacttgatagtttgtgttataatcagggctcgacaattggaaacaaagtgcatgctcctccccacttaagtaggaatatattcatttcttcctaattggaaaatttagtttgccacaaactctatccttgatccaacaaaactggagctgatattactacacatttcttagtcaaccaatgaggaataacagcacctcctaaacatgaggcctatcacgggaaatcaaagaaaaacatggccttctatagcagtaaaaatttcaacccatattcttgcaaaccagcagcagcgaaatatacgaccaagtaaaagattcacttgattttcatcaaccaaccagtatatggagaaatcagaccagagatccacncacatttatgataacccatgtaaaagtaaatattgagctaaatactactgttgcctgagtaagatcttcttttaacgaaatagaaacaatatgcccaggacacgcagctataaagtagtacataaaacgatatctgtaaaagaagcaaaacaaatatgaagtaatttaaaatgtgacaaaaatgaaaacttacggtaaggaattgatagaaagcaaccaaagatacatatattaagaggagcaaaggtttgcaaagaagtaccatgcggggtattgctcaacaagaagctggattttgctgacaacccatatcaagttccgtttgctcatctccggtgtagccccaaaaccatctccaagaagaccagcagtcctcacatggttaagagctgtttcctgcaaaattttaaataattgccagcttgaaagagacatatgaatctataacaaaatgctgaaatgagaaataaaactaaaaacagaatgtgcaaccacttacctgtaaatgattcatcaatgtctctatagaagctgtacgatcagcaccaatctcgtaggaccgaatcatgaagttttgcctaaacaccataccgtcctggataatcctaccaaagccaaatgtgtcaacaagcatgtcaggtttcttt

SEQ ID NO: 25770 - DNA, 650 bp, Oryza sativa
tatactttgttaggaacaatctatgctccacttaatcttggcagccccaagcattcttgcatccattgtggtgctttattttggtatgaagaacgagcacgaaaagaaaggcacacgaggaacccaacctataatttatgttgcagggggggaaggatatcactgccatcttataatccacctccagaacccatattgaatttgttaacttctgcgagctccctttcaaatcatttcttgcagcatattcgtcgatacaattccatgtttgctatgacttcaatgggggctaaaatcattgaatccatcaacgacggccatggaccatatgtcttcaaaattagtggacagatctgccacagagtaggctctttaataccttcacaaggtcgtcggccagaatatgctcagctatacatctttgatacagaaaatgaaatctctaacagaatcaacattgcttcttcttctcgcgactccttccatgccaatgaagaaattgttcgctctctaatagaaatgttcgatacacacaatcccattgtgaagttattccgaacagcaagagaaagattaagtgaaaatgaatctgatcattacaagatccgactatttggcttgacagatgcacatgtagatatatatagtgc

SEQ ID NO: 25771 - DNA, 18860 bp, Oryza sativa
gaggagtaccttgaaagctgggaggagaatgaccatatggtggatagttgcttggggaacaaaatggatagaaattgtgtaaaaaatgtgggttgaagctttgggtaaactgagattggggaaaattattggggaattgttggggaggggagttgtggctagtcttttctgcatggtttggagagtcttgactaagaagatctatgaatttttggttggatgaatccatctcctgatgaaatgaagagatacaaactgaaatctcttgttggtctgttttataggagcatagagaaggagagccaacacccagcaccaaaggctacttcaacggacacttgctcggctgctcacgccccagcaccaactgctttagattttatattcatttatacacagtgaactcaaaaattactgtattttatttccttgtggcctgcctattctaagaactactttagcaattaatgtcatatggactacctccactgtgtatattgcctgcccttagagctgcatttattgtataatgcctactttagtgatacattgtggatgccctaatgacttaagaacacccttaaagcaacttcgcactgttggagaggatgtatggactgcgtgaggttcctcgttttgggtagcttgcactgtaggtgacataagagcaaatcaagatcctgcaaacgaggagggattcgccgattcggtgcaccggcaggcaggatctctgacgcgacgacagcaaccaatgtttgcgtgtcaatactactggagacgcgagagagatggacgacaggacatcggacgatcgacagcaatgggcaatggcctcctccagagccagcagattctctcgttttctcctgtgaaccatctctctctctctctctctctctctctctctctctcagacgatcaccatctctctctctctcctcccatcagctcatgtcatctctctctctcagacgatcaccatctctctctcctcccatcagctcatgtccggatgtccctttttggtcgttgtttctttggcacgatatttcatcatgtatcctctcttttagatataaaaaaactaaggatgtaattcatttgtctcataaaaatcaccttaatatcatatgtgacacatcttaatactataaatctagatattatcttttcagatttataatcctaagatattatatgtcatattcagaattaaatttgtttttttatgagacgaaggagtatctccctatactacggatacgcacaaattttatttcatagattaaatatatagttttgtgatatatccatgataaatttagatctaaatctttttgagaaagtttgataaataaaatcctaacttagatctgaacttttgaactaatggacgttgggttgcagaaatgaagattggattgctaggaaccatgaagcaatactagttgactaaaaccaccctaaccagtactcactctgtttcacactttaagtcattttgattttgatcaaagttaaattgctctaagtttgatcaagtttatagaaaaaagttaatctagtattagatgtgatacatcctaatactatcactattgaggaacctatctttagttccggttcgcaaccccttaagtctcgggtatgcaaccgggatgcccaatccaggactaaaccggttgtttattttttttcttttttaattgttatttgctacttgcatattaatttcgagccgaactcggcgcacatcgagttgctcctgacatccccagacccccacatcaaaatcatctaatcagacatcacatatcgagttgctacaaatcaaaatcatcacagatcagacaaaatctaatcaaaatcatctaatcgagttgctacaaattagacatcacagatcggccacctcagcaacaaaatcatccacaaaaaatcatactcaacaacaaaattcattcacaaattcacgaatcatctaaaaaatttcgcaaattcacaacaaattcacaaataatgccaacgccgctccacatcgccgcctgccgccaccgtctattgcctcccctcttgctggatccggtagaggggagggcgctgtcgttgcccctcaggcaccttccgccaccaacgctgccgcccgtcaccgtcgtacgtcacaactgaggagggggaggagagaggaaggggagaagataaggacaagaagataatgggagaaaaaagaaaaaggacacacacgctcggctcttttcctcccgtgctctttttttcaatatcagccccagttggtatcataaagtgtcgttaggtttttgaaccggggctacagaaattctttagtcccggttcctatttgaacgggacaaatgtcatttttaccattcaggcaaagatcagttcgccaatagtctatgaatctgaacagaactaggatgtgtcattttcactaatagattaatttattctgggttaaagagagtaacttaagtaatagtgtattaggcactctctaagactcttagatttctcctatatctaggggcccgtttggcacaccttcaactttagctccacttcttttagagctgaagctcaaccaaatggttacagtttcactcaaaaaggcagtgaagctggctaaagtattcttacaaaatgaattagagaagcgaagctgcgttttaggtagctcaacttcactccaaacccaatttctaaaattaaacctagaagttggaaccctaccgaacagagatatttaactaattgctactcttactagtgacaataaggaatttaccactggacacatatgagggcccacatgtcatatattgtgactggcaaatccttaatcgccacatattaaaagttgtatatagttaaatgcccctaccctaaatcctagtcccaaaatataaatattttttgatattgtcacaagtattaagaaaatatgagaatgattagaggaaacgtgtgattagttgaaaagataaagtatgtaaaagaaacttattgtgattggttgaaatgagaagaaataactctattttagaacaaagtattctctccgtccaaaaaaatttaacctaggagaagatgtgaccccttctaatacaatgatctacacaattctctggctagattcgttggactagaagggagcacattgctttgtacgttactacctccgtcaataatagatgttgctttaactttttacttgcaacgtttaaccattcgttttacttgaaaaattaatgcaaatataaaaaataataagtcatacttaaaatacttttgataataaagtaagtcacaaacaaaataaataataattaaaaaatctttaaataagacaaataatccaacattacaaacaaaaactctaagcaccaagtaatagtaatatggtacggaggtaaggcagtactctctctgtctaaaaaaactcaacttagaaggggatgcgtataactcaacttagaaggggatgcgtatgagtgtaacccacaactgtaaaatcatagatgtttttgattattattctatgatgaacaattgggcattggagattattggttttgttatttggaatttattcacgaagtggttttggagatgattggattcacatgtgatcgcagggttcattattttatgtgaccggtcagaccgggttgtgtatgctggtcagaccagcggtgatcgagcagtcggaccggccagcctgcggtctgaccggccgacgctgtgttggtttcggtttcgggttgtttgtttggatatccgagtttatttcttgattatgacttctagatggatactatacgtatgtaatacaattgtttgctgctaatgagtcaagttggagatagcttggtcgcggaatatggtttctttgtttgttccagtgtaggtgacttgatgtctcgggagagtatttgcgatgatggaccgggagtcggcttggggataaggtgacgtccgtggtggtcagagatcatgcgggatacttaggctagagttgatgcacgtggttgatggagattccatatggcatacgatggagttattgtgtgcgtatgagatgtggagttgaatttggaaggagtccaaatttggtacgattggttatgtaaagtttctttcttgtactagagggtttcctaaggtgtttaggactcttagtatgagtttggttcgtggctttaggctgcctaccttatgtataaatagagggggagcatgaggcttccctgtatcgctttagagagcaattgagttgagttttgagttagggtttcgagtttagtcgaaatttttgtaaggagtgctgttgatgcactttgtaaacacagagagaatcaataaagttgtcatctattttaagagttcttatatttgtgtttcaccgggttttggcggtataaccggcaactcaccggcggtcagaccagcggcattgcggcggtcagaccggcgggagaacggcggtcagaccggcggcggcgacagcgagcagcaggcgatctcggcggttagaccggtagatcaacaccggtcagaccggcggctatgcttcggtcagacctgctaatctacttcggtcagaccgatctcatcgaaattgagggtaacttttatttccgctaaaagttttcggtttttggttataccaaccattcacccccccctctggttggtttagttattgtgatacgatcctacaacaacctcttttttagttctagattgagtttttttttaagaacggagggagttttttttttacggaggtagtaaggggctgtttggatgcttgtttcaatttaccaaactactatatagctaaggtgtggcataccacaatttatgtggctaagaaattcttggccacaagttaggcaaatgttggtaaagatatgtgcctatgacaagtggggtcataaaataaaaaattgtggcatgataaagatgtggcaaccaagcaaacactaggttaaattggtcaaagtagcttgccaaagttgtgacaaagtatggtcactatccaaacaacccatgagcgcttagggcatccacaatgttaggaaaaagcaggtattaagcaatataatatttctatgatctagtaataagcattgtggaagtgggtagtaactaatgctaggtagtaagcttatgacccactcataagaataaaaaaacattaaaatctctctcactctctccttccaacacaagatgtgctactactgcatgctgagttggacaaaaagcaactaaaaagcaatattttttccctcatgggacccaccttacaaagacctattacttagccctgctacttattacctagttaaacaagatacattggtgttcccttagaaataacatttggagctagtcccccacctacgcggctacggccaccacgccgcccgacgcgcgcgcgcgcacatggggatggggggtgggggggggggagcaccaggccaccagcacgcccgcggcgatggctcccatagtcccatcccattcctcaacaaccctgtggagattatgggtaccccatacccacacggcatggttatccgactagttataggggataacttatatatatgaaatatgtaacagatcatgacttgggtattacgtttccttatatattacggaacagcctaaagtcctggtttgataatattgtaaagtagatttaggaaaccgataccgtattggttaaggtttctatcttgtaatcctgccccccaccctatataaggtgggcaggaggccctctagggggcatgagcatatatgagacaactagatcgtcagatctataatacacccggcggattcaaatccccaaacaggagtagggtattacctctcatcgagagggcctgaacctgtctaaatcctttgtctccacatccatccacttttaggtctcgtgcgctaccccgttttattattgccgaatccatgtttcgacagttggcgcgccaggtaggggttgcgtcgagtttcctatcaacgagcgcgatggaatcaatttcatgagtcgccgacttcgctttcgctttgggagttttcacttcctttccgtcgaccacttcttcaagctcctcttctctgacttgatccaaatcagtcagggggaaactcaatctgatttttatcattatttatcatattgatttttaatctcagattaatttcttgctattttttgttgttgttcgcatataactgcgcggcactattgaggcgattgatgctggtcatggactcgaggcgtctcagctttccggtcgatcggccgcgagtccactccgccggcttgtcctcgccaccgccattgctgatagcaacaacgacttcaccgccggcccgcctccgtcgccgccgactggtgtcatcgcctatacggttggtcggtcacaccaccgttcatgggcgtctacgacttcaccgccggcctgcctccgtcgccgccgattggtgcctccgcctacacggctggcctattatgccgccgctgttgggcgtctacgacttcaccgccggcctgcttccgtcgccgccgagtggtgcctccgcctacacggctggcctattatgccgctgctgttgggcgtctacgacttcaccgccggcctgcctccgtcgccgccgagtggtgcctccgcctacacggctggcctattatgccgccgctgttgggcgtctacgacttcaccgccggcctgcctccgtcgccgccgagtggtgcctccgcctacacggctggcctattatgccgccgctgttgggcgtctacgacttcaccgccgacctgcttccgtcgccgccgagtggtgcctccgcctacacggctggcctattatgccgccgatgttgggcgtctacgacttcaccgccggcctgcctccgtcgccgccgagtggtgcctccgcctacacggctggcctattatgccaccgctgttgggcgtctacgacttcaccgccggcctgcctccgtcgccgccgactggtgtcctcgcctatacggttggttggtcacaccaccgttcatgggcgtctacgacttcaccgtcggcctgcctccgtcgccgccgactggtgtcctcgcctatacggttggttggtcacaccaccgttcatgggcgtctacgacttcaccgccggcctgcctccgtcgccgccgactggtgcctccgcctacacggctggcctattatgccgccgctgttgggcgtctacgacttcaccgccggcctgcctccgtcgccgccgagtggtgcctccgcctacacggctggcctattatgccgccgttgttggatgtctacgtcctcaccgttggctcaccttcgttgccgtcgactggtgtttccgcttacacggctgacctattatgccgccattagtgggcatcttcgctttcaccgtcgaccgccttcgtcgccgccgactggtgtcttcattgttattgatggacgactttgttcccacattggccacttctgccatcaccaaggggaatattacaaagctaagtcatcatttattttattctttatatgatatttttccttttcctctgcctcactacaccaattggtcttccattgagtagtgagtcgggggctacagatgttatatcatatttttcataatatttatcttgattgcttgcgacataatctgagtacaaaagtacctatcgagttatggagttctatcttcctatgctttccgtttggtttgccaatggatggttgcctttgggccgattcctagcacccgggggctcgttggatggaccgagtaacgcaaggtgctaagtattattcggaataaatcaaaagcatagagatgagataaatttattttctgctcttaataattgcaaaagtacccgagtagtaaattctgatccgtgaaactttgttccattaatgacgaactcatgtcactcatatgcatgtttgggaagtgcctaggccgactcccggtgcttgatggtcatgactagtcggacagagtgtttaaacgtacagagtcatctgctcggggaaatcaaaattgacaagaggagaaatacatatttataaatattttaaaatacttgattttttctcgagtattatatttatatcagatactactcatcctatatgtttgttctgcaggatccagatccagatatgcataaaagggattcatggctttaagcttatctcttacgctccaggaatggatcagtcagaacatcaccgaccggcttgccttcgccgccgccgactggtgtttccgcctgcacggctggcctttatgccgccgttgttgggcgtctacgtcttcaccgaccggcttgccttcgccgccgccgactggtgtttccgcctgcacggctggcctttatgccgccgttgttgggcgtctacgtcttcaccgaccggcttgccttcgccgccgccgactggtgtttccgcctgcacggctggcctttatgccgccgttgttgggcgtctacgtcttcaccgaccggcttgccttcgccgccgccgactggtgtttccgcctgcacggctggcctttatgccgccgttgttgggcgtctacgtcttcaccgaccggcttgccttcgccgccgccgactggtgtttccgcctgcacggctggcctttatgccgccgttgttgggcgtctacgtcttcaccgaccggccgccttctccgccgccgactggtgtttccgcctgcacggctggcctattatgccgccgttgttgggcgtctacgtcttcaccgaccggccgcctcgtccgccgccgactggtgtttccgcctgcacggctggcctattatgccgccgttgttgggcgtctacgtcttcaccgaccggcttgccttcgccgccgccgactggtgtttccgcctgcacggctggcctttatgccgccgttgttgggcgtctacgtcttcaccgaccggctgccttgtccgccgccgactggtgtttccgcctgcacggctggcctattatgctgccgttgttgggcgtctacgtcttcaccgaccggccgccgcatccgccgctgactggtgtcaccgcctgcacggctggcctgttataacgccaactgatactaccttcttcacggctggctacatcgctgtcactactaataggcatcagtatcttcaacacaagctgcctacgtttgccatggctgccgactggtttcttcacttccatggctacatgattctaccagtgttgattagccttatcttcttcaccgccggtcatctcgtctgctgttgactagtgccctcgcctctacgtctggtttatacagctaccactactgatggacatcatcgttttctgccgccgactcgtgttatgccgccgtcgactggtgtttttatcttcacaactgcgcgtcttcactaccggttcacttcatcacggcaacacaactttgtcatcatggtggagcgacttcatctttattatcttcggaaccagcaaactctattgctgctacttaacaagttttgctacatcaccaaccatgacgttgttgtgaatctcgacatctcggcatgcgatgccgtgttattttactacaacaagtggctctccaatattcaggatttctacttggacatcttcaacacatatcttcaatcaagcaataactattcgacgacaagatgctacagttctcgactctatgttcagttgtttcccaactaatcaaagagtcggggggctacacaaatacaaggctcaaaatttgacaaattttatgtcaagctgaagaaatcaattcatcagccaatgagtcaactccaggagtcattatcttcatctttgcttcggagcatacattctacttcaacaacttcaaatatttcggtttagacgagttgggcaacaacatcaactctcctccaattatttgtcttcacggttggcctactacgcaactgccgatagaggatctcatcgttatcatcggctgctacatcgctattgactggatcaccgacatcgtcatcttcatcaacatcttgtcaagcctcatcaacatagcctactctgctgccgttgatgggaaacttcatcatcatagtcggatatctctgttgccgctaatcatcattaccgtcggatgcgtttgtcgccgccgattattttcttcatcttcatgattggtggatttcgccatcaccgttgatgcgcgtctacgtcttcatcgtcggtttgcttttgtcaccaccgactgttctttcgttgttgttgggcgcctacatctttactgttagctgacctgactgttgccaactggtttcttcgcctccatggttatgcaacttcattacatttgatcggtggcatctttactaccactgacatcttccgttacttctgatgagcaatttcgtcttcatgttggtcatttcatctccatgccgactgcgtcagctattgccaatagacaattttgactatgacagaaggacaagctatatgctcaggggctcatcaactcaagcgtgaggattatatctccaatttggacttgttccggatacattccacatggattcatagtcatgagtctattttctatgctcaaagactggaccaattattattccccgtaagggctatcaaccgaatacttgcgccagtcgggattcaattattatatttattttggagtatcccataagggataatcattcagatcagaagctattcatatgagctacacttggtctatgttacccggaagatttattactctacccggaagatttattactcgggagcatgttacatgcgtcatcctttaaagggtgtcgaaggcatattttttggcctaggcctaatatgtctgcagcccatattttcaggtgtggcctgtcacgttcttttagggacttaggcactttttgcttaggccaaagtgcgcgtgatcaagtgcccaataccttaaaatccttttataccgcagttacttaactttttaggagttggtacaatgcatcttaaaaggtgtcaaacagtaaaactttatatagctgtcccgctgacttttttatatataagtcaaggtgctgtttgggtttttaagcaattgattggatacaatatcattgctttttgccacgtaagtgtgcatttttattgaccaatattatggcttaggctgattatatattgtggtcatttttcaggcggttggtaaatcctttatgagtttatttactcagattttacaccacatatgccatatatttccaggtgtggtgaaaccatgtgtcttatagggacttaagcacatctgttaaagcagtgtgcgcatggcgtatgcccaatactttggaaatttctttattcacaacatacaagcttttttatagctgttttgctatgtgaattttcaataatgtagccaactttagggtacactcatcatattttacaaagcagtcggtatatcacttggatcatattattcagggattcacaccgcatatgctacatattaatatcaggtcgcttggttgactataattattaaaaccactcggttggttggattatttattccttgactatatgcttggtttgttcaattaaccacatagtcgggggctacacctattaggtgcatctagtcgatgcacctgactttatttttcagccctccacagtctttatatttggtaaaagtactcgggagatcatggcgaggatgattgaagcactcggctttggagtaatctagttcgagagaagattatctttccgactgtgaaggtcccaggggctactgtggagattatgggtaccccatacccacacggcatggttatccgactagttataggggataacttatatatatgaaatatgtaacagatcatgacttgggtattacgtttccttatatattacggaacagcctaaagtcctggtttgataatattgtaaagtagatttaggaaaccgataccgtattggttaaggtttctatcttgtaatcctgccccccaccctatataaggtgggcaggaggccctctagggggcatgagcatatatgagacaactagatcgtcagatctataatacacccggcggattcaaatccccaaacaggagtagggtattacctctcatcgagagggcctgaacctgtctaaatcctttgtctccacatccatccacttttaggtctcgtgcgctaccccgttttattattgccgaatccatgtttcgacaaaccccccgctatcttaccatctccatgtgggtgtgggtgtggcgctcctcctcctcctcctccaccccggtccactccccctcccctctcctctttaaagcgccgccgcttcttcttggcagcggggtagatagattagctcccgattcggacaaagatcgctcgctgctcgctctcgccccgcattccatcaatgcgcccgctgatgacgatgatgatggattggccggctgcttaggcagcttgggatggtttcggggctccgttttctgctgctgctgcttcttgctctgacgacgacgaccacaaaccgtggccttgccgattcgatgtcacgggcgccgcccggatgtcgctgccggtcgccgaggtagctggcatcgccgccgcctgcgtcgccctgctcgccgccgtggccgcgctgtggtgcgccgcgcggcgcatggcccgccgccggggccgcaactccgacgagaccggctcctccgatccttccaccctgggtgcctctcagttcgccattgtttcttagttcttggccccttttgtatcctccatccatttcgatgctgatgtgtggtgccaatgtgcgtggtggcagtggagtggggcaagggaggcaggagctcgtcggcgccggagcaccagggagcgaggcaattctcgttggacgagctggctcaggcgaccaagagcttcagtgaggccaacctggttggcctgggcagcttcgggctggtgtacaagggcctcctccttgacggctccgtcgtcgcgatcaagaagcgcattggggcgccgaggcaggaattcgctgaagaggtaaaatgtggatgcagaatcagggtgatattgttgttgggggggaaagattggaactcctttttttttatagaagaatggaatttagctgtgtcctgagcttgaactgtgttggtcttaattgttcctcatgtgtttgtatgttgtctggattctttcggtgtctccttcaatgtttggtggtactttctgttactcctattggattctgaaattaactgcatctgcatctcactaaagtgtgccatatttatgggcatagagtgaacattttagtcaaatggcttgtttgggagctagtaagatctgtctggtgtcaattgttgtcgtttgctagtccagaaagtttcataaattagatagggacgggtaagtaaatgcatttgtttcagcctcatatgtcagcactcccattaacttctttggtgccccttgcaaaatgcaggttaggaagctttcagagattaatcaccggaacattgttactctcattggttattgccaagaagggggtctacaaatgctagtgtatgagtacttgcccaatggcagtgtctctcgccatctctatggtaatgtttagttaggtacttgcttttgtgcccttgctatactttctaaagccttgtacgttttaccagataccgggaaaagctccatgacaaggcttgagttcaaacaaaggctctcaatagccattggagcagctaaaggtaataacataagtgagttatctaattgctttggagacattaagtaataagtagtataatttttttttatttgctggtttgagtcatctgcatatcctgagcctcctctgagtcacaaggattgctttgttgacgtgaattataaattcttttttatttgcaggtctcaatcatctgcatactcttgtgcctcctttgattcacaaggatttcaagacaagcaatgtgttggttgatgaaaatttcattgcaaaggtggctgatgctggacttgttaggttacttagaggatacgaagacgtcagcccatctcatgggttcagtagtagtgtgtaccaagatcctgagtaagtataattaccacatctttttatcttctatttttcatgtcagataatagatgtgtttttggaccgaaagacaataaatatgctgatcactgctttaccctataatatttatatttgaaaaacttgtacaataattttgtcacaagtcaatcacagttttaggaaaagatcttcaattcatgtattctaactaagtcttgcagttctggaatgatttagtcactaattctgtcatatagtcattgatgtttcattacgcatctttgttcttagggtacaatcggtgctacagttttctgaaagcagcgatgtgtacagctttggagttttccttttggagttgatcactggaagggaagctgcttgcctgatatctccagattccagagaatctctggcccagtgggtaatttccattgacatttagctattgttacgaagaaagaaagctaaaaacttctactttgtgtttcaaatatcttaaacccagtgttcaggctcatcccttagtatttatagagatggtgtgaaggttcttacttttgttgcttggaaaagaacataactttttatttattggtccaatataatctgtcatagcttgtttatgtccacatcaacaaaaaagtggtaactatggatgtttggtaaatgctactgtttgtctgttaggcagtgggccaggtttttttttttcgtgtatgtgtgtggatcaaacctacagcagaggaggcccccgtggttataactttattaataaaccatggccagggatttcctcaacaacagttaggaaatattcgtattggagcatttttcacaccttttggcataagaggtccttgacatttgatgctactttcctgcctcaactgagatatatagttcaaaaaaggaaaaataagaacattttcagaagagaattgcagtttcttgcacacgattatattccatatcctacctccagctgacatccattttcctgtcacattgaaagattgaaggacatttcagttcaaacgaactaattgacccaaggttaggtgccaatttcacctcagaaggtatgaaagagtttgttggcctcacctttcagtgcctgactccatcttcaagaagaaggccaaagatgaggttagtcgcgacagaactagacagaattcttgagacagagatgtctctgacaacgattatgggtgatggaaccgccatcatcacccttgggagcacattgtttaagtagcgaagatgaaaattgattgcatgtctgctatttgatgacatgatgattgtctgtagagtctaacagctgttgtttcttagaagttgtacaggctctgcattgttgtgatatgccatgtatgattttttttaggcttatcatggttggtataatttggtagggaaaggtgagaagaaacagagctgtatgtatctttctttttcttcctccttttgttggttgagagaattgtatgtaatttcagattgttcagtgcccttttatgttttaatctttgaaagggctattgattgagttctttgctaattcagtgtcatattaaatgattaacatctgttgttacatctgtcctcagcacatgtttactacaaatttgtttcagaattaatagcatgtatatttgagtttatataacacccttggagattatttgtagcacctataaatttctgagtttgcaaaatccctactttcttaggaaaatttttattcggtttgcgactaattttgttagaaaatacgcatgaagataatagcctacatgtttgtgagttgtgattaattttgctagaaaatagtcgcaactccattttaatccttggttcaatttcacctaaacataatgcccggttatttctccgctccaaatttcagaaccaatacacataatcctcaaatcctactatatcacaataattttgatcaaaatttctactatagcacaataattttgtaatttataatttatatagtataagcttgaacttatttatatgtactacatagttactgccattgtgacgcttctgtcgtgtgtgagttatcctcagcagggatgaaaacggtaacggaaattcccggccgaccgatgttcgttttcgacttctatcagccgagctatatagaaacggtaatcgactgaaacgaatatgaaaatggtaaataaaaaaatatagaaatgatttttctattataccgaccgtttacatattcttgtgaaaattatcgctttttaaaatatggtaattaccgtatttctaaacatgtcgatatttatagggtatgtctctacttgatccacagtttaaagattagttaacttttcaaacaaatccctaacttgagtgcatggctgaatgaagttaatttataaagtaaatttcacaaaacttactttgaccaaattaacgtaaaactacaaatttaaggtcatatatcataaactaaaaatttagcaacaaatttattacaaaactataggtttaagactaagtataacaaaactacatatttaatgataaaattatcataaaactatagatttggggttttaaatcctttgtgtttgagttataaatgtctaacttttttgattaaattgatattaaacttgtagttgtgtgataacttgttactaaatctgtagtcttgctataatttaccttaaccttaaatctgtagtttgtgatacatcatgttaaatctatagttttctgataattttaccgaagtatccgtagttttgtaaaatttactctaatttataattgtatagtataagcttgaatttatttatacgtattacgtagttatgctaagttaaatattttcttttatagtttaatgttttttatttgctactggtttccgatttgcaccgacatgttttcgttagtattattcagttttcggttattatttccgagaaaaatatgcttatatgaaaaatatgccctaagttaagaaatgagtgaccgtaacccctcgtcctcgtcactttccccttgcgcaccgcctccgccgctgatccccatccatccagcgagcgagcatcattcgtcctaccgcatccatcctggtgagcacatcctccgccaccgccgcctatgccgatccccatccatcgcgcgagcagggtcgccgtcgctcgtcctgctgcttccgccgcatcctctttcccagggatggattcaacgtgggtgcaggagtccccccctacacccaccgaaccagagcaccccctgagccccccttcaaaaaattcaccatgatagagtagagggtgctgagggggctcctaatgggcgcgtgcgcgccggctggcttgctcgcgcgcgcgccccatcctgcttagtgtataggattaacggttaatgacactaattagttataagtgtaattttagtagtagtatttcttttaaaaaataattcaattaacatttgaaaactttcatgttgaaatttgaaactttaaatgtggatttgaaaactttcaaatcaagatttttttgataactttcaactttaatttgaaaatttccaattcaaatttgaaaactttcaatctagatttgaaaaaactttcaactcgaaatttgaatatttaaaatcaaaatttgaaaactttcaactagggtttgaaaactttcaactcgagattttaaaaacttttaactcgagattttgacaactttcaactcgagaatcgaaattcgaaaactttcatctcagatttgaaaactttcaacttgagatttgaaaactttcaactcagattcaaaaactttcaactcgagaatcgatattcgaaaactttcaaatccagatttgaaaaatttgaaaactttcaactcgagatttgaaaactttcaactcgagattcgaaaactttcaaatcgagattcgaaaactttcaactcgagattcgaaaactttcaagttctgatttgaaaattttcaactcaaaatttaaaaactttcaaactcaaaacatgctaaaagattaaaaatataatcagaaaaaagtggaaaaaaacggagaaatcactaaaaaaaatgaaaaaaaagttctgggcccgaaacgcacgtcgccggcgcgcgcactcgttagcttttccggggtgctgaaggtcgggactatctatacatttgtcgacaaattttcttctaaaaatctgtcaaatataattgtagtgtaattacattgtaacttacatataattacattgtaactacaatataataaaactgttacttatatataattacactgtaactgcaatataactgcatgtaagtaagatataactttagaaaacttccgcttggacagtgctcacgccaaagagggatcatgaactcgcaaagtctgtttggacgatgcgtgcggagcatgcaggctgaacttgtgcatgcggcatgccatcgaactaatgcttgccgtcatctaccagcatacagtgcttggccatcattcatgcatgccatgaaatattaaacgaggacatgttcggctatgccctgtgccactttatgaaagcccttcgtccgtcacctatgctacgcatgaatgaactgcccctgtggcctgcggacgtcgaaagaaacgaaagtag

SEQ ID NO: 25772 - DNA, 821 bp, Oryza sativa
acccccccccccacccccccaaaaaaaaaaaaataaataaaattcctggatcctctacccactcactttttttctcctatttgcgttaaccttagcttctgttctttgaaatttgcattaaccttaatacttatatttggggattcaactgaaccccctgtcctatgttagatccaccacttcttacttctttttatatatatcgcaggaatcaatctgaattaagaagattagcgtgatgtctttcctcaggctgttacctcaaaggttgccgcaactttttaggtaggtattagctgcaaattttcggcaatcttgtactgagtgtaatttgtaggctgcatttgtatattcagatatccaactttgccatggaattaggttgtgttttaattgcttccttgatggcaacttctcaggcagatggagcaagatgttgagacagtgataaacgttctacagccaggaccgatagggattgtggagcacaaattcactgatgcagagatccgcaatgcccaagctgtagtaaggcgagcagtcgagaattggcagaagagctcgacccttgagagaaatcttggtagtggttctttcgccaaatagaactaatgccaccaacacatgacttggtggatcagccgtaccgagtataaacgggttgttaacttgttacgacatcgctttcaaaacgttgatatattttcttcctgaacgaatccatgcaatcagatgcattatatgcagtctgttcactctgttgccaataaaagtactttgaacttttgttaattgttcattgaacttctgaggttttggat

SEQ ID NO: 25773 - DNA, 790 bp, Oryza sativa
  unsure (1)..(790): unsure at all n locations
ccggtcggtaaaaagtaaacgtccaacaacgncggcataaaggccagcggtgcaggcgaaacaccagtcgctgcgccgaaggcaacccggtcggtgaagatgtagacgcccaacagcgggggcataataggccagccgtgcaggcggaagcaccagtcgccggcggacaaggcggccggtcggtgaagacgtagacgcccaacaacggcggcataaaggccagccgtgcaggcggaaacaccagtcggcggcggcgaaggcaagccggtcggtgaagacgtagacgcccaacaacggcggcataataggccagccgtgcaggcggaagcaccagtcggcggcggacgaggcggccggtcggtgaagacgtagacgcccaacaacggcggcataataggccagccgtgcaggcggaaacaccagtcggcggcggcgaaggcaagccggtcggtgaagacgtagacgcccaacaacggcggcataaaggccagccgtgcaggcggaaacaccagtcggcggcggcgaaggcaagccggtcggtgaagacgtagacgtccaacaacggcggcataaaggccagccgtgcaggcggaaacaccagtcggcggcggcggaggcaagccggtcggtgaagacgtagacgcccaacagcggcggcataaaggccagccgtgcaggcggaaacaccagtcggcggcggcgaaggcaagccggtcggtgaagacgtagacgcccaacaacggcggcataaaggccagccgtgcagacggaaacaccattcggcggcgga

SEQ ID NO: 25774 - DNA, 948 bp, Oryza sativa
  unsure (1)..(948): unsure at all n locations
tttttaattttttggtttagtgatttattttttttagtggggaatggtgatagttttttgtgattttgagatagtaaatgggggagatttatttggtttgtanatgattggtganggtgtggtgttnnnagganngatganggnnagaggngggggtgggggggtcaacatacggggaacacacattatgtctcatactattacaataccataatattatgttgtactctaaagaagtttcatatagaaacaaagaaaaaaaagagaaatacatcacaacttcacaagacaactgattatttttcacgcgtgacgcaaattatccttcatgaggagcattctgtacaagagagtatgagaaagcaaatgttcttttcgacatgctgcgattctagtctagacaaacaacatgaaactgtgctaaattgctaatggattgaagtattgaatcattccaaatttccacttaagtaatctctgattcacagtagcataaattgcattgcatatatttgcataaactgataaaagtgataagcatacctttgtttagatgttttgtagccgccggcctgctgctggcctattgctctgcctggtcaggagcagatcctggtcacgcgcgctcccgtggcgtcgccggcggccggccgcctgtctgcaacctgctcggctgctcttgctcgcggacgcgccgtcacccgtgctccgctgcttgcctgctcaccgctggcgccgccggccccccgcgctgctcgcctcttgcgccgccggcgtcggggaactagggatttggggtggggattgagttaagtagttgggctgggggctacatgtgggcctacggcctattttttctaagtgagttgtgaaagcccaatagcgtccgcctggcccaattttcgttcgccggccaatttgggctttccataccgattttgctataaa

SEQ ID NO: 25775 - DNA, 2222 bp, Oryza sativa
ctatgataccactagaaaacctaatggtgaaaacgagggttatgtgttggaccatagaaatggttcgacttacttacatactgaagataagagcttgaagactgagaaagagtctgctacatctggattgactgataaggatttttcaggtggtgggaatgatggggaccacaaaatctctcccattgttgttgataagtctgcatctatgccatcaaggtgcaagaatgaaactacagaagcatccatggcagttcctgcttctgaacctgttgatcaatgggtgtgctgtgataagtgtgagacatggcgccttttaccttatgggatgaattcagatacacttccaaaaaaatggcggtgtagcatgcagagttggctgtaagtttctgcaagaaacgttaatcagattcattctttttttttaatcttctcatttcatgctttatatttgtctatgcactggtttctgtgaactgaaataactgacaggagtaaaatttcccttcactatatatatatgcaccataatttagtttcatcagtggaaattcaaatgcagtcttttcattttctaactgccctgctgcctgagagagaaaacaactgttgagatcacataattgattttgttctggtttatttgtaatcttgggattcatgttttccttcaaggatcttctggaaaattttatctcccgtcatgttgtgatgttgcagactataggctattggactattatatcattgcttggaaatatttagttttgtttatttatttatttttgcatttgtggtgcttaatgttatcttcaattgattggtacttttaacttcttgtaggcctgggatgaataactgcaaactaagtgagggtgagactacaaatgccatacgtgcactttatgtggttcccatacctgaaaataacatcagtttagatagtcgttgtgatactgctacattggttagatccaatgatgcagccattatgtcagataatttaggaatgccagaaatatcaaagtcttcgaagaaactacatgctcctaggaatcgtgatggtcttgactgctttcctaaactcaaggaaaaacagaagcgcatagaatcatcagataaaggtgaaaaatctacgggtgttcttcatttagaatctattatcattcattttattattaaaggtcaccatttcctcaggacaaactatggcaaaagatcggatgcatcgaaaacggaagaccagtggtgctgattatgataacctgatagcatcaaagaaattgaagaaagtatacaatgagcctccaaagcaccaaccccctcagtttgaactaagcaaaagtagaccttcaaccaagggatctctaaaagaattgccgaagcatactaatatttcacctggcatgggaaagcatgctttaccttcatcaggtaagcagttttgtgatggagataactcgataggggtgctagagcttcggatgcaggaaaatctgatcctcgggacttgttcattaagaagaacaaatcaaaacaaatgcagttaagacagcatggtcctgatcctcgacctagtgatgcctttgcaaaacatgttgtaaaagaagtgttaagtgaaagtaatgctgccaaggaaaagcttgggtcagacctgaaatttctgaaggtagatgatcatgagaaatctgctcatgccagaggccctgtcactgggactaatagcaatgcaatattcagtgagaaagaggatttaattgagcaacacctggagaatatccatttccagcacccattgctctctgaaagctcagtcaggaggaatatctgtaatgtacaagcatctacagctgccacttccagttcatccaaggtgtctagctcccacaagaataaacctgaatttcaagaaacaaggacctcacctgtagagtcagtttcttcatcacccttgagaacttctgacaagaaacacttggatcggcatagaacgaattcatatgcagtggcagaaattgtgcattctcaggagtcagtgaaaactggtgcttcatgctcgaaggaaaaatatggttttgaatgtggttctgatcacacgaaacctcatgtttctggttgctctaatagagtcatgcatcaagatgctttggaggatggggacttggataaacaaaatatattgacaaatggagtctttaacaacagaagttctgggcttggta

SEQ ID NO: 25776 - DNA, 8823 bp, Oryza sativa
atctactgtagcaggaagcaagctgttgcccggattaaacaataaagtaaatggaaatgcctccaataagtcaaaacagtctgtagttgaaaatatgaagcatgcagctattcatgtcgatgcttcaactccaattaatgcatctgctctgctgaaggaagctagagatctgaagcacttgtctgaccgcttaaaggtttggatgtttgatacattagtcagccatttttttagggttctcttgattcagattccatcactactcatttgcaggggaagggggatgaccttgagagtgcaaacatttgtttcgaggcttgcctaaaatttctccatgttgcatctctcaaggaggctgctggtgttgatagctccaaacaaggggatccaataaatactatgacattatattctgatactggaaacctttgtgggtaagcaatttgcagttcacgtcttcaaaaggcaggcagcatgtagaatatcacttctatatttgttagacccttttaacattcttgaatgcacgatagtagtaactttttttaatttggtatatttattcttgttaggaaccatttcaaaacaacaagtgctttaatacttcttgtccttgtaattataaactataatggccgaactttaatgctttcaatgtctttcgtgttttttggacatgcctttcatttagctgccaaatattacttgttccatttatccttgtataaaaatttattatatgcatatgtaaattcactatgctaatatggccccattggcttgttcaacagattttgtgcccgtgaatttgagcgacttaagaaaatggcaaatgctgctttggcatataaatgtgtggaagtggcatacatgaaggcagctttctacaagcatcctggtgcaattaaagatagccatgccttgcaggcagcatctgtgattgctcctccaggttttacatattctctaattcatgaagctgcttagttgttttagtagtttctgaaatctctttcattcattaagggcatgtttggtttgaggaatggcctctctggaacgggctggcccatcatggggtcatgtttctattttcaactcattcagcatttctcaaaccaaaggttccattggagtcaggatcagatgatcctgggttgaacatattcctcaaaccaaaatgcttcataaaagtagggatgcttaaatgtttgaaaaactgtatctgtactaagttctaccacaagtgaaatataacaacatagaaatgaatatgaagtaggtaatgctttcgatggttctaggatttcatccttacaccatgatttttttgaatctcttacatcattattgttctgtttattagacaaagatatccttcattttatttcgtgatatcaattccaaacaggtttattatcaatttgttgaaatgattggtcttctgataattcacattcctcttgctttctccttggccagctgaatcaccgtcgtcttctgcctcagatgttgataatttaaataacccaagtacaatagctaacattggttcaacaagaggtctatgcacttctcagattgctaagaatcccatatctcggagcaatcatcacttgatgggattgcttgcttatgtaagctgcttatttttgctgcttatttttgccatttggattattggatattgatatgccaagttgagtttttacttgagggttgcacacaacacctacaattggcattgcacgattatgatccatttaatgcttgccttgtttagtttagagcaatacttattattgtgggtcaaatatgattacgtatggaactcaatgattgcatttattccagttttagagtttctcctatgatcctttctgtttgctagataaggtcagtatttaggaccaatagtgtgtaacggtactaaaaagatgtccatggaaatcaagctttaaaaaataacagcactcttcaaaccttttggtttagtatggattctgctatttgttagttcaaattgactggttatctaattccatgtaactactccacaactggtatccaatcatgattaaggagatatcagtgagaattaagggaactgtctcctgattgtaatattttttacaggtagaggacacaaattatgcatttgagggacccagaaagtcgcaaagtgcatttttttcctatctttctggtattgaaaaagatcaggctgatggcattgctcttttaacggaagtccttaatttcagtttccataatgtcaaggggctgctgcaactgatccgtcattcattggagtgtatcaaccatgaaaggttcaaataatagaatgggcattcttaatgtgaatagagatatatgttggcaatgtttctatatgttgttttacaatagatgcctccagtatgggtgcaagaatggagcaagattagcaatttgctaacagaggaaatttatgatgtgtggttatcacctggaagtattttctctgtggatgaacattttgacctgtgccaactggggttttacataaaatttagcaacaagtataaattgctacattcaacattctcagtttcaatgtctgattagtccccgattccattgttgatgtgaacccagttgtcacctatttcattgttgtaccggtaagaaatatctgtttacccctctttttgtacatgcatgtctgagtacctaccaaatggctggcttgctcaatcttctcttgtactcttgatatgaattgctgcatatttttctctatcagtcaaacttttgtactcaaatagcatccaataaacaagaaacttagaatcctcacacactatctttttttaaaaaaaaatctaacatatatacctgcacttttaaacagggacaaaatttcattgggacaatgttgaattgaacaatctattcctgagttcctacagaagcataggtcagggcagaggagaatattctacttttcctcaccttctattggtctgtcgatgaaggttccaataggcaagaaactttaacccttccgttcttaaatctttatgttgtactactagtgttttagttcagtcctgtacttagaatagataactaagtcaagaaggtttgtgtgattgcacttggttttatttcactagatgtgtccatcttcctcctgataggtagggtatatttgtgacctgtaataggaaaaccctggataattcttattttcagaaccatgtaatgaattaggacaaacataaagcatatctaatggacaacgtcattttgttacagctgcagtgaagtaatcctttatatgattatgattgccaagtttgatacatgcattcagttgtggaggcgcataagaacccagctacccagtgagcaaacttgcagaggacggaggacgtcagttaccacctctgactccaattttgtgtacatatatataaattaatgatgagctgattgcttccccttttttctccatacctgtgtacatctatagagaggtataccagaaaggctatagcggaacaaaatggagaattttgatccaatttcagttgattttctgtggtttctgagtgactgaattcattcttttggtatactgcaaagatagctgccccttagctaagtggtcattaagttgttgtgactatgattctttgagctgacctaacaacaaatgatgatggttctgttttctaacatgagtgttgtattggttcctgccccagcatcgtcattgtacatttgtaactgctcatgctgctattaaaaaaaaaatctttgcatctcgaaatgttgtcgttttcaggctgctttgatcgcgtattatatacatcagggaatttcataaaaccaaatgcttgtagttttataatatttgtaataaatatgtagatttgtgacacaacaccttaaatatatagttttgcaataatttggtcaaaatgtatatagttttgtgaaatttattctacatacattcattctcactgtaagggtaattcacgcgacagtgacttatatgtctccctcgcaaaattcttccagcttgacctttctcctctcattttgattttatttcagtaagtctaaggctctgttatttaattggacgtagtatcaaaaaaatttttaagtaggaattataaatataatattataaaactaataggtggtttagaataggctgatatacaaagttttttaagaaaccgtaatttaagaactgtggtacatacaaggaaagatttgataatttaacaccttttaaaataggcttcgattatttaacatctaaatggtcctacatgttatcatcacaagtgtcaatcaaagaaattgggtagaaaaaaaaatgttaaattatcaaatttcccccacataagttggtgacaaaaaagtaactcctacgaattacttttttgaattatttattgaatgaattgttcttttcaaattatttattgaatgaattgtttaaacattttatgtgtttcacacttcaaagtaataacagccccatcggatggcctaataagccaaagaaaaatccaaattttaaattttcaagcttaattttaagattgattttgacatattttcaacatagtaacatatttataaaagttttacccacaaattcttttattttctaataagccgttttggtttattagaaaataagccaaacgatggggacctaaaaaatacattttatagaaaaaaacttacttctactaccatttattttattaaactaatgaggaaggcaaatagacttattcctaggaagaaacgcaggctcaccagcccaactcaggcccaaaccgtgcaatcctcccaaaaccctagcccactaatctccactctatatattcccccaagctgcgggtttgtctccctccgccgcctctcttgctccaacgaaatatgctgttgttatactcctcctcgcctctctgtttgatgatttgtgtttatgatggttgttttggtggtctctttcgtttgccttctgctgttaaatctatccttggtttctctttcgttttgtttctcttggtaatgaatcttgggttcggtggcctggctgtgatgcgtattgataagggattttctgagggatggagacctagttttcctcctcctgattgagagaaaccaatggatccttctgagcctaccaaaaccaaccctgcgagttctttttttatttttgtttgctcttgtacactttgtgaactgttcatttttgttctttgattttttctctcttccttttgctgtcttctggtgaactgtaatacaagctagtgcaagatctgctctcagttgatgtgaggataaaactttcacagaaactcttttgatgtgttgaccctaaaattcagactacaattatctgatcagctgcagaaacttgccctacgaaaaaaaaaagatctcagtttttcccaccagatccagttgttttccttgttcgtcatgacttagatttggtatttaattgctaatccttgcacaataagccgatgctctggacgaaataagaggaaggaagcatggtagtgtgcacggagattcaccacaaggtctgcatgtctgcctgcagtgacgccttcgggctttgatctcgcgggcctggatttgacccacattttcctatctgaattttgcttccggtttatcttccggtaacattgggtttttaggggatggatgggtatggtggatggatcgacatgccagaacgatcaagatcgtattgtaactctgtacttctgcacaaacttacactaagttgtccttattgatatgccaatgcgatctacataatcctaaatttgtcattaatttttcagtgtcccttcggaaataattctttgttttaaatggctacaggaattaaaatacataaacatgtgaaaaattgaggaatcgatatgacatctagttctttaggaattgtggcatagatagttgatccttaggaattctaaaatgcaggaatttcaagttccttgttgcaaaggagtacctgggaaaatttgccatataattttaatgtaaaaattcctctacttttcctttgtaatttgttccaaaagagcccttaaagagggagtcctatacgccagggtcttctggggttcgaaggctcatcatttttaattatttgatattaggttatttcctaatatttgtgtccttaaaaggagtcgttacaagtgaaatataatgtttattcattttatgcatgtgcttgctcttgttgctcttttgcatagtgctgcctccggttgtgctttagagattttgatgctcaggccatgaagaacataagcagaaactagtgaagatttataccagttaatcttgttgcattttattattagaaccaaacaggctatgaagttagtcaaacttgttaatctttaagatgacaaaatgtgttaaaagtataaccagcaactaaacacctcagtaacatggtctatgttatgctggagttgtaattctaacagcaacaccaccattcatgggcagagaggcagagctagataggacgggaggtgtttaggaatctagtctaaatctctttttaactaattaattcatctattctcattatatatgttacttctcaatacaactcagatatatgcatcagcataaactctggctaaacattgtgtaggtgttcttttctcctgaagatggagattaagtttttttacgtaaaatgaggtggttttaacgtataattgattgagttttaattattacaaacttgaataatatattaatatgatattttagagtaactttaatataaagtttttgtacgaaacgtaccgtttagcagtttaaaaagcgtgtcacgaaaattttagggcttattcctttcaaaggaattgcaaaggaaaagcataggaataggaatagggcttattcgtttcataggaatgtaccataggaaagttttccattcctccaaggaaaagcataggaaaaaataatccactccaacctaatatttgcattcttttggttggcttgctcaacagcataggaaaaatatctgtgttggtttacatatgtattcacgaagtatttctatgttttgaaaatcctgtgaaccgaatgagcccttaggcttcatccaactcttatcagggatgcacatgaccatagttcgttccagcttttcgcccgtgccgtttgggacttgggacatgcatgtcatgtcagtggcgctgttcatctctcggaaggggagcacaagtagcaccccacagtcacacagccggtgatggacagggacgggttacaagaccggcgagttggcctagcctactggcatgaacgaccatcccgtggaagtccaccgtgatgggcatgacagaggctcgttgagatggtgccatcgctgttggcgaacgtgattagcacgtacggtggcgatggccagctttcccgctgttgctggccggccgcatcgtccacggagatgttcctcgatcggcgacccgcgatcagggttcactaaatcgattcggatggaattaaggtcaacccatgataagatggttttcatggtgatcgtgtgggtatcaaaagctttaccgcacggttttataaatcctgcccgcgatcgttgtgaatggaacaggaaagctgaaaaagaaaatatttacccctctaatgtatgataattaggagaggtgatctcagccatagacggctcagattgtccaaatccagagtgatggagtttctatcatatccagggcccgtgccgaagtagcctacttgctttgccggtgacatatacagctgatggttaataatctctccgcatctaaatataagaggttttgtttaaatgtggtatatcctattataataaatctggacagtttcttatccagatttattgtactatgatatgtcacaactaaccataaccaaaatcccttgtatttagaaatggaagggtattgtagtaactctgcaatggaaaatgttagccatgacacgtgaattcaactcagtgtaataattggtatagtgccaaatgattggagattggaacacggatgccatcctaaaaaaatactgctatggttctgcttggtcaactttgaattatataattaacgcgtgattttaaattttaaaaatgatttataaattttaaattttaaaaactactgtgattcattttataaatcgctttgatatttcctaagttaaacttttaaatttgattaaattcatagaaaagataacaatatttacaaccttaaattagtttcactaaatctaatattgaatatattttgatattgtgtttgttttgtgttaaaaatattattatatttttttataaacttagtgaaacttaaacttaaaatgtttgacttatagaaaagtaaaatgacttgtaatataaaataaatggagggagtagatcttttacttgtgatgcgagcaaacatgaaagctttatgacaaacaaaacaaccaaaaaaataatcctaaaattaaacctgtaaatttaaaatcagctctagggtgattatgtttagagtagaggcaagccaaattaagctggttgagagttactctagatcataatcaccctagatctagagttagggcctgtttgacacagctccaggagggatggagcttagccaaacagttttagctccaccaaacctgggagtagagttgggtggagctctctcacaaaatgtactggagttgtggagctggatttaggcagggctgcag

SEQ ID NO: 25777 - DNA, 5318 bp, Oryza sativa
  unsure (1)..(5318): unsure at all n locations
ttcctgcagccccaagttttcactatatatgtggtttgcactagatattttccctctattttaccatgcttggaatcaacggcaacttgttaaacaatggtgtacctctaatactctctttacttcttaatttcgcgcgacaatgtacgggaaatcatctagttttaaatttggctgatactcttgatgatacttaattaagtaataatccacttaggtggctaatcaaatttggctgatagttgtgcacttaggtgtgtctagtgctaccagtacattggaagtgattaactcaatgaaattttgtagcacgagattgaggattgtgtatcaaacaaatatatgatggtgaaaagcacgagattgaggaattttgttaagagaaaaaaaacattatctttttagtggattgtgtatatcaagatacataatctactaaagagataatgttttagcttatcaaaatttttcttggtcggtctcacatttcaattagtacttcctccgtttcacaatgtaagtaattgtagcattttctacattcatattaatgttaatgaatctagataaatatatatatgtctaaatttattaacatcaaagtaaatgtgagaaatgttagaataacttccattatgaaacggagagagtagtagattgcaaaccctggtcaaaagataagcatgacaaagctaacggtagcacatgcaaactaactgtactgcagtgcaactatgcaacagaaacgttagccaatagccatgacaagtgaattcaaacagatgtgtcatgctacggaaacctgcttgagcggtcaactttgaactatactccctgcaaaaaaaaatgaattatataattaaagcgatttgaattcaaagattgaattttctaaaataacttatgtgagattttttacttgtcttaggatcaaacatgaaaatagggccttgtcacaaagaaaatcgcttaattaaatttacaaatttaaaatcagctttatgatgattatctaaagtagggccaaaccaaagctatcaacatcttgagttactcccaactaggcaactagcttttagagtcgtatgctaaacagtggaacatggttctccatccgtcccacgaaggcgcacccacatatcttaaatatccaaatcttatattactagaaaaaatgcccgtgcgttgcaacgggtaaaaaagtttttgattgctatatattatactccttcacttttcatccactctcccataatatcatctttccgtttttatcaaaatcaaagagaatctttctacttttatcaaaatcaaagcgaatccataagagtcagataaaaacgacgacagtaaatccggtgaattaaaaccaaatgatgaggtaatagaaggaatcaattttttaattaattgaaggaggaaacgcatgtgagaggcaaatcgacagtggcgcgctaggggtcggcctggcgactttaaaaaaacgaatccttaccgcgtgccaaaaaaacgacttaaaacggatgcaaagacagcgacaaaaaaacagtggaaaaaataaaaaagcggattaaaaaggatggaaaaaatacctgtattttttaataattaggtatatggatatatatttacatttgcaaaatttgtcaaaccacacgaaaatcacaaaattatataacgtatattttttacgttaatgacttctatggtcatcccaatatgcaaatatataaaaggttactatttctatatcatatcagtgttgaaaaattaaaacttccaaggtcctgaacattaatgtgtgagtactaacctgggggtatttttacaaatattttgtatgtactgaagtataggataaacaatacttttagggatgaaaatgaaaaactgctggattcagatgccacgtgcatgttcgcatgtggcctttggcagcggtgcggtgactcgccgtccatctctcttcatgtaattcacgctccatgtactgcacatgatttcgcacagagagagacaaagggcgcccagcctaaccgctcggagcgagcgccgggcgcctcgatttttccgccctcattatctcctcgtttttccctgatcttttctcttcctctactcgtcctctccattgcgcatcttccctttccttctttttcttcttctcttctcagccgacgacgccctccatctcgtccctcccacccttccccaacccatggtggggtcgctcggcacggggccctccccccaagcggcagcgccctacccttggcggcagtgccttcgnctcggctcctccacctggccggcggggtctttcacccggtgagcaacggtgcgcgacgggccggggagcggcggccagcgatctactcctcggcgtcggcggctctctccttccgcgagcggcaacaggcggcggcgcctttccgcccctcgtctcgtctccctcgccatgaggccgcgggagggctcgacggtagtgggcggcggcgccctccctcccggcgggtggggaatcggtgggcaggggcggtgccctcccctctgctggatccagcgggaggggaggcggcggcggtcgggcgtcccggatccagcgtgaggggaggggatgggaggggaggcggtggcgacctggtggccctgcgacggtggcagcgacggcggcaccctgcccttcctgtgtcggcattttcttgtgttcttgtgttgatggaatctgttcttgtgttgatgagtgctgatgaaatctgttcttgtgttattgtagtagtgatttctctaggatttgggtccaaatttgatgcgtactcggattaaggcgcacgggggcaggctgtgaaggccagtactggtgaggttgccagcatgattttttttctttctttcttttttttttttgccatcggagaagggttgataagggatcgatcacacgcgcgcattagaaggattttttaggcgacggacgaaacggacgatcggaaaccttgcgtattttttaattaggtatagattataaaatttggtcaactattagtctaataaataaaatctgtttgatgacaataatatcatcattgaattgatatttgaatgtacttatgtaaggttatgattttgttgatacaaacacgctactccctttgttccacagaataaaacatagtcaaacttaccacaatatctaaaactaatatttgaatattggtttcaagtatactataatataatatttgtagcggcaacaatcataaccacaagaaaataaattcaatgattttattttcatcaaataaatttctatttgtattagactaattgttggtctaatatttcaagagttgaattttaaaatacgtgcatgttttatctagtgggatggagggagtagtatatgataaactcctgatgatctaaataatataaataatatggtaaacctttctcgatcggttttgttgagacttcttcttagtgcaaagacatgcatggggacagtctttccctttccctcaccagttgagttttttcttttaaaataaaatattaaggaccaaattgagcaattgggtgaacttgaaggattacattggctatttaggccttgtgtagttgggaaaattttttgggtttggttgtcacatcagatatacatacacatatttaaagtattaaatgtagtctaataacaaaacaaattacatattttgccaagaaattgcgagataaatttattaagcctaattaatccatcattagcaaatctttcctgtagcaccacattgttaaattatggcgcaattaggcttaaatgtcttgcaatttacacgcaatctgtgcaattgctttttcctacatttaatactccatacatgtgtccaaacattcgatgtgacagcgtaaaaatttttgttttgggaactaaacagggccttagccgataaccagtgttgccacaagtgtcaagcagtggcctataaagctactcccctagtcaaaaaaggccattcctagcattccaaggtgaaattagtggagagtaaaaataaccaaaatacccatcattatcagaaaaaacaataatgcagataagtaggtaaaggatactaaagcgatgataaaacttctcattttatgtgctaagggtaggtatgatgacagatttttttttctttttgacaaagttcaaactccagaagttaagttttttttgaacggaaaaggtacatcacatttattagtacgtaggatctcatcctcctatctatctattatattattaaaacagccttgaaaggaggcacaacgtttactgtggaggctagaaattcccacattaatcggagaaaaagaaaagaagagtccaagtagaaatacaatctaaaaatagctaaaattcggaattaaaaatatgcaatatggaaagaggagtccatatatgaacccaatacgtgattaattaaaattcataataataataaaataaatttataaattagaaaaataagaaaagaagagttcgagtaggaatacaatttataaataactaaaattcggaattaaaaataaggaatattgaaagaagattccatacaagtatcaatacgagattaattaaaatttagaataaaaaatataataaaatccgaaattaggcaaattaaaaagagagttaaagtaggaatacaattttgaaacaactgaaattgaaaataaaaaataaaaatatcaatagaacataataataaataaaataaaatctgaaattagaaaaagaaaaaaaagatttcaactaggaatacaatttataaataactaaaattggtaataaaaaataatactaatgaaagaaaataccatctaaaaaaatacatgacgagattaattaagtaacaggactataaaggagtagagtggtggcggttgatgaaacatctaaaagctattaataaaacaccaaatagaatcctaatgacgattaaaaggaaggacgttgggcaggttgtgaagcaatcagtcaacacggttggcggggacttctagaaagtaaaaaaaaaaccaatgataatcatatttgatttttaaaatctcaattataataaaatgagacgcggcgggcgggtcgtataggagtacaatggtagagccgtcgatggttggtgggttttctagaaagtaaaaaatgaattccaacgatagttgtgttcaatttttacaatcccaatgacaacaaagattatttgccggatgggtcgtagaggagtataatgacaacgtttgacgggatttctaaaaattatcaaaaacat

SEQ ID NO: 25778 - DNA, 9262 bp, Oryza sativa
ttttagaaattattagaaagaagcctgataggacaataaactataaaaactataagtttttaagatccaatttttaaaggttctaaggagaatgaatagaaacagtggtagattgagcaagctaataaaaaatactatgacagaagtaaggggtaacaactgatgtgtcttttaaaaactactacctccgtcccaaaataagtgcagccgtagatatccgtgcccaacgtttggccgtccgttttatttgaaaaatttgcgaaaaatttgaaaatatttagtcacacaaaaaatactattcatattttatcatctaatagcaataaaaatactaatcataaaaaattttcaaataagacgaacggtcaaacgttgagcgtgaatagtgcaaaactgcacttattttgggacggagggagtataaaattagaaacacgaagatgataaggtttggtatttcaaaatcttaagtcaacaagataactatttaataaattttaagtacactcatattaaaaaatatataatttatattgacatgcaatcattttgcgcgtaaaaaaaataattttatatgggtactagccgcgtaattgcgcgggccatccagttagttcctatatataattatggtgctaggctgctaataagctgccagttcgccacaagcccacaccaccacgtcatgacgtccgtgtcgtattctctaccgaaagtgtgcatgatgatggccatggccatcagctgcatgatgatgatgtcccaagcagcgtcgtcgaccgccgccatggcgcccagggacggcgagggcggcggacgacggcaccacttcgtgctggtgcacgggctgtgccacggcgcgtggtgctggtacagggtcgccacggcgctgcgccgcgcgggccaccgcgtcacggcgctcgacatggacgccgccggcgcgagcccggcgcgcgtcgacgaggtgcgcacgttcgaggactactcccgcccgctgctcgccgcgctcgccgcgctgccgccatccggggacggggagcgcgtcgtgctcgtcggccacagccacggcgggttcagcgtcgcgctcgccgccgagtggttccctgagaggctcgccgccgtcgtgttcctcaccgcgtccatgccgcccgtcggccgcgccatggccaacaccaccgacgaggtaaattaacatcgactagctagttgtttattaatgcttggcttaagcgcttaactcgatttgttaaactagttttatcttaagatttataatgttaaatttatcatcaagaacttacttaagtacaaattatgttcgaagtaattgaagaattaagtgtgaatttaacgatcactaagtaaaacaaatatatgataatctttttaagcgaggtaaatgagtagcccgtgagatggctcgttaattacggtcttgagcaaaagctcatcttactatgattacgagttagagccgattgaatccacgagcttttgagctctttgggctagtagagagaggaagccttactatatcaatctgaatgtcatttttcttttctcattctgcagctagcactgttattgaaatataccgtataatgttttaagattatgtaatcgaactttaaaatctattttccgttaaaaaaaattaaaaatcttactccctccgtttcataatataagagattttgattttttgcttacaacgtttgaccactcgtcttatttaaatttttttaaaattattaattattttatttgtgacttactttattatctacagtactttaagcacatcttttcgttttttatattttctaaaaaaatttaaataagataatcgcttatatcgtgggacagagggagtagatcactagtataagaaatcaaatatggtagcaatccatggctgcgaaagggaatctttcttagcgacatggacattattctttttttgctctatctgcacctggcagtgtttgctttttttgaaagaagagctagcagctttaaaatatctttcactaacaaacgtggtagtcttacgagaaggaaaaaaaataatgtactatatccgtcccaaaatatagtaacttttagctataactttaaacacagttatctagattcatagctaaaaataattatattttgagatagagggagtacttaataaaacttaaattgcaaatttataatcacctaaatttgcatattactaagacttaaattgatggactacgggtctgtttggaggagctttagattctgagaagcagctgtttggtagccagcttctgagaatctggaaaaactctgaaacccagcttctccagcttctggcttcttagttcatttttcagaatctataactacagattcttagaagctgtggattatttgggggccgcttctagcagaagcagttttttggaaaagctgcagctgggacaagctccgccaaacagggcctacgtaaaatatgtaattgtaagttcattttatctgcaattgttgttatgtatgattttgatacatttttatccaagattgaatattttaatatgtaattttatttgtaccaagttttaatgaatggtaagttatatttcatgtttaggttacaataatttcttcaaccttttatttaaaagaaaagggactttgcgtataaataattaatagaagagtggtgtaaagaatcatgggattgccattcaagaaattaaaaagtgattgaaattgcctaaaacaacagtcgaatataaacattcctaaaaaaaatacttcctcaactgtaaaatataaagcataacaaccactaatacaaataccaagaaaaaagttattatgacattattatttggatcacgccgataaatacaatacatccaataaaattagatatcttaatttagtcaagaagaaatgctcaggtgctagttaatcatactactcctacatgcacgccacgccttgttttagaaaacattgaaaacaatagcacgtacttcttttgcatatctattaaaaaaagcttctcattttcattttgcgtgtgcgagagaaagagagagctagacgtaattaagaaagttgacttatcttgataagaagtaattacaccggaagttaacacagccgagatcgccgacatgggcgtgtctgctctctgctggaggtacgcgtagtactattaggccctgtaatttcgagtttcatatcgaatcgaatgtttgacgggatatcgaaaaatgttttaggacacaaatgaaaaaactaattttataaatcaactggaaaccgcgagacaaattttttagtctaattaagccgtcattaacaattatggattattgtagcatttatggctaatcatgaactaattaggtcaaaagaatcgtctcgcgatttccatataaactgtacaattacttttatatttaatgttttatgtatgtgtcaaagatttgatgtgatgcttttagaaaaaaaatttagaaactaaacgagaccttactctactcctgtgactatacatgtctcatggctggctggctgcctagctggcgccgcgccttatgataaaacgtacaagacaccactatactctaaaaatagtcgaatccaaacaccaccttttgtacatgaagtcagaactctagagtctattgcatgaataagagctaattcgtgagacaactattttaagtctaattaatccataattagcatatgtttactgtagtatcacatagtataatcatagattaattaggctcaatagattcgtcccacgaattagtctagagttatggaatgtgttttgtcattagtttacgtttaatatttttaattagtgttaaatatccgatgtgaaatttagtccttctatccaaacatgccccaaataagtactttcatctctaaagtctcatccacctccgaggaccgcgcttagcgcgggtggcaggagccagtggctcgctccgtgccgatcagcattcgagtcttagactcaacgctcgtccctcgcccggggggatttttcccctctttacccgggactgacttcggttggtcccggctaggtaacagggtacacacacgcgtgcgcgtttagtgggactgcacgttttccgtgcactgaggcctagtgcctccaatctcattcctaacgtgtgtgtgcgtgtgttgtagtgtgagtgtagtaatttagtcgttttatctttctcttcttatcttccatgatcaaaaactctataattaagtagccatatttgggtcggctggagcactattatttactccctccattctaaattgatctacatatttcataggtacaccaagatcaagaaaaactaataactctctcatactatatttactctaacaacaaactctatgcatgcaccatccctactatttcttagccaatagcaaatcaagatattgcatgtgggttataaatacttatatgtatggatgcatgcatcaatgtctatttactccaatgcacaaataacgaatagacttaataaatgaacataaatatgcagatcatttaggaataacctcaaaaaactgtatgtatatcaatatgtgatggagagagtactagctagtccgtgcaatgattatcatgtatggatgacacaatatatttattacgttctaactttagagtttagactagcccacctaaacagtcgaatccaaacaccaactttcgacattttatcactacatactctaaaaatagctatacttggtatataatttaaatagtataagtaactatgttttactacctccgtcccaaaataagtgcagccatagatatccgtgtttagcgctttgaccatccgtcttatttgaaaaatattaaaaaaattagtcacacataaagtactattcatgttttatcatctaataacaataaaaatactaatcataatattttttgaaataagacgaacggtcaaacgttgaacatgaatagtgctaaaactgcacttattttgagacggagggagtaagacttaaagtggactagcttgtgatgtgtgcacacacatttatatcagaaaaattaatataaggaatctcgtggggcacgagggcacatgataaaacaagggcgaaggttacatatctcccatatccatttcccctaccaacttgctttctcccccaccgagcagcagcgcttcatcttcctcctccctccttccactactctgccccagtggccatcctcctcctccctctcctcaactccttgatgatcgtctccaacatcgacgacatcctctatcctcttttcacccttcctacaccaaatccagagcatgtgagagagtggaggttgacaagggcatgggggttatagccaaggagggagccaactatggctgtgaggttgggggttgtcatgtatgagtagaaggaaagggaggcggcgaggccgagggggacaaggttctgagcatcgacatggaggtggaggcagccggtctcaacgtaaatggcaaccttggagttgatgaagtggattagaggccgtcgggtttattcatgctccttgctaacccatcacttctactcgtcagtgttgtatacaggtacatcgcagccgataccttaggtatcagggggttgatacccagggtttgatacctcgggtatcatgcatggtacctaggtacaagggtttgataccttggggtatcatgccaggtaccttaggtatcagccagtacacatatgtactgtcggcccccggtttttagatacggaaagccacatgtgttcgcaataccaactccctggatcggtaggttggcatacacacaatataatactgtacaacatcgtttgcattgcatagttttatagttctcattgatacaaggaaagcccgaatgggttcccgaatagaccataactggtcgagtacaataccaacatcaaagcataaggtaggatagcagaagcgaggctatagcggaccggctatattcccgcaggcaacaactgggagttagtccctagggcgtctcttccttctctccctccttgggagcgtttttgaatggcacctccacatcaactgggtataagagagggtggtaaagcaagggtgagtactagcgtactcagcatgtcaccacttaaaataaatgcaaataatgaatacatggataccaggaaggggttcgagctatttgcgtaaagctatatttcacaaatcatttcacaaacctaggacctagcagttttaaccgaaaatgtcgttaagttgaagttgtgtttaatagtgggggttcatccacccaccccaagcctcgcttggtcaggtttaccctcaccaccagttcataccattactatactaacctcctcgcatgttgggcgagaggttacacaagtcttaacatctctagtctaagccgtactaaactttatgaggttcgatcaatcgttcgaaggtccgttcattcgagcgttcaaagatcgttcgttcaaaacgttcatgtgtttgattagccgaaacgtatgacggggttacgacgaccgagaggtggcgcaatctcttgcccaaccgaggcccaatcgatgccggccggggcggagcaagcgaagaggcggcagcctgtgcgcgggagggagtggcgaggatggatgggagtggaatgtcggggagaagggagaagagaggggcgggttgcgtgcttggctttggcggcgcttatataggtaccgggtgagctgatgcatgcattcatttcatccacgagcttccgcgcacgtaggtgaggtggttgactgtttggcggcgcggcggcacggcgtcaccgattggggctaccgtggcgatgcgggattggcttcgacaggtgttgggtgatggctgacacacggcgccgttaggcggaagctaacctcccgcactaactcgagtaatatcggcaaggtggcggtcgaagacaggattttcgggcgttcggccgccaatcgtgtttaccgcgtcgcggtgcgctggtgcgctggtggatccggcgcggcttttgctgccatttgctcggcggcgtgcggttggggagcgacaaaacggccagtgagggagggaaggaaggggcggcggccagcggcggcgcgcgaacggcctcacccgcgatttaagggaggacaaagccgattaagggtggagggggggaggggggagggcaaacatagacttccctcggctagccgattgagggaaaaaaggagaaatgggccaagggaggtaaatagaattttctttaaaaagtctcaaacagtagaggctaggttgagggagtggatttggacttcgtaggatagagttgctctgagaggtaaaatataaggataaaactcttttcgaggatagaaaggattgtagaaatttaaacaaaatttggcacttggcgagaaagggtaaaatccaaatccataagttcggcatgatgcaagtttttgcaaattttcctgaggcgaatttttggtcttcgaattttattttaacgaacttttcagggtgtgttacatgtaccaagtgaatagtatcatatattaggtatcgggtttggtacttacggtatcaggtaccatatcaaggaatgaggaaggagggtgcgctctcatcgtctggcttaccgacaagtcacatgtcattgtctcatcttcttttctcccttcctctcgacgcctccctccttcctctgttgttgctgtgaccggtgagggcaaggagttagtggtgccactgcttcatttctttgaaacgtgggagctcaaacataggggaagatggattagatttatataatatcccgttggaatggaatcccgtgctctagcaatcctcatactaatacacggaatcatgtggtgcatgaggtactagcaaaggcccagacccatctttgctacgggtagctatgggtaaaagaaaatacgataatatatttagataaaatatctttggtgtcaaatatacaagcaccgcttgtttgtgattttaatacatgtatccacttttttaaacaaatattcatactattgcataatatatgttaaaaaatattaaggactatcaccgccactactattttccatagcagtatagatattattacatgtatgtaactattctacgatcacattatgcactgtatattgatgatatactcctacataattaattaattatgaaattgttggtttctactttgcgatgcagtatgtgagctttgttggggcagatttcttcctcgactcgagggtgctggagcaaacgaaccccgatatcccgggaaaccctgaaatattcgggcccaattttatggcccagaaactttaccagctaagcccgccagaggtaatgccttaaatcgcaacatgaggcatcaatttctatttatttttttctagagcaagagggaattttaatttaatttttttatgatactctagatcagctcaaatagttcgtatgtttgctctcaaacagatgacgttatgtacggtcaaatctcacttgttaaatcaataataaaaaatatttatatttaataggtgaaaatggcattagtagatttgtcattaaaaaagcttcatatgattatatatgattatatttttaataatttgtatagatgtataatttgagaaaaaacataaatattagggaaggacctaatatcaaataaatagaaggggtaaggcttcaaatttagaatggctaactcatcaccctgtggagttaggtagaataccccgaacgtttctctttttgaaaaaaaagaacgtttttttcgaaaaaaagaaaatgatgacacttacattaaggaatatgtgaatgatcaaaatgatgttaattttcgattttcgtagaaaattcttttgaaaaagcacattttatggtaaagcttctgcattccaaataggactttagctagggatgacaaaaatcaatctctaatgcacctacgaattgacctgatatattcatatatataaatgttcatttatttttggatttatgattcatatataagtctttctttttttttccataggagttaaaccctggcgttgtcgctgatccggcccgcgaaccggttcaccggcgacgcgctcatgagggacgccggccttctgaccaaggagaggtacgggtcgacgaggcgcgtcttcgtcgtcgtggaggacgaccacgccatcc

SEQ ID NO: 25779 - DNA, 15087 bp, Oryza sativa
ccggaggccgcatcctccattgtccacgacacatcacagctcgccgccaacggccgtgtccttcgtcatccacgccccacactagagctcgtcgccgacggtcacatcctccaccgtccatgccacgtcggagcacgtcggcggcggacgcgtcctccatcatccacgccccacgccagagctcatcgtcagtagctgcgtcctccttcgtccactctctggcgatgagctccctggcgacacaacaataccaatctccatggcatacaagcagcaatacaaacaatgaattggaatcaccttctggttcttcaccttggctggaacttgctcctccactgccgcctcttccttaccctcttctccgactagctccccttcttcgggtcagcgcagcagcatccggcgatgtttcccgggcagtgcagcaaggcaggcacgagtcctttctccggagagccccttccccttctcctataatgtgctccttaacggagcggcgaggtgaggcgaggcagcgggggccttctccgacaagctcctctctctctctctcctccgctagcaagctccctccttccttcgctgccgcatgccgccattgcgctgctctgctgccgcgcttagtgctctaggatgaggagcaagacgataccgtcgcgtgggcgctggaaacaggattccgtcatttagcatttccgtaaagaaaaaggtgtctgtgagtatcatcaggagattttcttttttgaaaatgtacatcttttttttccaaatttgcatgacttgtcgggttcaaatcaaacatttaatttttttcttcatttaagtcttgaatgcatagagactacaaataaaacaacttatttgaaataactaaaatattaaataggtctagctcttatggatggagggaatacgtagagggtagagtacaattttctatttctaatacgaaggaagatacaattttctgcagtatatgcactcactgttagcaattaattagcaccgtaaggaaatcactgtggaatgttcagaacgctgccttgtccatttattaatcttccgtttagatcatcatttagtttactctcgaaagtctagttcgatcagtcacttgcatggacgttaccaaattttggctattttagttggtaatattttttcagagatatattatccataataaatctacaaatacttgagcctgttatgctatttataattgtatcggagcgaaataggcctacaatacaactattaacctataaaatttgataggatggaaattaatatgattactgaatgttactaattattcgaaaatgaagggaatatattattccacacttagccacaaagtgcctagaaacaattgggacagtaaatattttaaggcatgttcggtccaatacacgaattaattaataactaatataattcaataaatagcttgaagaaatgttatgtgagcagtgtttatatacaaaattatataagaaattgtatttataaaagcctgatatggataattcataccttatcttaaaaagaacacggtctcattagcgttagaatctcataaatacacgctatggtgctaactaccagtttgccagctgccaccaaggaaccaacccaccacctcatctatattaccgtagtactctctccatcccaaaataaaataatctaatactggatgtcatatatcttagtctagattcatactattaagacgtatcttatccaatactaagttggttttatgagacggagggagtatcttctaatgaaattgtgcaacacctccacccaataaatatgaggaaaaagtctacttttttacatttctagtttgattctcgttctttgaccacaaaaatcagggacagaattaaaactagatcagattacctctctaggcagacagttttgatgtttattttgttctatcttacatgttgacctgatctttattatacgtaacgtttaactgatattatagtgagaggataaaatgacacattatctctactattataaaaattaaatttgtttccgctaaaattttggtacttcatccgtatttgagttgttttttatttggttataaatcatctgtatctaattcgatgtgggtctaaataactaatatgcccctcctagcccgacccaagcggtccaaaccatcctgccacgccatccaatgcgtctccactcggcgtggcgcgtgcctctcccccgatcggtgttttttttcttttcccatttttcattttcattttctccttttcttttcttccgatcatcatgatcttctcacgatccttcccatctcttccgttttctcctccttttctcttttcttctctttaaaatttctctcctcataaatgttttccttttgaaattatcattatttaaggtgtgtatacggtaaatttgttactttacaaatgctttctatctacagtaaaaaaaattcaataattgaatattcaaaatttcaattttggtcgatgaagtatagcaaatacacatgtgttaacttatatagtagccacccaatcgatttgtgaggctatggaaaggtgtacataaaggattcttcgtatgataatgcaagcgaatgtaacatggttcaatgctatatatgattttgatttagttttaccattattttgtcttgtttcagtcatttaaattggcagagtttaatcaatcgcgaaaattattttcagctgttgcaacgcaaaggcatttttgctagtaggagtaaatataaaataaattcagtgggacccacatctacatgccatcctatgtcatccctactttctcttcctctcctctacactctcttcactcgttgcctccatgaccacctgcccatcacttcctcgagttctccttcacccttctcgtcttgcatcagaagagctgccactttcctcatggtagggcgtgacgatgccatcaacgtaggtgaagaagattatgcatggtcgtcgatctagaatccgcctctcgatgatggtcatagtggcaatggacccgcctctcctcaaccgcaggccacgctcaccagatgcaacgtcctcatcccgcatgcactgctggagggcaatatctagaggcgggcgtcaccaatctggagtacgagctcgacttggaggacgggttgggtgagttgcgtcacctcctctatctctctctctctagatttagatggacccgtctctcctcaaccgcaggccacgctcaccagatgcaacgtcctcatcccgcatgcaatgctggagggcaatatctagaggcaggcgtcaccaatctggagtacgagctcgacttggaggatgggttgggtgagttgcgtcacctcctctatctctctctctagatttaggaagccacgaccgctgatgcaaccaatgtggcatctgcctggagtagccacgggcttgtagtcgtcaccgcctcctcctcctcaagttcctttctttcctgggctcagtcctgccttctccacgcactgcccgaagcgagctttgcctcctccgccaatgccactgcctttgccctcgtcgatgcccagccagcttttgttaatgactagcaaggctctctacctagacaaattcacacttggcgcgacaatcaaggtggcatatgctcttgtcgatgacagcggtgcagcactcaggaggtgcctccgtagggtctcatcgtctagtgcgatatagtggatggcgtggtgggagagagactgaaaggagagaaaaggggaggagagagctgtcatgacatgttagtttcaccgtttttctttaaaaaaagtcgtgtgagacttacacgtggtttttgtctatttttaattgtttcttttgaattggaacgcatgttaagtgttacgtaggtactacgtcatgtaaaaaaccaggttaaagtgttacgtaggatgaaatcaccatcaaaatcgtataggaacgtaaattaaattgattttaacagttgagtgagtctctatacttgcttttcatatggataaaactcgttatgcactcaaggaaggtaaaaatggactttttcctaactatgaggattgcccaagcactcaagaccacggttggtggcacagtggagcttggcggcggcggcggcgaggtcgacggccgcagccatgtaaatagtgacgtacagtaaatgcttacggatatatggaggaactgaagttacaattttctgcagtgtgtcccacctgtttgtccgtttagcactatgacgaaaatcacgcggtacacatggaacgttcaacccgctgtcgacagcgataaaccttaactgagtttaccgcgtcttatcagcggtacacatggtaataatgctaagacgtcttatctgtttatcgctgtctcgatatagtttggtctgctccgtaatccttatcctccctccgtcataaaataagtgcagttttacactattcacgtttaacgtttgaccgttcgttttattaaaaaaatttatgattagtacttttgttgctattagatgataaaacatgaatagtattttctgtgtgactaattttttaatttttttataaattttttaaataagacggatggtcaaacgttggactcggatatctatcgttgcacttattttaagacggatgcagtatattttataaagttcgtactcaataagtgtagtcacttatgaagtcacgacatcttaattgtttttttttacttatgaagtcacatcatattaattgatttagcatttgaatgatttatcaaggacgtggattgcatttcttttcctccgaaaccacaccatacaacttaatcatttataacatttagataagtgatcaagatacaaaatatataagcacatgaaaaacatctatagtaaataagaaagaaaattttataatttatatatactattttgaaataattgtcaagattatggataccacatatctaacagtagttgacgaaatctcagtaggacccaccacataccatgtcttatacggaaactgacctcggatatggagggagttccggataaggaaagacaaccagagttctatatggaagcgacaaggctctactcggattgtatccatactggtttccctagttctacttggacaaggggacacctatgggtataaatacaagaccccctaggaggagaggggagacagaacaatagattaagacacaatatcaacatacaagccaatatacgccaagatatgccgccggatatcgacatcaaagatatgcctggactgaccctatcccggtacctacagaggccggctgtagggatctagcgttgtctctgatctcgccgagcacagattcgaggaggaagactaccctgttgtcgactacatgatgatacttcaatctgctatgtcgataacagatagataggctaccccaaatattgtaccagtgtgattatgatgaataagagcaacgaccggcttcggccaacaggagtagggttattacctgacaattcaggggcccgaacctatataaaaatcattgtccccatctctttacctcaatctcgcatatatcctagcaccaacgatccccatactatgcaaataccggaatcgcgacatcgaacatcaacaataatagcggctaccaaatttaattttacctattttaaatgtggcgatatatctttttggtttttgtaaaaacgtagaataacgcaattgccagaccggtcttgaccactgtttgataatttttcgtgcaggcctgcagggattatccataacaaaactacaaatattctacattattgaacgaaataaatctcactgtatagatataaacttacagaacagataatgtggagatagccattgctgccgattatttaaaaacgaagaaaacatatactactccctccgtttaattaaatgagtgttgacttttcgtataacgtttgaccatttattttattaaaaaaatataaatataatttcttttatatattgtggacttgttctatcatcaaataaaatataattttaacttacacttttacatttctatattaaatttttaaacaagataaacggttaaatgttgtgtgaaaagttattgaaaataaggtagtgtaatttaacacttaattagccacatttgttacacaaatgttatggtgctagccgccagtttgtcagcagcccaccaccataataccctattttattaactttctactgaaaatatgcaacacgcaaagaaatataaacgtgcattaaataattttctactgatgatgtgcaacacgcaaattaaagaaggaaatatatatataggagctacgcagatgcatatgcacaatcgatgatggcccaagcacccatgtccacgggcggcggcgccatggagctcggcggcggcggccatgagagcgtggaacgtcgtcgacggcaccagcaccacttcgtgctggtgcacgggctgtgccacggcgcgtggtgctggtacaaggccgccgcggcgctgcgccgcgcggggcaccgcgccacggcgctcgacatggccgccagcggcgcgcacccggcgcgcgtcgacgaggtgcgcacgttcgaggactactcccgcccgctgctcgacgcgctcgccgcgctgccgccggccggcggggacggcgacgacgaggagcgcgtcgtgctcgtcggccacagccagggcgggttcagcgtcgcgctcgcggcggagcggttcccagagagggtcgccgccgtcgtgttcctcaccgcggccatgccgcccgtcggccgccccatgtccgccaccaccgtggaggtaattaacctgtgtttagttcacactaaattaaaaatttggttgaaattggaatgatgtgatggaaaaattaaaagtttgtgtatataaaagtttttgatgtgatagaaaagttgaaagttttaagaataactttggaactaaacacggcgttagttgcgaaatcaacagaagttttttctgatcgatctactagtctttttttatttactccatgaatgcgcactaaacgatgttttaggattacgttaattaaatcaactttaaaatcttatgacctaaaaattccaccctatttttctaaaaggtagatgtataatatgtgagtttaattaggattgtgtcaatatctaagtgtcaatataaccctgaaatgctcaaattaaaatggcattttgtctgggagtccttaatgaattgtactgtggaccaacaagcattgtttgtccgtgatttattttctaaaaagaagaattatgaacacacccacacatggacaaaaatattttaagattgatagtcaatacaaatgcactgttgacatagactcatcaattagcactgaaaaaataattatacaaaaatatgagtactcatacttaatgagttgaagactagaatttgactgagtatattctaccattcgaaacttaacctatttaaggctgagttcgtttgttggagttgtgaactaataatcactcatacatatgaaaacgagaaagaagtgttggcaacctcaagcaacggactcagtgttagtagttacgcttcgtttttagaggtaaccacaactacctaccgagtatcgagataatgtttttgagaacgacatttaaatttggtcaatctttaatcatgttgtgaacttttttattacatttctgaacttagtggaaattaaatgatctttctcgccagataatatagccgacatgattttattttcatggaaatcataggaaataatcatattccctacaaacattttgtcgagataaaacctgccagacatctcgactccattattattatctccgagtcataatatttgataattttgagtagcggaccatatatattttttaaattatttacttatgataaataggctttatattaccacatatatgatttgcactacataaatataaataaatatgtaccgatttacactacatattttcttcacatttatgataactaggctttatattaggtttgtccatgtttccaagagaaaaaaatatttttatatttaatcatgagtaaatattttactgtgagtaaaaattttatttttgctaatgtggaaaaatctcagacgtttgttttcaaatttaacggtagttccaatgtttctaatatatatggtttgtattacatactttttctgtttattaggagaactcattttctttgcgtgcgaccgagagagagggggggagatatagacgtaactaaatgcgttgacttagtttaatattgacaactactgctaatgcgagaccgacacatgagtctactactcccatcgtcccaaattataatatttttttacatggtcttgaatgatatatttttgactattaatttatttaatattatgttatcaaacaactacaaaattaatatcacataaagtattttaaaatacaaatctagtgatataacatgtataatacttaaagtgtgttcggaagctagtgttcccaaccgaaagagtgcgcacgaaaaacggagcggtccattagcacgtaattaattaagtactcttagctaattaatattttttaccaaatttagactctagaacaagctatattttgtttattaataggacacatcatacattttccttccctactaagggctactttgggaaaaaagttccgaaggatgtattcggaaagaattactatatggacattttgaacaaaggaatggcttttctgaattcctttaaagtttgttaggattgcctacaattatgagaattttggaggatttttaacataaggtttaacgtcttgaaaatattcatttatgcctcctctcttctgatcaattcctattctttttctgtgatccatacaaacgatatggttttcttatatttttctatcataagacttgtagtgacaaggcactcgaattctaagtttttcaaaaattatgtattccaaagaagttgtcccaaaatatgagggatttttttttatttttagataaagagagtgtttaggacattttagtcatttttcctactacctctaaccccataatatagctatctcttctattgaagtttgaatggtagaggtagttatattatgagatgaaggtaatcggtaattctaaaactggtgggtaacccgccatgcaattggtccaggtggtcgtataggtccgcgacgcgtggagaaacgagaggaacgggcggacggcacaccacgatagattttcttttctttttttgttactcgtgccttcccgatttctcgcgtacgcgcgtccgatttgggcctgctcccagcaaggttgggctgattggcggcccatgcgcgaggaaggacgcgtgacgagcggacgaatgtcgtcgggtgcgtgtgctgggtctttgcctcttgggtgggggggtactggccgggcaactcctgcgctagcttcatgtaggaggaggaaaataatagaaaaaaaaagaccaatgttagccatcaaggaaattctacaggcaaaattaatgcaaattaaatattagatagaaaaaattaaggtaagaataatttgaaagaaaagaaaatgttacatgcaattctaaaaacaaaatctggtctaatttaacctagcaatttttacatcatggagtctaggacatttttgtagttatcagacagatcccatggttggagtcaaataagtaggtatgccctggttgggttctgaaggtaattttgcactgacaaaagtggttgaattacttcacttgctccattttgttttcttcagatataaatttttaagccactatacaataatatctattttaggtgttcagcatatcttcaaaaactttattaagactgtaagtgatgagggaaggattgaaatcactaattaagggatcatttcgaatgtgtgatttttttggatagaaatttcattggcataaaactaattctgaataaacatgaaagatttattaggatatagagaaactcacgttggtgatgggccataaatcagtcaccagctcagcgcgcgccaattggcatgctgattttctagtatatactaaagttttctcgagatacaatggatgcttttatttttggaaagagggggtattcgtgtgcacacttttctacagtcacattttattaggtaaagtatgccgatctcacacacacacacacagatatatatatatatatatatatatattgtattaattaattaactaatcaatcaattcattagcaaatagtttctactaattgtacgcagcacgtgaactatgttggggtggagttcttccttgactcgatggagctggagcagcagaacgctgacatcccggggaaccctgtaatcttcgggcccaattttatggcccaaatactttaccatctaagcccacaagaggtaataccttaaccaatcgcatcaagagggaatcttataggatttaaaatgttcaaattgctaatctagatcgttaagaccgcctagagaacggcaagtatttcttttagttgaatgtatttgacgttggaagaaataggtttagttgtctgaacgtcaaatataaattaaatgtctagatggagtaatttcgtgataaaatagcttgttcggaatgtgggaatttttcatggccggccactttggaattaacgaagaattaattccaagtttccaacaagaagttagggcgttttttttctcaagatggaaaacttaatgttgggatgttacattattacttgttgggatcgtatgggagtcacacaaataggatttgtactagcaaatgtggtggaaaatgtagaaactcaagacacacctaggagagagaaccacgagatatacgatcatgttaacttatcgtcaaaatccatatggaatagcacatttcatacagatccaagagtaatctgccttcgacgctcaattctccaaaattattgtagtaattttgttttgttataaggatagggacctcgtttagaaaacttagttattttcacatgaaatttatgcattccaatagaatgggaccttcagaatccttttagatcctttctagggggtggagattctaagaagcagaaggtgggaatctgaaaaagctttgatttttcagcttctcgttgctagttcattttctatagggagaatagctaatatggtccctaaagtttcgctcctgggtcactttagtccttaatctttcatattatccaaacaagtcctttaaatttgtcacgtgggttgatataatccttggccccatcaaaatcgccacatcgacatgccatgtcaccctcctatacaaaatctatatgatttatctaatttaccctacatatataataagaaaataaaatacaaaaggaaaaagtaaaaaatatatatatagtatatgtaagagcaaaaatatatgtcaaaagggtgaaaaaaagggaaagtttttttttctatggttatatctaattcaccgttatatttatttttctatgatacgtaagggtaaattggacaattcatcataacttttgcataaatgattacatggcatatccatatgacaatgttggtagacccaaagattattctagttcttatgacaaagtttaaggatttcttttggaccatttaaaatgttatgaactaaattgatattatagagaaactttagagactacagtagctattctcccttttctatactatatatagtagctactgattctgaattgtatgaaaccgctaaagattcttaagaaaaactacagctacatgtccaaaagctaacctaaacaggaccttatttaactaataatttcaatacatgatggtgacatgattatatcgtgtttttgccatataggatttgaccttaggactatcgctgatccggccgacgaacaagttcaccggcgacgcgctcatgagggaccctgggctcctgacgaaggagaggtacgggtcgacgaggcgcgtcttcgtcgtcgtggaggacgaccgcgggatccccgtggagttccagcgccgcatgatcgcggagaaccccggcgtcgaggtggtggacttcgccggcgccgaccacatggccatgatctccagcccggccaagctcgccgagttgcttgttaggatcgccgacaaagcacacgaaccatgagtccatgactcggactaggagtggggacagccaaatcactgatcaatagggcagaaatattatgtcacccaatgaggcaaagagaatgagggaaggaaaaaagaattaatgattgttacactgtttgtttgaactttgaagtagtatgtaatagtatattatttatttgggcaccatttgatgatgatgatgataataataataataataataataataataataataataataataataataataatagtaataataataataataataataataatggtgtttgtttagaggttattgtccgaactgggctgaaaaaagatgtgccaagcatcgcagatatacaggagaaaaggggaccatatagtaaaaaaacacgtaccaacacataaagtgggtgaaactgcccaaaagagaacatgtgttctagaaaataaggagatttaaatatttctcatttatacctttggtaattatttaagagtaaagtgcataggcggcagaggcgaatccctcataattcgggcccctttgaatcgcaggaatggaaaaacgcaggaataagaaaaacacaggattctgataggaatgcagatgtaaaatagaggattggaaaatacaggaaaaacataagaatgaccgtttgattggaccacaggaaaaacgcatgaatcggatgagagagatagattcaaaggaatttttccaagaggtaggacctcttgctaactttcctagcaaatctctataggattacatgttctataggaattttaaaggatagtataggattcaatcatttgtttcaaaggctttcatagaaatttttttcataagattgaaatccttcaaatttcctacatgtttcctacaaatcgaaggggcccgaattcatgggtattcacctaaataccaataaatattttggtgaaacatattatggattacaatgatttgtatgtcctagtggttgttcaagttatataggtctgggttcaactcctaacatccccatcatttttatcctcttttatcttcaatagtttagtttttaaaagatagttcttgaccaaacacatctccaattttcagtatttatttttccttcttttagtttttccatcttttatattcaatagcttagtaataatgtcttctaatagactttacttaggttttgtatgtgttgacagaaaacacgtagcctgggagatctgcttaactccagtgcaggtccaaagctcgccttcggatgtattagcgtgccagttgatttgatcctgtaatcaacaagaaatagaagcaaagaaaccgtagttaaatctaaaaatgatagccgatcggctagatgccgatgacatatcatttatctttgggccgatgtcatccatgtatcgatcggcagtcatgaataagtaaagaagaactaaatctacttgattggctgtagatattaacaatatataatccttatatcgatatatacttaaatcaagtgattgggatagatcggtcgccatgccgagacagtataaatcacctagatcgaaatatatattaataataagactatatacgttcatagcatagccgatcagatagatctagcatgtatcggctaatactccgataccactctatgttaagatgttaaaacaagtagaatatactaaacaaaagcctaatatacttaaatgcagcaagatcttaacacaaagggcagatttaacatatcagcgaaacaaatagagtaagtatagttaaatcagatacgatcggctgaaactccgatactattctaatcaacaactagatggcaggctagagatcaatattctaagcatgacttaatagatcaaacttaattgatgcagcattaagtatgaaaagaagaacaatatctagacaatcaagccgctagaagattcatagaatggtagatatcttatataatctagatcaatgtcgagatctaacctaatcggctgtcttttgcatacaaatattagccgatagtagattagataacgatattgctgaagattatataaggtatatggtaacttgacgaattatataaataagattagagcgtcatgaagatgtaagcactaatcctaagaacacgatccgtcataacgaattttacctcttgttgaagatcgaaaccgatgcagctcaacccgaaagtaagaactcgtcgaaataaaacaaaagcaaaaggtggcgatgcgccggaattgtattgaatgtgtgtgttttttttacatagggctcggggtttatttatacccgaggattacaagatacgcccataccggacacgaccattatctctaacaaactctaaaatatgacaagtctttgcggcaaacttttgcccacacttatctataaggaatttacataaatcatcattattaatagatacaattgccttcccaggactctatccatgcgtggcaatcatcttgaagcacatcaatctgagcctgacgtcgcgcacaagttgtattgtatatatcagcttatttagcttaactcaaccttagccgatcctagccgtagccgatcctaatcgtagccgatccagactccagccgattcttgctctgttccagaactcgatctccgcctccaactcttctttgaccaaatcccctttcctgatacgaatacttaccaaattcggttgttaatagtatggcatttaattttctttctcttttaactctttcacgtttaattttcaatagcttgtagtgtgatagtaatagattttagtatggcacgcaatatattccatttaaa

SEQ ID NO: 25780 - DNA, 9438 bp, Oryza sativa
aagtaattgcacaatcttagacactgttcaaaattttcaggggccacttaaccagtgaaaagtgaaatccaaaatggaatgagaatgatccacatcatctgaaaaatattatctgttggatttaatacaagacaaaagagagtgaatggtaaaaagacaaaagagagtgaatggtaaaaaaacacattcaagaggcttccggtgacgaagctttcctataagtggaaagaaagaacggaagaaaaaaccaaccctcatcctttaactaaatattcattaatcatgattgagctatttagtgcatattcaaaatgtatatttatgtaattaattttgtttctaagaattagttgttaatgtgtttaagaaaaatttgctagagacacacacattccttccaataaagaggtcatagtcgtctgaatatagatctaatgattttcacacaaatttaaaaaaaattaaactaattccttaaaaaccaacaaaatataatccacaaagggaacgcaccaatagaaaataagtggaggataaaggtaatacaatagcaaagacatataaagacgataactcatactattaaagtttgcaaaaaatattaagacatttaatgtattaaggtaatactatgattcatcctgacccaacttttactagcaacaagaaacccaagagaaatatattagcactctcacatatcacataacagggtgtgtagagtcgcgcaaatgcgcgacatcataggctagttgaagtgaagaattaattctgtgaacttaatattaagacgtgatcaatcatatgggagatagatcaagggggatttgttacaaatgttgtttggtaactgtcaaaatcctcaaaattttggaaccctttgatttgtaggaaaacatatgaaatttataggatttaaatcttacatgaaaattttctatttagtcctttgaagaaaggattgggaccctaacaatcctataaaattcctctgaaatagctcaagacaagaagatttttgaagaaaaattaacgtgaggtccaaccttatgaaaacttttattttagttatttttcttttctctaatttatatttttcttgttgtctattcgaacggtaatttcaattatttgtttaacacttgtattcatgttaaattcctatataattttctattcgtgtgtttctcgatcctactgctaaattgacctgatatattccaaccacctttcatttttgaatttatgatttatttttttgctctctgcacgtagtacggtagtaggacttgaccctggcgctgtcgctgatccggccggcgaaccggttcaccggcgacgagcttcatgaggggcgccgccctcctgaccatggaactctgtagtacatctatttggacattatcaggaaaataaatgaggggcctgtttagtggttatcatcagaaagggttgaaaagctgtgcatatatctgtagttcatgctacttaaatgtaatgtgcatatcatcagaaaggatgtaaatgtaaatgtaatgtgcagtaagacatgaatgctaaggaattagtactatcatagagccagaacttcaatgcacatatgaacataaactgaagcaaataaatgagatgattaacatactcaagctaaagactcgtcctctcagctgctatgaggtgaaatttgccaacttgaagaaataacagaaagagaaccagcaacagatctaattctagcaagcacaaaatcgtttactacttggccgattagtgtgtactattaacaattatagactggatgcctaccaaaataatctcagttgcacagcatattcattgcaaatggatacataaaactttactcagctcagaacctcagaatgtgaagttcaagaagtcctgtcctgctcatcatatagtatagtgaagctgccaaaaaatttgttcaggctccaaggcaatcagcacaaatcacaaaacaacagatcactcaacaggatgggccacagattggtcagggttaatgcctgcacttagaattgccgagcacagattaacacaaatttcttcctgcagcccaaatgtcagtcatcatccttaacacaactagcctaaattcaggggcacatatctgatggaattatacagaatgcaatatgtatgagatgacatgcccagtaagcctcccgatgacaggtgatgaccacgaacaaatttcccgcacgcaccatacatgcaaatccagtcacataatgcgttcagcagttacatgaaaggttcaaaaccacctgaagacatacataaccatgcaactgatagactacaaaaaagagaatagataagagttcaggtttctccaatttcttatgcattgcagccatcgcctgggcagctcgatagcatagcatgaggcagtcgagcttacaacatgctatcagttcttgcagggagcctcctgaagaagttcagaggaacagagggcatcttgtggcggaaccttgggtgtctcaaggtgtacaggcctgcaaggaagaccacaacacggaatggagtcacgtagaggacaatggcagcaacaaagcagaaggtcacaaagagcgccgtggctcttgggtctctccagcttagcagggactgcagcctttctccttgtgtcgcgagatcgccgactacggtctgtatcctcccagcaacactccgtagccggtcataacgcatcctcacaatgtcaggcggacgagaagtagggaatgtgtcaaactcttcatcaagctcatcaggatgagcactctccgcatgtgagaggcgagtgtccatgtgaggtggctgccttggccgccagcggtagtaccacactccaatcaggaacaggtagaggaagattgttggcagtatcagctcaggatacaagactaaaatcacaaagagaatgtggatcagtatggtggtcagcggatttctccaatggcagatctgatcaaaccacttggccaccgcaatcagagggcttaggacacccatgatacggaaaaagtttgccttgctcttccgcatgctccacatatgagagtcaacatccagcatgtactccacaatttccttccgcagtggtggttctgcacggctcagccttgttgatacaatgttggtggcttggcgccttagattgtctacctgcatcacggacaatgggtgtacatagtgcatcttgggcagcaatggttgtgaatacagatgcatcatgttcagcagtgatgagcatgtgaacctgacagcaagctgcacctcccccattttcttaacaccagcaggtgtcagaacaatcagagggtaagcatgagtatatactcgatcagtttctagcgtagagaggcggatgcggaccttcccaattctggtatcccgggcaccgttggctttttccccaccattcaagtggcaattgtcaaatacaccaatagtgatcacagtgcagggatcatacacctcccaagtgtattgttcattccacttgggtgtgaaactatcaataatagtccttgtccgcacccacttctgcccatacttagcaacacaataagcatcagttgttccacgcccatccttggtcttcatcggcaacaggccctgtgctgtcaagatacccaactcaagaatgccaatgctgtgcttccataactgtttagcagttggcctcaaatcactgctgtaatgtgttgactcatccaagacatgatatccaccttcgaggcatattctcaagtgaatccggcttgaaaatttggtctctttcttctgctcgccatccacaattacatgcttctcaagattgtaccactggctgttcagcaacttgtgatccagcctccgaggtacgtgctgcagagaaatgattgtccttccaagtacatcatccttccctggggcaatcctatcttctacactcagaatcaggtgttcctcgaatggttcagcagcaacaaacattaaatcctcattccacattggattcagcgtccggcttggtgatacccgggttctaagagcttggttacctagcatggctttgacataaacatcagggaacctggtcctgtcatttggtataagatcttgtgcctcaatgacattgactctcagataccaaagctttggagtaaggtaaacttttgatctaatacttgcaagtccatctcctgggatcgacgctgcatcagagtgccaagcttcagggaatgcttcatctgcttgagtacccatccaaacggccaacatcaactctcccttcaccttgtgtccattccgctcttccaaccgataccactgtggagccaatgggctgtcaggtggcactcgttttgggacctcattcaggtcaaacaacacccgcccgatgaagtcatccttgacaaagtccttatccttgacaatgatctcaaccactgatgactgaatgcgctccttagaaaaggcaaagacctggttccactcaggattagtcttcttctcgaaatgccgagttgtacccttataattcccaagcttcacctcaacatatgggtcacagcttccagtgatgtccttgcttggaaggtccttagcttttactacccggacataaagatactgcatctgctcaaccaagtcataggtggtggtgagcttgtcaccagcagctccaccaccaaggtgaggagaagtctccttcaaggagtactcctccggacggaacggcctctgcatcatcttgaacgaaattcttgaaccaaccaactcctacgctcctactcagcaatgaaagaaaaagatccaaccagcagcaactggtgtgctagaataactgcaacatcataaataagaacaagttttaaaatggctggttgtcggaaacaaaaatgatgaacgatatcaaaatgaacaggaagaacctggcaccttcgaattaacaagtcatcaggtaataaggtttctctcaacagagcacctcacaagcattttcttcatctcgaaccatcccagtatctccacatcatcaatcatgggaacaccacacctggagcaatcatggacaaaccaggtaaatctcgcgcatttactagctcaaagtaacaaaggacggttgccgttccccactgagggaagtaaatcactaaaccaagaggtgaaaaatgagttcttgcactgcaaagtaggcgactttaaagaataataataatctcgaaaggacagagaagcattaacatttccagcgcaggcggcaagaacaagcatgttctccctattgaccatgctccaatatagtaatagaaaactcaagacaacatatataccccccatctacatctggagagggagaccaaaccaaatgcaaaaacattcgtccagggattcacctgccatcaacgcccgaacgtcgtccccgtcgacatccagcccattccgaccggtgtcacgccggagatctagcaaccgccgccgccgccgccgccgccgagcaagaaacgctgctcaagcctgccattgccggtgcacaagaggtgagcaaccacaaacaactcgaaaaaacacacaagagagagcagaaaaaagatcagatctgaacccggcaagaaaaccaggaatcgagcaaaaaaatccccccaccccaaccattcgcaagaaaccagcagctacatatgcgcgcacacagcaagctcgtcgctttacccccttttcgcaagcacactttcactttcgcaaaagcaaaagaaaaacatccacgcacgcacggactcacaccccaccaaagataaaagcacgaaccgaaccaagacctctcaagaaccctcaagaaaccgtcacgcaaccgccgccgcgcttcccgttcccgaatctctaccgggcaagaccgaaaccacagatcggggaaaaccaaagaggcggaaatggcaccggcattacacggaaagcggccaagaaaaaagcagggatggatggaaagaacgggaacaaagatataccaaaagattcgagcgggctcaccacgcgatctctcccgagggttcgaggaggaggaacaaaaaccggaagcttcggcggcgagtggggaggggaggggaggggacgaagaggggaggcgagatttttcgattttccgcagggtttttctcgcgagcaaaaacaaacgctgtggagagagagagagagtggagcggggagaggcgaagcggcgctcgaagcgtgcgtcgtggtggaggtggtggtggggtggccggtggccttcttttttcgaaatgcgaagggggtggcggttttgcgtgttgcaccctgggttttggggatttggcagtttagggcaggtggtaaggggtggatggggtttttttgcgttttggaccctactatggggttttggggatttgagggtggtggagagtggagacaggagtgttgatggaacattgtgggggttggagttcgtgccaactctatctgcattgtcttcttccttcctctcccagctgccggtcaagtcttctttataaatggaaaatactactgctcccgagtcgcaaactactcttccccatccattttgatcgtctcataagatttgtaggtcttctcaaaataattattatctataagaatttcgtttgtttgtgtaaacagtaatatgatgattgaatgtgttgcatgtaattaatttttattggtgtataatttctattggtgtaatgataaacaatatttaaaacatgagcaattcaccggacacaaagcgatagaacacgttaactgatgagaattaatttgagaatgatgaatggttcggtgtccttggatttatgctttttcttaggagatgatcaaaatgggatggagatagtaccaaattaatagtaatcccttcgtctaggattatagagttatagtaccactacattcaaaaattatgagacacaacatggtactactacaaatcttggcatgtttattttttcagatttgtagtaatatgatttctcgtataagattaaattattatgagacagaatgagtagtactttcatatatttaaaaatgtatttttctcaaaataaattattctaccatactgtttaaattgatgtaaaatttatttctcaaatattttatttatctttataattaagtagttaacccatagcaataatctattaacaatctaatatgctcaaattcctaatgggtccttggtatttataaataaaagttctagtacatttagagaaaaaaatagtactacaagttgaggttagattttattttccttcttccttcattaatgatagttagtacgatagcagtactatatgttgaccagggtttcttggtactctgttgtgatcatgggcctgagtaaaaatagtataaaatatatttacgtgcggcttatttagtctggtgtttgaatctcctaaaaattaagtattaagtgtttcacgtaaaacgatgtaacaataacgtgtgattaattgagttttaattattataaatttgaaaaatagattaatcttatttttttagaacaactttcatatagaaagtttttagacgaaacgcaccgtttagcaacttgaaaaacgtgcaacttttatcccaaagtttatctaatttttgttggagaaaagaacaaggccatagtttggtgtattttggttttgattttatacacgacgttgtaaggtaatttttttccattgaaatggtaaggcatggattattaaagacatcgtgcacaattactaaaattgatttataataaacagtgatcaataaagttggaatgtatttctaacaaatgtttgccaagtttgtaaatataattctgaaaacgtaatcgtttgcatgtttggaaaatcaatatttttatgtgtgaaataatttataattagccaaaaaatgataatcgtagagtaatgtaaggtaaatcagtgacagagcggtacatctacatgactgcattgttcttacagttcccgtgcttgcaaccaccattgacaagtgaacttgggttgtatttagttccttccaaagttggaagagttggaagtttgagttaaaattagtacgatgtgactgaaaagttgtgcgtgtatgacaggttgatgtgatggaaaaagttggaagtttggatccaaacacagccttagagttggggttggtgtacaatagtacattcaaacaggttggtggtgcgccccttgtatgaaaaccggaggtggtacaaattattccctccgttttaggttataagatgttttgactttggttaaagtcaaactgttctaagtttaattgagtttatcgacaaatatattaatatttataatactaaattagtttgatcaaattaataattgaatatattttcataataaatttgtcttgggttaaaaatgttactacttttctctacaaacttgatcaaaattaaatcagtttgactttgaccaaagtctaaacgtcttataacctgaaacggagggagtatattaggccatcaccaatgcgtagccccaggtcgtccccttggccccctctgcccgtcgccgtttgcttttatcgtcggtgctgttcccccacaatggaacgtgtccctcgctcacttttggcaggggaacgcaaccgaggggacgcgttgggcgcgagcgtcacctatggacaccgtttccaccgaaaaatttccccttccacccctcatggccaccggcgacgggagagagaggccagcggcagcgacgaggtacagaggtgcgagtcggcggtgagagggggcgagagggagacctgcgcgacctcctccgtcggcgtcatgacctcctcctcgatgcggtgctgctggcaccgctccaccccgatctggccgcgagggggccagatccgcgcacgatggcatcggatatgccgcctctggtcgtcggcggcgccggaaccgaggtcgactacggcggtggggtgaggtcggggcgaggccggcatgagacggcgacgagtgagggtttgctcgcatatgtctggcgacggtgtcggcctgggttgtgagcccgacccggtgaccaccgcgcgatggacatgaccccgccggcgccgcttgccatcggccaccacgagggagagagaggctgcaacgagagagggagaaagaggcggcgaagagagagaggatccggcgccggcgaggtggaaggggaggacggaggaaaaggatcggcaggggagagcggagtaaacggagcggctggggagagggcggaggaaaaatcggcgaaggggagaagggcagagaaagagacgcaaagcggagaaggggcagaggaagagacgcgtgagataggagtggctgtagggaggggtattttcgaattttttcagtgccgagacacccattgtaggcttgagtatcttcatatagtc

SEQ ID NO: 25781 - DNA, 25431 bp, Oryza sativa
gggtgtgcactttgggcggcccaccgagcgtgagtagggacgacacgctgtccgcggtcgcagacagggtgggaccacggcgccacgctttgcatattcctccgcctcggtggtggtggtgggtagtagtatgggattattcgcgtgcgctttccttttttttttttacttgggcgggcgggcggggctgctacagggaatcgcttccacttctccttttctcgatcggcgtgcgggcagagacagacagcggacgggtgaagaggaccccacgtggagggcgatccagctgctgtgggttggactccggtcggtcgggggtagtctcctcgacctcgatcggtgcgtggaccggggtcgacgagacgacgacccagcgacacacatcccatccacgcacgcatcccgccggtggacgtcgccgccgcagcttccgccgagccgggccgtctcggggcgggcgccaccggcgtcggcgtacggggctgtttggttcttaacattgccataactcactttaggcaatgttaggcaagtgtggcttgccatacttttttggcctacaaattataagccacacttgtgacaaagttagacaaagaattgagtctataatatgtggggtaagatggtaagaaagtgtggcttgccataactatagcaatgaaccaaacacaaaactaagaaggtgtggcagcctaaaatgtgatgtggcaagttgaaacattgaaccaaacagcccctacgtgctgcgtgctgtgcgggaacgacctagcacgctcgttcaagggacaagggacacgccacagagacatccgaggtggttattcttcgagctcatcggttggcccaataagcctaataggttaaaagcaaaagctataatttgaattcttaaaattgaatttggaaatggttttaacatattttcaatgtaattttattttaacattggtttttaagtcgctatgaacgagtttataaaaaaatttcctatatattaacttttatttcttaaaaagccgttttgtcttattagggaatataggtaaccaatgaggctcttattaaggattcgttgctatgtttttttgacggttttacatcgtgttaatgtaatttttttgagaaaaatctacaccacggcatcccgtattgttaagagaacaaaagatagataataaagtggatcaccaaactcttcgtcgctttgtctttctcatgccataagatcgtttcgtcttcttcaagccacgcaaaggatgtagttcatccggttttcccccactacttcaaacaccacccttctcctcctcctcccaccttacccatcatcacgcgacgacccaatctctatcttcctcccccttcctcaactcctcaagcgtcgtcttcctccttcctccctctttatccatccctacaccacatctagaggccggcgagtttattgggagctgttggaatcacagtagtcggtgaggagggaggcgacgatgaggtcggtaaagaggaaggaaaagaagggtgcaagtccgagtacaacgaggttcgcggcacctgcgaggatgtgtcggtcttggcattgagagcaatttaggagttggcaaagcagacgaggggtgattgcaaagtgcttcatggggctttgaggttgttacgcaggcatcgcttgaagccatcgtgcttctcgctaagtcgctagctcgttgatgtagcttgcagatatgcaatgggcgcttcatcctcaactgatacacataggcttggtacaagatgctaggtaccaaggcatagggaagaggcaagcgcaaccattgtctggttctcgacgagccaccaaccgttagcaactcctctccacttctccctttgtctcctctacacgctccctaactccacccctactattgaggtaccaagcactagtactccaaacttaggtactaggtatcaaagcagagggaaggggagagcgtcgtcgccacctggtcaggcaatgagtcacctgccgttgtctcctcctatcctcttcttccttcctcttctctacgcgctccctcttcccctaccattattgtggccgatggggcaaaacacgatgagtgttgctgcttcgcttgcacacaagcaggaaagtagggggctgcactgctttgcttgttttgcgtgtagaaactctaagtacgtttggtgcgacatgtgggattagatttattaagttgtcccgtttcaactgcatcatgtgctctagcatctctcaaaatttttctatatacaaattactttaaaatattaaataaatattaaataaatatttttaaatttataataattaaaacttaattaattatgtgctaataatttacttgttttttatgacttaacctaatcttcatctttattagatgaagagcaccacctagcttctctggattctggaaagtatgcacccgtggccagggcgccgagctggtagcccagaaccagaaatgtgattccaatgcctttttttttcttaaaaaaaacgatggttttcttttggaaatcaatttgtgccataccaattgtttggctgcttcgacagtaattttcagtgattttttttatttgtattgaagtcaaacctttggcaattttatccatctaccgatccaaatctttgttggcggtcaaaatttggctatgtaacaaatgagagaggcaaaattttgttgtataacattacggttttagctatgaacactgccgaaatcaatcatttaaaataaaaataacattgtcaaaatctgtatatttgctattagaaatacccatactgttatactcactctgtcttaaaataagttaatttttacaacatcccatacataccaataaaataagaacaagtaccctcactttatcaaacctaatgcaattatttagcacttcatctactcctaatacatttatcatacttttataaactctgatgtagtgattaaaaaataaacttattttaggacaaacaaaaggggctaaaaataatctcattttaaggcggaaggaatactatggctcgatgaagaaatatacaacgagtgaaaggtcagaaatgttccctcgcccatttctttatttcatacctaacaaatgaaaccaagtttgcttttaaaattttatatggttgtctaaccgatcttccctttgtgcaagattttttaaagacgaattgtgcttaagaaaacattcatcaaacacaattcattgaaaagtaccttaatctttgattcccaactctcccgttaccggcgcggagctacagtgatcagggagggttcacaagcacccatgtccaaaaatcattttaccttataggtaccattcaccccccccccctcaactcaaccaagtgtacccccaacaggccaccatacagagcaagaaggtaaaagatgcgttcatgcttgcagcttataagtattctcgggtagtcagctgacgagttgcttcctttccaaattgttttttaggatcatcctgatttactgtaagcaaaccgaacaatgttgcttgatagggagtcgattggatgattattggttgttttttttctctaaatttagggttgagttccaatttgttatcatttgcctcttttgtgttttagacaatgagtgtggattgaggtagttctctaatttgggtatgttttttgttgtgattttagtcttacttttttttactacagttcactaatttttatattaacattggggttctctattttggtaaacacattatcgctacattttcttttacctatttttgtgtattgaatgtttactatgatgttacttaatgtaaacacgtataaggttacacttgtggtatagtagtgcacctcctatattttgctctagctccaccactgcccgttacgacaggcgttaagctgttggttaggtacaaggcaccacagcgatgcaatactgatcaagaattcaagatgagcctagtgtgctgtgtgcagagtatttgtttgcagctatattgaggtgtcaatcaatcttctaaaaagcttagccgcaaaagttatttgagtggttgtttatccaccttctagcacttttacgatctaattagcagtcaatgggtaactgaatttggaccttggtgaatcattctcgaccatcccaaactaaaaatggaatgaaatgttacaatgttggatcttatctagtactatttcactaggattaacggataagccgagaacatatcttcccacaaagttacgcaaggttagaaactgtgaactgatctggaaaagtttccagcccactgaagtttatcaaatcttagtaaatataaaaaaaaatggcaaatcaagcttggaatctgcttccttctcgaagcaaaagcattggctctgctccaacgagcccggattacgtggccggccgattgatgcagttgccactaacgcgaggaatttttcgcttcatcactaaacaattactagataataatacactactcaacatattctaattaccgctatatatatacgcgatcatggcgcgttcaaggtcgagcagcttcgatatcgacggaagccaaagccggccaccggccatggcgatggcgtgcaggacgctggagctgacgctgctgtccgcgagcgacctgaggggcgtcaacctcgtctccaagatggaggtctacgcggtggtctacctcgccggcgacccgcgcgcgcgccagcgcgtcgccacggaccgcgccggcggccgcaacccgtcgtggaaggggaaggacgccaccgtccgcctcgccgtcccggcgtcgggcgccgggagcggcgcggtccgcgtgctcctccgccggagcgcgccgggctcggcggcgaccgcgacgtcggggaggtgttcgtcccgctcccggacgtcctcgccggctccggggacgggcccaccgccgccgcggtggcgtcctacccggtccgcaaggtcggctcgagcaggaccacccacggcgtgctcaacctctcctacaagctcggcggcgtcgtccaccttgaccccgccgcggccgccgccgccgcttgcagttgcaagcccgccgcgccggcagcaggtggctcgacgatggcgtacctggcggcggcagcggcggcgtacagggtgcgccgccgccgcagccgccgctgtacggctaccgccagctgccgccgataccgcagccggtgccgcctatgggcgcggtggagggcggcggcgtgcgcgccggccggtgaagcagccacgggcaaaaatggagtcttgcagaatatgaatgctaaactatattctgtcttaaataaatatataaatatgtgaacatatatgcgaatgaatctgatcatctgaaggcgagcaaaaaaagtaaaattatgaaattgaagcttgcaaatcgcaatggtgtttagctgtttatgaaccgtggaaatgcaagctatatactcaagtcttattgaaacctacattttattttcatgttcaaattgatttttgcttggctttttttttttgaaaacttggtgaaatgaaagcctcaaacatgtggacaccttcaacattaaagcgtagcgtagacttgatattttgatggctgaaggacggtctaatacagtgagacggaaagctgcctgttaaatggaagtttgttatgacattaatatagaacatcaaatcatcgaaaatttgaaccagaaattcttttgaaagttgaaacacaacctgaaaatcttgcaaacatgaattctgaatcctacaaatttagtttgttttgcagtattcagacttctgaattctgaatcatggaagtttctcatgtcaataaaagctttaacggccgctttgaatcataggaatgaaaaaacggaggaataggaaaaacattggattatgataggaatgtagctaaaacagaggattgcaaaacacatgaaaaacatatgaatgaccgtttgattggaccacaggaaaaacacacaggaatttgaggagagataaaactcaaaagatttcttccatgaggttctacctctggttaaaattccttcaaaacttgtatgggaagagatattccataggaatttcataggattacatagggttcattcctttgattcaaagagatttgtaggaaaaattcctataggaatgaaatcctctaaaattcctatgaatttcctttgaatcaaaggggccttatttaactaaattgttttcctttttttacccaccgacttactatcaaataaagtatcttccgatcatatgagatgttccgtttgattctcttcatcttacttcacacaaatttgtatgatttggacaaaattattgcgagtgagctacaaatgatcaaatcagtgcaatatagcttgactcttcccattttattttatatggagttgtataattggaaaaaaatatctctagaagtgagctacacatatcggatcatttcagtatacattgtttccattgttcaagtgagatgtaatatggtcttctccaatatctcaactatcttattcagagaaggaactgtctgatctgtccaaatgggttcacaccctttgaagagcaaatatgtactaaaatattggaaagatatcacaacatctaacaacatctatggtattatcttcctggttgattgcgtctcctttacaaatatatatagaagtataaagcattggttgcactcatgaaatagagcaggaaaagagtcttaagtataaaacagagttgcatgctagcttcacactagcatgcggcaaagacatgtagcatgcatgtttactactacctactagccgctggctcattcatcgtgaagggtaatgacttggttctaaagtaaagaattatgcataataaattatgccatcatattggaaagatataaaacaaaactatcggtactttttcatgagaatggtgaaatattctggtcggtggtttagattttagaagatctgtctatatgcgtaggcgcctttgttatgtacagaaaatgtctccgttctgaatgctgcaaaactttgctttgctttcaatcctacattgactcaaagtttttgtctatggaatttcttaacaacaaacctgttaaaattaatctggtatttttctgctaatcccattttttaatgaagaaatcttctatgaaaactttaacatgagtaataacaatctggtataattttctattcttaaatacttattcaacataaaggcaagggctcatgaagaattcataatacatgctggattttttacatttagctctttttacaaaacatattttacaaatagattaaaaaacattaaaaaaatggacatctaactcgatcggcgccaatgtctctaacgcatatatgtatatcagcaaaattgtgtgtgtctatatgaatgtatgtacatcacttctaacccagtagccaactatctcaaatcccctaactctatcccactaaacattagggacacaacacttgttattgttaagtggctagtcttaaaatcatgcatctgcgttaatgtgacatcccggcccagggcttaatagaattaatagaatactcatatcaacaaattctaactttttttccggaagccgatctcgaaagaactctgaggttaagtatgcttgacttggagcaatttcgagataggtgaccgacctagaaattcttcccaggtgcacacgagtgaagacaaagtgttctttccttggacaaagtgtgcagaaaagacttgtgttggagcaatgggtgaccgacgggaagcaacgactgggaagcaatttctttcccgggacaaagtgtgcagaaaaaaaattctttcccaagtgcgcaattttgggatgggtgaccttccgggtgcgcaatttcgggatgggtgaccgacctggaaattcttcccgggtgcacacgtcccgagacaaagtgtgcagaaaaatttctttcccggatgcgcaattttgggatgggtgacctcctgggtgcgcaatttcaggattagggatgacaatggatcgggtcgggcacggttagagcgaaaccatgctcggcccgagacccatgtgcccacgcccgacccatgcccacaaagccaatcgggcccgacccatgcccacaaagccaatcgggcaaatccccgtacctgtgcccatgctcgtcgggcacgggcatgcccgacgggtgcccactgggcatgcctgccatccgccaccgcgccgccgcccgcgcgcagccgcgtcaccggtcgccgcccccaccgccgtgtcgccgcctgctacccgcgtgcagccccgtcgccggccaccacccacaccgccgtgtcgcgggccgccgccccacgctcgtgtgccacctaccgcgaaactgcagtcgcccacgctcgtgcgccaccagccacacgctagccgccgccgctgcgctcaagcaccgccgcgtctccactcgccagccactgtcccgccgcctaccgcgtcgccactcgccagccactgtcccgccgcctaccgcgtgccactcgccagccactgtcccgccgcctgccgcgtcgccactcaccagccaccgtcctaccgccagccgcgtcgccagccaccgcgtcgcccacccccgccacgccgccagccaccgcgtcgctagccaccgccgagtcgcgccgccagccacctttcccgtgggccgccgctggtagaagattgaaaggtggtagtggggagataaggctagggtttcattgagtaagtatatactccctccattccaaaatataagacataaccacccttgacccaaagaccaagaaacaattattatcacctctttgtttgaatcaatccaattaatacaatacatgcacccaatagaattaaatatcttgtgagtgtatgatttaaaaaataataatttaggagagaagagatgctaaataattgccatgcatgcatgcacgccttatattatgaaacacctttaaaaagttgttgtgccctatattttggaacggagagagtatattgctgtatacaaatgagccaaatgggctattgggccatgaggggaggttaaactattgaagacatgaaggatatacatgggctataaaagtctcgggtcgggcatgggttatccacgggtgaaatataaaacccgcatgtgcccactaagtctacggatattgggtcggatgtgcccacgggaaaaaaaggtgcacacgcccgcgtccatcgggccgggtatccgcggatacccgaacccacgggcaatactgccatccctattcgagatgggtgaccgaccgggaaattctttccgggtgcacacgtcccgggacaaagtgtgcagaaaaatttctttcctgggtacgcaatttcgggatgggtgaccgaccaggaaattctttccaggtgtacacgagtgaggacaaagtgtgcagaaaagacttgtgttggtttgtgagagcagtctatgacctatgaaagctgccagatgtaagtgggcccggcctaggagaggcgtgacgttacagctaatatgacactactatagatttaatttttctgaatgagacccctctaggtttcaggcgggtcagaagacttgtgttggtttgtgagggcagcctatgacctatgaaagctggcagatgtaagtgggcccggtctgggagaggcgggacgttatagctaatatggcactactatagattttatttttctgaatgagacccccctaggtttcaagcgggacataactgaccctcatgcaaaaattgctattccaggagtggttcaagggttgcatgcgaaaatatatttttgcaggaggcccactgttggtatttgatacggttacagataaaatccacaagcgcacggatataccgatgtagcacttcccctacggagtatttcttccatgaggttctacctctggttaaaattccttcaaaacttgtatggaagagacattccatagggctgtcaccacctctacacccacctcaacatactgtgggatacacagcaattactggataataattacctaaacaccacgtctaagcaattaatatctactttagtgtttataactcaccaaagcaatcactatattttagttgattatagtgaacaataatcccgtatgctgattaggaactaaccaagagataattctcacaagataaatctaaattactcaagaagaatattatattgaattcagagtaataaacaaaataaaagaaataggagaagattaccaacaactccggaattcttccgactccttctactctactctcttcctattctagtatacaatatagtacaatagagcctcttataattcagctcaagcttggaagtgtgtgtgtgaagtgagggagtgaagcctttatatagaggtaggtatgacggttggcgaagaggaaatgtccgaagtgccctccaaccgccatcagggatgcatctgggacgtccatgccaaaccccagcctggatggctgagattgtggttcggccgaaccagggccgaacctgggctgggcccatctggcctggcctttggcccaagtcctcccctggtcctcctctatccatttcttggtattttgggctgatttactgatgtttcgatgaagttcacaacccgtccttgcatggatacataattctcttcactttagtctgattttcctcccaccttcagggtttattatctgcatccaaatatacaccaacacctgtggaatatgtgagattaagtgcctatctctatgttggatgttttattatctgatctttatgcagatgttggcggtatagaatcgacatttaacagccgccaacacccacctacgataataggctattttcgtaggtgggcctcttaatagaaccgcatgacaaaatcaattttcccatatggacatttctctccttcgcctacaattcacgcaacagctagtcagctacccctccacttaactctttttcatccgtgcatttggcctctccaccttccccttttttctttccccccttctcttctcctctctctatttccttctctactttctcctcctcctctcactttccttctcctcctttctccacttcccctcctcttccttcccgcacttcccagcagagatgacagctcgggaacaggcggcaccatcacgtggagatggtggcctcaagggcgggcggtgccggtgcacggatctagcgtccttggagagacaggagtaagcctcgggtggcggcggcctcaaactggctggatctgctgccggtgcccacagaagtggtagatttgcccaatctgaggatgacgggagcagcagtggtgacctcggactgggtaaatccgtcgccgatgcccgcgggagcagactcacgcaatccgaccggggacggtgggagcactggtagcgggagcgaatggccgcgatggcaacggctacgacgacgacgatggtggtggcggcttcgatgacgatgcgtttagaagctagggttttgggagaatcggggagctagggtttcagccgaatttgttcttttgaaatttttatatttttgttgctgaaattattttcacatgcgggcgtcataggtgaaagcattcaaaaatgttgtttttgcatgtggttgcgctaaatatatagaaaaatattgattgtcacaaacatctgtgtgcaggcggaccatccagccgtttgggaaaaaaaaatttgccgactgcaaaaatcgttttttacaagtgtgaaaattttttataacgacgagagctcagtttgaaaactttggtaagtattttaatggacaaggactcaattttaaacttactgaaattaattagagtttcatctatatgatcggtaagactaacaagaaaacaaaataagcatatgatagttgtaattctaatcttcctttctacaaatgatacagattagattaatcaggttacacatgatagttataattcttatctccctccctacaaaatgatacagattaatcaggttacacatgatagttgtaattcttatcttcctttctacaaatgatattgattaatcaggttgactcaaacatataatctcatatcaatttgtacagttgttgtgataataagttttgaagttgcacatgatgatccatatacaacacaattattttgtttgagatcagatattatattttgtccaggatggtaacaagatgtaagatgtaaaatggtttcctacaatatctcagctaaatgcatagagcaggggttgttttctagatgatggataaactaactagctgtggtctgcttctgcactgaagcattgattgattctagttatcaaatgcagagcaggaacagatgttgttggctggcagtgtctccattgcgcagaagcatggattgattatatagttatgaaatgtagagcatgaatagggtctttggtatgtaaaagagacatatgaatgctatcttcataaaagtagcatgctacttaccggctggttcattcatcgtgacgggaaaattgctcaggggtgaaagagaggatgtatatgcatgaagcattgaagccgcaagagaaatggcatcgtattggaaacacagaaacaaaaatatactaccacgatttcatattaagctttgatttttttcaagccaaatttttaggtttgatgaaatttatagaaaaatataataatagttttaacataaaactaagaagctatcaaaatatattcaatgctgaatttaataaaactaatttaacgttataaattttggtatattttgcataaacttgatcaaacttttaagaagtttgacttaaacaagtcaaaagcgtgtgaaacggagtgagtagataatttctaatcatattggtgaaagatatgtccgattttttttctcgaggtaattaagtctattcttactgtattgctaactttgtttacttcctttcaatccaatacactgatacttataaaagcttgtgcctatctcatcgtattttttttaattgttgaatatatatacaccggtacttttagctgggggatctagtctgttcatcatggatgtttgaacgagaaaatatgtagtgaaaacctacacctacgttgtggaccactggatctaaaatgtgcgttccagattaggcgttacctacccagctcccactcaacacgttttatgaataaccccccgcgtcaggctttatacatttacaaatacaccatctcatttccctcctttctcacataggtacacatctttctgaatcaccagatccaaatcaaagacaaccagccgcacaggataggagcgatgatgagtgaagcctcgatgctatcctccccggcggcaacctactctggcctctggctgtcctcgccctcgtcggtagctgagaaggcgcggaaggagaggaactcttttggtaaggaggatgttgccgatgtcgccgttgcgccgaacacggatgcagatctgagggagccggatgtggtgaagcttagagggagcacgctgccgaaggtccgagggagctagcccccgacgcagtggagttggcggtcatgcgttgaggatattgactcgtagctctaggctctgaaggtgagggtttcttgatcgcctctcctagtctcagcctgcatgtagctgtttgaactgattggatctctcgtgtggatgtctcatggatattggattttgtcccaatttagtagctgatgtttaggaaaatggcaaaatgtttggacaccaaacacaccgtgactaaattttttgcaagtgctgaactcatcagtaaccaattacatattggattttgtcccaatttagttgttgatgtttaggaaaatggcaaaatgtttggacaccaagcacactgtgactaaaatttctacaagtgctcaattttggggagctgaagtgctgaactcttccttgaccaattacaggggatgctttcagaatatgataggcataaaatggatctttgttggtttcttggattagttaagtaaatgtttcactagttttttaacttaaccttgctagtatcacacaatttttcaggcttccctgtatgtttttctaaccttgctaccaaatcagtatttttacttccttggatgtcacattttcagactaccaagctgagaggagagcaacatgcaacagacagtaatcctgtgggtctagggttcagcacttcaaaactgacgaccattgtgagaatacataggaggtgctaactaagatgatgattgaaggtgacaatctagagaaggtgctgcaggaattggaggagatgaagaacttcatcaagacaatgcatagcacttatcatgctattaggatttaaaaagaaaattcatataagagttagtttgtaatcaatttgtctatatactgaaatgacaatattacaagcaaacacaatgtgtaaaatgcctctgcttcttccaccttgacttgcactgcttttgcatctcaatgacagcccgcgcacgagcagaactcgacggcaatccacgacaacgcacggcagtgagagttatcgttcttcccttccttaattcaaaaatgagcacaagaacaaggttttggtgaattttaagtggacaatggacactgcagagcagactgaagtgaatataatctaccttatgcacatgacaacaggaaatcgtgcctagggtggaaaatggcatctccctcaccacatacacagaccacatatatggatgagggtgaacagatatataccttcatgaaaaaaaattgacatctgaacattcagggaacttaattctaaagaaactcaacatgaatatattgttatagagacgaaaaactttcatgaccatagtgtgcaaatgcagcacaccggtttgtgggaacacaggtgcagaaaattactagttcaagtagaaaaatacagcacacagaaaatttatccagttcaagtatatttaggattttcctagaaaatcataggtccagaaagtggctacaaacaactggcacactacaagataattgagctatcaccaccaatttattacaacgaaaaataattcgtggcaatatattgtactatcgcaatgatattttttttgtggcaaataactataatttgttgcaacgatttacaatcattgttttattcagtatttttgttgcaataggaaatgagctattgccacaacaaacagtactattgcaaaaacatgttctatcgccacacatttaatttttgtggcaatttgcatagtacatggtacttttcactattttctattgccatgattaacaaattcgttgcaataaaaatttatcatctcataatttaacttattcttttcatatggacacggattaggacaaattttatatgaaatttatagctctcgatgagatctacaacttaaatttttcatttgaaatattttaaatactcaaattcatgatttaaatcttagttaggcagtctcaaatggaattgtatgcatttttaaacaaaattgatgcgtagatgagttggtcatggagagcgcgcgtgatggagagatcttagattcgaatcctggccatgacaagatatcagaagaaaatagttaggatgataaattaatattgaaacatttaatttggtacgtagaactaatgccacacatggagtgatagcaatagttatttattgcaacgatgtgaagtgtcgcaatatatattttttgccacatccattttatggcaatatcaaattttattacaactaaataaaaatcgttgcaataacctattaccatgctatttattaccacggctagcaacgattttaagattgtggcaacatgtatctatttccataattttagcattgatactacgattttttttcgtggcgataaattatttttcgtggcgataaattatttttctagtagtggcagagtcaacctagtccatcaatgtataacgacatggtctgatattcagatgtcttttgctgacacaatttagatcccacagagttttggcaggtaataacattcataagttacaacacttgtgcacaaatatcagttatccccttcaaggtgttgtctaataaaaaatgcaaccttgctattaaatggctaaaatctattaatagatcacacacgtgtgcactggatgatggcagtggctctactttgaacaaaaaactactctaggcaaaagaattctcgccagctgctctcagcaaaaaaaactgcacccagcaaactgcatagtgaaaaaaattgttaagaaggacacatatacttgtgagcatagataaaaaattgttaaggacacatatacttgtgagcatagatacatacaaagttttattcacactacggaccaaactaagataacaaaatgttcctggaacacaatggttgttctaatattttttccctgtcttcccatatgtactcttaaccatttcaagctgaatattagctgtccaaaatgtccttgtcgcaatatacatttgtatatgagccaaacatgtttgtagaatacaacaattgtgttacttaaatattttccatatgtaattcttaaccattccaaactgaaaatgcaatccaaaatgattgtgcttcctacacatcccactgtatattacatgcccacttgcccacctagaatccttcccatatttttttatactttgttccaagttgataacactaggtcccaaatcatacaggcaaaaacttaaagaactataaataagaacccatgcaaaaatgcaagggaccacatcagttaacaggacaattgtacatttgcgatttatactaataattagactcatgacgacaatactaaaaatgttattacctcacaatggtcccaactaattatatttcaacatgtgttcactacctgctgttagttaaatattatatggccacctattatcttttacatgaattgctactttgttccaaggaaatctacagcatgtcaattagaaccagaatgttcttgccacactatagactttacgatacaccgttagttgaattttggatgacaacacacaatcttttacagagaaatgctaacttcttccaggaaattgtatgacaactattataagatgactgatagttaaggaagcatgatgtatagaaccttgcatcactgttgtggttctttgttaggacagttgtgcgaatcgtgcagcatgacttgtttgcacttcttgcaccttcgtggtactctctcttttttctttctcttcttgttttgctttttctccttgtcattgtgccctttaattctctttatccgacccctggaacgagtgtcatttggcgggtggatttcaatttgacttggaatgctacatccaagatatgattcaaattcctcaatttggctaagctctttttcaggaaccatctcatttaatttatcaccaagcacaactagttcatccctcaaaagttgcatagctgctgctgattgcttagcttgtaggatgagcttctccatttggttgcatgcttctgaaagcattttttgcatcacaggatcattactgttgcttgtgtttccttccaacaagataccatatgcatcgaacacatgtgtcttctggcagtccttcctaaacctttccaataaatagtatctcggcagttcacttagctgggcacttcttaggactggaattagatgacgacatggtataccatgagtttcaaacagcataaatgtgcacgttgcaaccattgtctgtctatcataacgcacaactcttggcttcctggattcttcaatgatatcgatgattttgacctcgccatcttgttgcacattgtcaataaggcaacggtccctggcagctagcacctctttctaaattatgctaaatacctcatgtgtgaagtaggggtgggcgtttggtcagaccgaaaaattcggtcccggtcttcggtttttcggtcagttcggtcttcgcaaactcaggaccgaatttcatccaaaaaaactcaggaccggcaaattcggtctcggttttttcggtctcggtctgaccgaaatttttgaggagagtttggaacgaaaaaatttggaacgcgcggtggagggcggcggccgcggcgcggtggaggacggcggcggcggtcgcacggtggagggcggaggcgggccgcggcgcaggggagggcggaggcggcggcagcgcggtggagggcaaaaccggcggcggcggcgcggtggaggctggaggaggcggcggtgcggtgggggctggaggaggaggcggcggcgtggtggggctgaagaagaaggctgcactggtagtagggttagtatcacttctagggtttgttttagtgggcttattgggcttcctaggtctattgggccaaaatttcggtcatttcggttaattcggttaaccgaacccaataaccgaaataaattcggtcttttgagggctgggaccgaatagataaccgaatttctcggtctcggtcttttcggtctcggtctcggtcttttcggttcggttcttcggttcggtctaaatatgcccacccctagtgtgaagaactcacttgcatgcttctctatcacccattctgtcttcaaattgcggattgtgtggagcgtaatgttatcttcttctagttccttatgtctttgttcttctagtgcagcatcaagcctgagccaaaactccaccaaagcaagcttccacccaattagacgagaaaagaatgaatcggcactctctgaccttgaggtggtccttaacaatcctaacaaaggtatgtcactaaaataagctggcacccatgaacgccgttgatcgaactttgtactgaaccattcgttgtcttccaacccatattcataaataatacaactccattcatcctcgaattcgagtggtgtttcagaagaccacacacaagagcttagtcgggctttgaatttttcatcctctttcagaattggtccaaccttctcacaaaccttcatcaaaatgtgccacatgcatagtctatgaatagtagtggtcagaacttctcttattgcagctttcatgcttgcagcttcatcagtgataattagcttaggtgcaacacctcccattgctttcaaaaaagtgtggaacaaccacatataggactccattgtctcgtcagataacattgtagcaccaaaaagtacactgctcttgtggtggttcactcctgtgaaaggggtaaaaaccatgccatactcattggtgctgtatgtagagtcgaaagagacgagatctccaaagtgagcataatttttcctgcaaatagcatctgcccaaaatacatgaattaacctccccttggcgtgccacaacataattaaaataaaaacctgggtttgcaagactctttctactcaactgatcaacaaacattatagcatttgaggactttattaaaactcttaaagcactatggtaattctgcaagttcctttttgtaaatccaacattctcaaacccttctacccaacacgaagggatcggtatgcttgtgatgtaccgatgctaactttatggcacgtgagcaatgtgtttctaccactcaagtaagctttctgttggaacgtatgagatgcctcttgtcaggagaaacgaatgcatgtgtatgaccttgctcaaatcccgtgataacatacttatcgccatcgactagtttaataaccagcttcgcctcacaaccacacctagtgattcttttctcataactccttttctcactaccagattctagtcctctctcacctttgtcctcccagaatccttcgttcgcacaaaggaacagtttgtacagaaccactccatcaactttcttgtgttgtccaatgcgaactgagaagccaactctaagcgcatagctttcataaaactccttggctgattctaaaccattaaaagtcataccgatgtttggcaccatagaatcatcacagtctggaataaaatacgaaccctacacagtgcacattaacaatgatgaaagagcagcatatcatgaatgcttaaactaacttgaaaaaatgggtgtgcaataatacttacacagaatggagtgcttgaggacttttgaggcgtggtgtattgatctcgtcgattcggaatacctgcagtaaccgattctgcatcggaatgcacatcattaaagtccaatctccctgccatgtcacttcgttctctaagaataacctggatgatcaaaataccatatgtaaaacttaatttttataaacagagcacacccagtagaaataaacagacagtaaaatagaagagaaattcaagaagtgagatctatatgtgagacataggtaaaatgaaagaaaactaagaaagtgaacatgtcagattatttcaggcttgcttaatggtaaaacatgtctttccctaggcaagaatgtcagagcaaatgggagactcgaagcaaacaacacatcaacccaaaccagtgggccgataatattttcttggaagaaagtaacggtttccggtaaaaagattataggtaaccatagaaaattcaactaacagtgggtagggaacacatgctgaaatacaattccctgtgactataattttggaggcatagttgctaccattgtgtgccaagagcattttggttctaacaaaatgcttgacaggctcaaactttcacatatgtgcttgcaacatgacatttgcatatttgtctttgcagcttgcaggggtaacacttttgatgaaagtagccgaggggaatacatttcccatagaagttttttttttaacagtggagacacagtgttaaagggtgcattttgtttaggaacaccatagggaaatgatggttctcctatttcagaggtattcattggatgcattgtcgtactcgttcccagattttatggattaaattagtcaaattatagtcaattacactatcagctgctgtggtgcatgaatgaatgaatggttggatggatggacagactactgttgagtcttgagcagtgttcagctctgcaaaaggatatgtaacagtcttgatgtttatggaaagtagaattataatctgttgatcagattgtctattcacagcaaagttctgaatggatgtgatgctaattcctggtttcgatcaagcatcttgattttattcagaagcaactactccaatctgtagttgtgtggcatgttaatgaaatgaaacatgacaacagttgtagaaaaatcttttatagtcacgagttgtaggaaaaataatcagtcatctagattgacggtttcccacaatagaactgcatatacatttcataaaaaatcagggaggtcggcatttgagttacatgtacaattttaggcaataagctcatgatgtagatttcccaggtcacacattcatctgagtatctacagaacatgagaaaatctgagttccggctaactacagaaagaaagaaacaagcatatggtcagagatacaaaatccacactaacatgagtattaatgttctaaagcaatatgcaagataatggagaacataaagcacgacggcaggccgtcgtcagcaacatcaattctacgcacggtcctcccatcgatgaataatacaacagtaacagctgcagacgccgccggttgctccacatcagtgggtagctcatcacaaccttacagaacagcagtaatggaggaacaccattactaccttttgttggccaatcgatgaggggctaggcccaagtggagggaaggacaagaagaacaagaagaagaggaagctgtagctgtctctacaagaacaccgacggcatagtaactctatttcatctgcagttgtcagtgttggtggcatcaaaaccctagttcatctcagcccctaaattgttcaaaccaagaacattccgctcattccgcggaagaacatacacgaactatagcagggatcaagaagagagaatgaccttaattcagtggatgctggatgagcaatcggcgaatcgaggccgccgttcgcagatgcctcgacgtcaccggagcagcatgggggttgattcatgttgccgcgaatcacgtggaaaggtggcgctgttgccgaccaccgccggcgccccaccccaccccaccgccgtgccgccgccacaccacccttcccccaaccccaccgtcgtgccgcagcagagagttgagtttggggatggatcccttctgaatccgagatgtgttgtggtacaatttgggggctgagattctaaagtttggaattaggcggggtgttttctgaacatttcattctgtggtgacgtggacatatctggaacctacgttttgcatccaagtgtggtttctatgtttgcactatagatagtgtttccactacatatcttctatgtttgaacggttttgcatgtttgaaactgcaggtcaatcccaaatccatttgattttcgctctcgtcggtcttcccacccatccatccatacctccgccgcctgctccggcgaatcctccgccgcctgacgcctccaccgctcatctcatccgccgccacccgcctctcatctcgctgctgctccacggcatcccccgctgctgctctccggctcggtggcgcagccgtcctctcccgatcgagccggcgccattctcctctcgttccgtggcttctcgagctcaccaccacaagcggttggatcgtcgcagaagatcgagcgggggagatgcgagacggcccggcgccgccgagccgatgtccacccgctccaccaccagctccgtcctcaacttcctacgccacgtctccttcccgccggacccgcgcctcctcccctccgcgctcaagtcatgctcggcgctgcgcctcgcccgcgccctgcacgcggccgccgccgtcgcgggcgtctcgcgggacgccttcgtcgcgtcctcgctcctccacgcctacctccgcttcggcgccacggccgacgcccgcagcgtgctcgacggaatgccgcacaggaccgtcgtgggctggagcgcgctcattgccgctcacgcctctcacggggacgccgagggagcgtgggggctcctcgagcggatgcggagcgatggcgtcgagccgaatgtgatcacctggaacgggcttgtctccgggctgaaccggagcgggcgcgcacgggacgcggtcctggcgcttgtgaggatgcacggggaagggttcttgcctgacgcgaccggagtctcgtgtgcgctatctgcggttggggatgttggagatgtcgctgtcggtgagcagctccatgggtatgtggtgaaggccgggtgcaggttggatgcttgtgtggccactgcgctcatcgacatgtatggcaagtgcggacgagctgatgagatagtccgggtgtttgatgagtcaagccatatggatgttgcctcttgcaatgccctcgtcgctgggctgtcacggaatgctcaagtctctgaggctttaaggttgttcagggagtttgtcggcagagggattgagttgaatgttgtttcctggacctcgattgtagcttgttgtgtgcagaatggaagggatctggaagccgttgatcttttcagggagatgcagtcagaaggaatcgagccaaattcagttacaataccgtgcgtgctgccagcttttgcaaatattgcagctctgatgcatggtcgttctgcacactgtttttctcttaggaagggctttcatcatgacatttatgtggggagtgctttggtggacatgtacgccaagtgtggcagggtcagggatgcaaggatgatctttgaagcaatgccatataggaatgtggtttcatggaatgcaatgattggtggctatgctatgcatggagaggctgagaatgctgtgcggttgttccgatccatgcaaagttccaaagagaagcctgacctagtcaccttcacttgtgtccttggtgcctgcagccaagctggctggacagaggaggggcgtagttactttaatgaaatgcagcacaagcatggaatttctccgaggatggagcattacgcatgtatggttactctgcttggtcgggctggtaagcttgatgatgcgtatgatatcataaatcagatgccgtttgagccagacggttgtatttgggggtcattgctgggctcttgcagggttcatggaaatgtggtccttgctgaggttgcagcagaaaatctatttcaactagagccagaaaatgctggtaattatgtcctgctttccaacatttatgcatccaagaaaatgtgggatggggtcaataggctgagggatatgatgaagactgtagggttgaagaaagaaaaaggctgtagttggatagagatcaagaacaaggtacacatgttgttggctggtgatagttcacaccccatgatggctgcaataactgagaagctaaaacaccttactatggagatgaggaggctaggctttgcaccaagtacagattatgtcctacatgatgtggaagagcaagaaaaggatgatatcctttctgtgcacagtgagaagttggctgtagcattgggccttataagcacaagtcatggaacaccccttcaggtgataaagaatcttcggatttgtggtgactgccatgaagcaatgaagttcatatcatctttcgagaggagggagatatatgttagagacaccaaccgatttcatcacttcaaggatggaaaatgttcatgcgcagactattggtgatttttcttgtcttgttcgactctacattttacagaacttggcaaggatggtgtagaaaagcatctacgtctctgtaccctaggttaatatttcctcatgaggtaattacttaccagcaatatctgcattacttagtgatttattttataataataataataataataataataataataataataataataataataataataataataataataatattaatattaatattattattattattattattattattgagcaagggctgaaagcccattttcattaccagaaatgggatagtctttacattacacacgacctttacaccattacatgataacagacagcacagctatcacagttttctggcactatgagggttccatcccacccctttcctgccataacctgaaactaagacacaggactactgtgtcaccttaaagcataaccgggacttagtatcaggaatggcatgacttgcccatcaccaaaacacaaacatccaggaccgaaggtaatgacataacacaccc

SEQ ID NO: 25782 - DNA, 6004 bp, Oryza sativa
  unsure (1)..(6004): unsure at all n locations
gttatttggtttgtgcaattttcataagaaacatgatatatttatatagtagactttcccatcttacctgcatatgtttgatggacagaataatttcttaagcaattcagtgaaagtaatattattttatatgaaaagtattcatggttgtgatctgcagacttgttgatttaagtgaccgtatactgtaaactgggatatggtaaataaagaaggatttacaggtgaagaaaagctaaagccttaaaggtactttcctgtcaatctgcataataattatgctactttcantttgtgattcatgtctaataactatcctgagacatcactctaatcagaatctctgtttaatactagaaagctagactattgaagagcctgatatacgttgacacaataataatattttactacagatgctcgatggtttcagatattttcataaccccttttcattgacgaagttacttgcatcttcttgttctctcgtctctgggagaggcagagagctagctctgtgtttttgtttggttctatgccctaccaaaagttggcagagcaaaaaccttgggattggtaaattttggtaggatagagatgaagatgtctagtgctaaaattgtacttatttgagatagatacatgaacttgccataatttttgctgagtagagctttcatggagttttttgttttgttatgtaacaacttttttgcattttactaaaattttgctaggtaaacaaaccaaactagataaacatcacgctgaacatgaactattgaactgggtctgtatatatctctgcctccccagctgtcagagcccctaaggcctggccgagtcagccatatgggaaagaatcaaagaaaggactaatacaagaggaatcatgtatctttgtctgccgatagatgtggcacaaagaagccgtccaatacattttatttgcagtaaggtaaaattgaggatatcttaaaaaagggatagaacgaggagaatatcaaagtacagtaaaaacgagcatcgtctgaacttgtttagtcttggcctcttctcgtcgtagctgctttaaaatttatactctatatataaatgggcatgccaatatgaagctggaataatccttcatccttcgaaaagctcgttcaccatgtcttccatgtcctgttgattactgccacatttctcctgctctggatgggcctccaggtatgttctgtatccagtaggaccagtaataaccttgtcaatgatagcttttcgcaggctcctcctgagctcagggttcggaaccttccatagcttctgatgtctgcatgttctctgaaattccgatttgaatcttgctagctgcgagggtttagaaaaccagagcgttgtcatcttaatgtgcaggcaagatagcactgtatcccaggagacattgagatagcaatttcggtagtcgcaatattttatccctattttcgagtcagatggaaggctgtaaccggtgattgcaatatactgatcttgtatgaagtaggaattgttaagcaagaacaagtacctcaggatagggtctgagaacgactctgatttcttctccagatgatctattaagttgctgatcatttgctcaatgatgtcgcattttaggatgcgatgaggccaacattggcctagtatggagttgagctcgtcaatgtgtccccaaaatagtcttgcatagtccataattaagtgagtagccttgtggatttctgcactctgcgggaaagtttcccaggaatgcatgccactcaagacaggagtaacagcttcagcatcgtttgccatcctttgtatggcctgacccaaattatcttttgcagtcgagaaaatattgctggtcttgttgagcaggccttgcagcatttcgtccgaatctggtagccagagggtctccttcttcaaggagagcatgatgatttcagacgcgtgggagatgcagctgcgcacgttcatgaggcccgagagcttgttcattggattccaggttttatcggccacggcgactagggaattggcaaaggcaagcatcttgcagacggtcgcctcaacgaaccgcaccagtcgaaggtcgtcgtcccggtcgacttgggcggtcgaacggccctcttcctggagatggcgctgcgtggcgctgagcgcttcggccatcacggtgaatcctcgtgtccacctctgcacggcaagatcgtacagcttatccaaggccagctcgctcttctccttctccagcgccgaccggagtacccagccgacgtcgagctcggagaaccacctctccagagcaggtctgggcgcccggccgaactccccgatcagcttgcccatgaagccgtcgcggaccatccgccgcgcaatgtcgcgagggcttttgtcttcaagtcttgccaacctccgggaagatgagatggagtaaggggcgtagcgatgacgagagctgcttgacttactgctgctgtagtaactactggatctcgccgaccgagacgacgacgacggcgaccacccgccggccgagtcgacggccaagctccggatctcctgcaggtagctgtgtctccgtgactgcagggaaatgttaggatcgctgctacgacccaactccatcgtgatcgccagctgtggctctagcttcatgctcgctcactcgagctcggccatgtttggataatgggtttgggatatgatttcccaccccttaaggcctcgttcggcacgtggggagggctttccctagggggaaacaccaccagtccaggattgggtggatcccctcccaccacccaatccacttccacgttgggtgttaaacccccatcctattcggatggggaaaaaaggggaaaagcagggaaagcagggaaaatgcatatctttgaataaaaactgagaaaaaacgagcatagatagcacatctcaacttaggaatagaatcaaattacaaaaccacacaaaataatctgaaatttcaaaaaaaaaagaaaagctgataactaatttctacaatggcatgtacagaagaaaaccaaaattaagaaaatagttcattaaataaagaaaatgaaaatactgccaagcttttaaaacgatagtaacactgctattcaatgtagcagttgacattcgcatgtggtaagtcaatctgtgccctccaaacaatattacaagcatatataatagttgccaatgtactccacgcatttaaattctagtgattagcaagtgacattaacacctagaacactgagtacaaccacaaactaggttcccaggttccaaaatctgatttatccacaaatttaagaaatgaagatggtaactgcatgcactgtaccatttgatcttcacctaataatattagctccatgacctgagaggagaaaatgatgagcattgtgaccccaagaaaagattaaaatcaatgccaaaaaacacacacaaaaaaaaaaagacagacagacacggcagccaaagaacagctgttgcagcatccagaaacaagcctctgataagtttttacaggtgatcacaacaacagaaagcttccaatatagaatagcatacagaaaatgacagcacattaggaggagaacaatgttggcccatagataagtttattttacaaagatatgacatagcaggactatggtagcttaatgccgacagtaaagcataaaaaaaaagtacagagaagttggactgatgacagcaatgtcgagctcaacaggactacaggagaaatgaaaaaaaggctgatcactatcatcatgctattcatctaccctataattcaccaacccactcttacacctacattactcattcatcaaatccaacggccagaatcatccaatccaacggatcacattataccacgcaccccctcaacctccgtatggaccccatcccccacttctctgtcaatcacgccaccccctcgccctcaaggattctctgcgcaccgtgcctccatctgcggatctgcctctgcgcacccatccgcccctgaccgcgcatcggccccgcgccccctccactgctccgccgaccaccgtcaggtcgcgacgccgccgatgactctctcgtgccgccaaggatcacgccgccaccgtgactcctcgccatcgatgcgcgacgtgacgcgtttccatctcttcgttcgtcgtcgacgtcttcgccggcctcctcaagaatcccgcaccgccgctgtcgaccgagatgaggaaggccaagccattatcgaaatagttgcgcgcgtaggcacaccagcagaaaaaggcaccggccactccaagctcgtccggcactacgactcggaggcctcctggaacaatgtatcactattcactagcacccctccttcctcactgctttgctgttcttgttgctaatggtctgcctctagattcctgcctgatgcttgcttgtttgggctttgcaaaggattaatggctggacgtcgtgcattggatccggcaggagtgcaattacatcccaaataagatgctacttgttagcacaataattaaattcttcatgatgttactttaagatcgatgtagccacctgtagcaaatgttgagtgcatgatcaaaaaattgaagtttactgttatttacttgtgaattgggatttgcttgcatcagtctacaaaatcttccctattgcttagttcgaaactaggcggtgtggattttggttaattttgacatatgcaggatcttagctcgatgatacgtgcgcatctgctgtttaagatgcacttggctctgttcagggatgattaactgtgcattctttagttactgattagtaagctttacagtataataacttagcggctgaaatcgtaaatgttagtactgcatttcctttacttggatgtaaggattcatgcaatcatgtggtctcacttgtgttgaggttttagcaaatataattcagattgccctgattggcagagctgagcatatgcgtgagttttgaatctgtcagtagttgaatactgctttgatatgtctgtagcaccccaaatatgttatgcagaattattggtacttatttgtgtttattgcaccgtcattcatttctgtagctattgcctcatgatgaagcaatatttggatatgtcatcgaagccagggagaccaagagcagtagtcatctgctccacaaggtagctgactgatcaggtcaggttatccttactaccaaaaaaacatgagtttatgatcggatttttttaaatgatactgctgaatgtgatttcgtgcaatgggatgaggcgtatatatgcctgtctaattgtattgctttgaatagaattggtttttagataaacctaatatgtttatttttagacaacaacatggattcatgctggattttagtatgaaaacctttggtctatgctggagtttagactaaaaaactctcctctctcaatattcaaataatgtgttacaaaagatcccatggtggtggtagagactaaccaccacttaatactgttttttatttttgtttatttagatacaacatggacaaagttcataaaattacattagtaatcatcatcaaattcatgcttttcattcaggctgaagagatgggtaggtttttcggaaacacaattatatccaggtattattcagtttcttgttgcttcttatatcatgtaaagagcttatttatctacctcggatgttcattccaagagacagcataaattactccggagatcccaaaacttgagctgtggtgtcttaagttagcaactaacatatctgtaatatttatgtttctcaaagatgtgcccttatcagtaaattgtgaaagaggggtggagatgccttcaagtgattttttttttgttgttttctgacatagaaatgcaataaagaagattggattattttaggcaatgattggcaaggataagtaattttactgatattagatttcagctgca

SEQ ID NO: 25783 - DNA, 8091 bp, Oryza sativa
  unsure (1)..(8091): unsure at all n locations
ttggtatattcaagcctagcatgctcattttggatgtggtactttcatagaagtgcacttagtgctggagacttcgatagaatgtcacactttcacctcagaaataccgaaaatttgttggtattgtttcatactccctccgttttttaatagatgacgctgtttatttttttctcacatgtttgaccatttgtcttattcaaaaattttatgcaaatgtataagatataaatcacacttaaagtactatgagtgataaaacaactcataacaaaataaattataattacgtaaattttttgaataagacgaatggtcaaacatgtgagaaaaagtcaacggcatcatctattaaaaaaccgtcatctattaaaaaacagaggtagcatttagaataaaattaagataaggtttgtgcttttttttattatttttcctgttctttttctctttttttggattatctgattgaattttgtatctatttttgaatttgtgttttatccatcttacgtgatgagttactcgtgtgtatggaaacggaggccatcgttcgattggactcacggacgaaaaattgatgtgaagaactgaaagttacaaatttttgaggtagttataagatatgttggttcaattacagtgttgataggttaattagtcacggttcattagtagagtcattagtgttttcttgattggccttttcttttttgagtccgaacggggtgtgtttgcaaaccctttttcccaacccatcttgctcgtttttcacgcacacgcctttcaaactactaaatggtatattttctgtaaaaagtttctatacgaaagttgcttaaaaaaatcaaattattctattttttttaaaaaatagcaaatacttaattaattacgtactaatggaccgctccgtttttcatgtttactgtgcacgtggggaaactggagtagtgaacacaagtcatcatagtccggtttattttagttgtgttgtcagtagagaggcacggacgaaaatttagttgagtatgtaatcatctgcaacatttttaataggtaaagataatagtagagattaaaaccgaaatataaaattaaagccgattcaaacacggatgacataccaaaatttagaaacatattcaatttttataatagtagagaagagatatatatataatttttataatagtagataagagagatatatataagtagagatttgttacatatatgttgcttgcaaaaatagaacgtgcacgtatattattaaatgtcaccgtagtgttagtacgagcatgctactagcggtgcaggagaatttcttaagtgtattgcaaatgctaaatattaggatagttatttacctactttattttttagttgtttatgcccgcaacaaattaatggaataaatctatactttttaacatattttttaaatgtatatttccctttatattgtatactgaagtgattatatataattaattattatcaagatttattgtgtccatgcaatatcatatttttgtactttgtgttaaatatatttaatgtacgatatgaattgaattgaaactcaattgcacatatcatataaaaatattttttgctaacatgaaattttaagtttttgaagatcaaataaaattgctccgtagcgtttagcacgggcatattactagtgttgtaagaatcatacaagcaagcttaacttcatggacaatggagccactttacaaacaagtacatggaaagaaagatctttatgtgagttctttggtggacatgtacgctaagtgtggcagggtcagggatgcaaggatgatctttgaagcaatgccatctaggaatgtggtttcatggaatgcaatgattggtggctatgctatgcatggagaggctgagaatgctgtgcggaagttccgaagagaagcctgacctagtcaccttcacttgtgtccttggtgcctgcagccaagctggctggacagaggaggggcgtagttactttaatgaaatgcagcacaagcatggaatttctccgaggatggagcactactcatgtatggttactctgcttggtcgggctggtaagcttgatgatgcgtatgatatcataaatcagatgccgtttgagccagacggttgtatttgggggtcattgctgggcccttgcagggttcatggaaatgtggtccttgctgaggttgcagcagaaaatctatttcaactatagccagaaaatgctagtaattatgtcctgctttccaacatttatgcatacaagaaaatgtgggatggggtcaataggctgagggatatgatgaagactgtagggttgaagaaagaaaaaggctgtagttggatagagatcaagaacaaggtacacatgttgttggctggcgatagttcaaaccccatgatggctgcaataactgagaagcaatgaagtgaggatggtgaaggatggtgaagtgaggatgctgagatgcaagggatatttgattcaggtgataaagaatctccggatttgtggtgactgccatgaagcaatgaagttcatatcatctttcgaggggagggagatatatattagagatacgaaccgatttcatcacttcaaggatggaaaatgttcatgcaaagactactggtgatttttcttgtcttgtacgactttacattttgcagaatgacattgcaagggtggttaaaaaaaaatcatccatgtgtccctaccctaggctagtatttgctcatgaggtaattattcacctgcaatatcaggctttgtttggaaaactagccaagagttattttgagagctatttttttagcataaggaaatagcccttcaataaaataactctaatcatttggatccaagggttattttgagagctatttggcctttaatgtaccttcacatggagagagatagagagaagacactttttcagtgggtcccacccgaaatagccccaattaacaccccttggatgggatagtttttctgggtgggttatttccaaatagccctcaaaaagctcacccttttggatttttttggggctatttgggctatttgagggtggactaaaaaatatcccttggatccaaacaggacattagtgaggatggtgaagaccaaaatccttctttccccaccctataggttgggttttctcatgaggtaattgtttacctgcgatgtcagcactttagatgggaatagaaacaacggaaagccactactagtactcccacagtttatgttgaccaacaaagaaaacacttcaaggataaacaaagctcattctcagggaatcttatctatgccaatcccacaagtggaagggaaaattcccaattatccaatatgcagatgatattctcatcattctgaaagcttgtcaaaaagagctttttgtctcaaaggtattacccaaccatttgcttactctactactccctccgtttcataatgtaagtcattctagtatttcccacatttatattgatggtaatgaatctagacaagcatttcccacattatgtctagattcattaacatcaatatgaatgtgggaaatgctagaatgacttacattgtaaacggagggagtatttgagaatttccataaatcttgtacgatgccaattcatgtcaatgaagaaaaactagaaatccttactggtacttttcgatgtaatattgtttcgatgcccttcacttatttgggtcttccggttggaacaacaaagccaagaattgttgaattccccccctcccccctaattgatagagttgaaagaagacttatggcaatcaccatgtttcttaatcatggccaaagacttacccttgttacccttgtcaattttgtcctctcttcgccgccaaccttttatatgtgcacactcaaactcccaaagaaagtgatagaacatattgatgctccattgctccgctggccgccacctgcctatcaacaattgatgctccattgctccaccaccatccatccttcatcggtgtgtgggcactgttgcaccggcgccccccaccggttagcctgcgtgtgccaccatgcggccatccgctctccgcactggtctcccatagtcgatgggcctcttcgatggctgcgcctcctcacaccgagccggcctccatcactgccggccgtgcctcctcgcgccacgttgacctccgcgcctcctttcgctgcatcggcctccgccgtccacaggtccaggaacaaaacccgcgtctaacgatcacgtcgcctcaactccaccaccgctgattttaggagctccactaccgccgccggccgtgccggcctccgacaccgccgaccgcgcctcctcgcgtcgtgttgccactgctccacagcgtcgctgccagcccgctgccctagctgcgcccagccggatctagcctagggcagcccgtgggtgatggcggtgctggatctgctgcctcctcgctgggagggctcgccaccgccactccccatcgccaagtgtccgccgcctcccccgcgcctgatatggagcgccgccacgaagtaggccctaccgccgccatcctagcttgccaatcggctttccggcaatgagctccagtggcggtgaggtgggggaggggggaggggagggggcggcgacgctatggtttcacccccgtgtctcctgcgtgttggcgacgctacgggagctgatttacttagacaattttagttatgagtgacattatctgttctgaaaaatactcatggtcgtaatctgcacacttgttgatttcagaagtgatcaaatccatgtaaacggaggaagtaattttataggatatggtaaatacatatgagaagttacaggtgaagaaacgttagagacttaaaaggtaataaattttaaattgttttgaacgaacatgcattgttaaattttggtaggatagagataaagatgtttagtttagtgttaaatatatgaggttgcgtaaaaattttcaggacaactaggaagatagcccgcgcattcacgcgggcatgtgtcgtacactatgtttgaacatctacaatatattatttctccataaattgttttcattagcattgcttttataattttctaacctagctattagttatctttataacatatcatatttaattaatccctacaagaaattatttataatattcttcatcatctaaaaagtaggtagacatattttgtgttagaaaacatgtatagcaaattaagtgtaaaatcaaaagtaagatgctttttaattgaatataggttgtcattgtttattgacagatgaattgggtgggatatgaggctccactaaatgcatgggtttatatagcctaatattattgtttaatttgagagataatccatatgtgaacgttccatgtagagtgtgtgggagactccatgcaacctagcgcgaataatattggatgaagaaatatagttgtgcaatatattattttggaagatgatgcattatgatacacgcttgtcttttaagatgagatagatctaatggttggaaataatgggtttatcggtttaaaaggcccaggaggatttatggggtaacaggtggtgactttatataaaaaagaaaccatcatctatgatatataaaataaaattataagtgtagcttaaaattatggtctttttaatatttgtttcaatctttagtttagaagctgaaaatagggaggagacaggagagaaacgaatagcgtagaactcgaatcagatatgagaaagggtttgtagtgcaatagtgttatgtgcatatgattggagagggagctggagggtacattttttttaaaaacaaaatctttgtaaacaatctaagtgagaacctatgaattgttgttttttcattctaaagatctttaagacatgacatgtggtggcttaagtttttttataaagagaggcaatctaatagttaaaaataatgggtcatcaaattaagtggaaagagatgattattttctctttgaatttcaattttttttcaaagttttacaatatcataagtggtgacttaagagtgctatagagcacgtttaatcgatctttactgtgtaaaacgattcaagaatatatatatcatgtttttcaatgtcttgttgttatttggtaaggagattttgtttttattgaggtagatttaatacgttcatctgtttgaattatttatgtctttaaatccaattgttaaaattataactccactgttttaaatgaaaattgatgaaattataagtccgccaatttaattgaaaattgatggttagatttgttttcttcataatattttttataattaaaattgttatttataaaataggaagatgagaaagaattattggagataaagaaaatgtatgtatgtatacttacgtgcgtggggggtggtgggaagggtgggccagtggggagaggagagttgtgccggtgggagaggggtgagggatgtggattgtggtttttttaagaaaaaaaagataaatctaatagttgaaaatagatggttcactaatttattataataccacgtggcggtttagtagtgtttataggcgtaccacgtggtagtatatatgtgtttgtataaagtttaatggattattagtatataatttttttgatttttaaatggtaattaggatgacatgccctaaaaattattcttttcagtagaagtttacacggttgaatcattaaattttttaaagacaccatggatctaaatttagatgtgttcgcaaatttgttgattatttagggtgcttgttgtttagccaataaaagataaatctagtagagtttagcaggatgaaaacacgtgcatgcacaccctcatttgtagtagacctaatgctaattgcattgataatcctagcaagaataggttagcctatttggataaccaaattaaagcaagcagcacgcacgttgaaaacctattcaatattttgatttctctgcatcattgtggtttattatataacttagtaacaattatgatcacttatgtttttatatggggttgctagctataaaataggaaattcacctacataccacagaaggaggagtacgtatatagagagaggagatttcttttactgaaaatgaaaccgatacttgagatatatctaacggttagaaataataggtccaccgatttataagttataacggatggtcagatttttttcttttttctcataatttttaagattttttctaatttcttagagtgtcacgtgacggcttaggagagtatgtaggatgtcacatggcgacttgtgcattcataggaagtttaatggacttgtgctagaatacaactcggaataacatatatttttacaactgttggctgaatttattaatttggtttttatcccatgagagtgaaaaaaaagaaaaaagaaaagaagggaagggagcatacgtacgaactatgtacgggatggatcgacaaagaacgtgccgctttctaaatataaatctatttggtatcttttatgttagatctaacggttaaaaaatttgggtccaccggattaaatgaaaattaatggttagatattttatttttcttggaatttctttaatttggtagagcgccacttggcggtctaggagtatttatagatgtgccatgtggtggtttattagtgtttatagggattttaaatggctttttagtatataataatcgatagatngatagatagatagatagatagtttgatggagtgtttgctttgctaccttatcaaaagtttggtgttaccaagttttattaggttattagcaaaccaaacagataaaaatgtcacgctgccgctgcacttgaactagttctgtgtctatctctgttctcccagttgtcggagcccctgaggccggcgagtcagctatacggtaaataatcaaaaagaggaggaactaatacaggaggaagaatatacattgttatctgtcaacaggggaaagtatctcgtgcaatcacttaattcg

SEQ ID NO: 25784 - DNA, 10123 bp, Oryza sativa
ctgtgtccaaattgcactatactaatgcacctttttggggtccaaattacactatactgaatttaacttgtttttcaaaaaataaattatatatgttgtgtggggaacaaaaatcatttttaaatttttgcgatttgaaatgtaagatgcagtacataggcgctacaaatcatatttgcatttttattctgaaattacgtatggtacagcttccatttgactaattgcaatccagccactttaatctggtgcatacgaatttgctgttactttgcccataccatgatgagctacaaaaatttggttatttgccaggtggtttgacctggggtggtagatgcagggtctgtccattaagttgctgaagtcgttagcgcggggcgctccggggcgccggttgttgaagctattgagttcagcgatgttgacatcctcctcacctttgcgcttcatgcctttgttcttggaggattcggggttgtcgcatttgggtggaggcagtagccacccaagttggcgtccaagtgggtgtgtcacgaccaactccgagttggcgtccttgttggcctagtcaagatgaacgcttgtgggtcctccacctgctaaagttttgcgggcccactacttgataaaatccccgttcttgtagccttgatacaaggatgccatgacgtgagagtccttgacatgtgttatggtgttgcgcttctccgtgaaacgtctgatgtagtcggagaaacgttcattatcaccctgaataatttgatatatagaggtcccaggggtgccacgagtgggaacgtgccttggaagttggcgatgaactggacctttaactcggctcatgagtcgatagcattcttgaggaggctagttagccaggcccaagttgccgaagtaaacatcgatggcaaataattcgccatagcgcactggtcacctccggcagcttggatggcggtggagtagactgacaaccaagaagtggggtcagattttctgtcatatttgtcaatcccatctgctttaagttggcaggccactgcacccaacggagggtgttggtgaaggcggggaccccctctgcttggtcagggtgatggaagtggtactctatagattgaatctgtattggtgtgtgcacaacacgacgtgtgaatagcacgtgctccctccggtttcattttaattgacgttttggacaatgacacggtctacaaaatacgtttttgaccttatttttctattataatatatatatatataataaataagtgcatgtttacttttattacagtgctttgaaagacaaaattatatatgttgttctagttcctttaaactaaatatttttaaaattattggtggtcaaagttataaaagtttgacctcaatcttattttaaaacgtcaattaatatgaaaccggagggagtagtgcgtataaaggaatcaatcaattacccgtcttagagtttccggctccctttatatagacctagaggcaaccggctaaggtcggtaaattatcccttataatctaggtatttatcacctatttatatgtgataagatttatagccctattttcctataaacatttttaatccctctcaccatgttacatcatgtcgcattggctttaggcctatacggcccatcctgtgtaatacggtccaaaggcctagtctcgggtacccgggtacccacactagcatttgtgctttccaaaatgcaggttgtaattacaggttacggccttgaatagacacactattaaccttcattcatatatgcaccgtacaggagatagcgctccaacaaaatgaattatgaagttgtcaagtggtaagctttcataacccaaatgtaactggcgttaagttcactgaattatggtaggcttcgataaacataaaaaaataaaaaataaacgagctctgggtacagtgttgggataacagcagtagtgatctaaaatacaactgtatcgagcatggttcctagcgtctgaactatgtttgatgacatcaaattggagacatgctcttccaagtgcttcttagcatcttgccgtcccacatttgctatcgctaatttctcaggcggcagctcatcctcctcttgcaccgccttgttgtacttgatagcaaggttcagcatttcctgcaaaagataacacataaatattataaatgataaaaactacagagatgaagtttcaacattgactaaaatgatcgttcaaaatagaaatacacacctgaacagtctgctcattggtctttgaatgagtgtcaaacctcttcagaatcaatccatcggtccatttctttttgtgcaagttcagtaacatcttttcctcaagctcatttttccggtaattgattgcaattgaatagtagtgcctgttcagcccatgaataagagcctgacaaaaaagagataccctgatcattcataagtaataggaaaaagaaaacatatgtagaagctccaacattattacccacttacctgaatagatggcttatttaggtgcccaacatttgatgttgtctgtcgtggctcctgaccaagcatcatggtctgagggttaataaggcgaaatgcatcaatgacaactttccccttgacactttggatgggatctatcacgacggcaactgccctggggtttaaagcttcaaaactctgcatgttcaattttgaagatgttagacgtaaatataacttgcactaagcccctttttataaaaacgttaacttgggaaagtagcacttgacactttgtgaaaaaacaacaaacatatgcgaaatttttgcaatagaagttaaggtcagctagatgatcatggtagctgactgcagggaattaccagctaccaatgctgatatcaaattgacccttctctagtttattagatatacatatagagttagcttctaggtttcaggtgacagccttatataaagggtggtgaataatcattaagtagaaggaataagaacaatgaaatggccttctcccaaaggtattatcatcttcatctatgatctcatcttttctcctacatccccccccccccccaaacattttatcacagctctattcaggatggtagtaagtaatagcctcaatgattaagatttatcacatatattgtcacgcattattctgggatctgttttccaaacctattccctgcatcaggtgtacaaataagctataacccaaaatatgcatcagggtgatatagttgaattcaacccagaagctccagtcaggaaaagccattgccaaaagcagccagtaacagcctgacatggttaactgaacaaaggctggagcgttcgtttgaatgacagaaaggagaggaagtcctcgttttccgcgcgcacgcttcctgatctactaaatgttgtgttttttgcaacattttctataagaaagttgctttcaaaaaatcatattaatccattttctagtttgaaataatgaacactcaattaatcatgcactaatggctcacctcgttttgagtatcttctccttctcttttcctctcctctaaaacacagccttaatggttagctaatctgcctaacactaggtgtcacgtgcaaggacgtttggagacaaaggggatatatttgattataatggtcgggaagtaacaggaaatggccctgaaaccaaatggcgcgacggagtcgaatcgacgccgtgccaacgagacaggactatgggccctaaaataatcttgatctaatgcctaacctgacctgggctatagggtccctacttatatagatgaactctctaacctaatcccatcctaacagactttatccaactggactactctatcctaacagactttatccaactacaataagaaggccagtcagccagtgaacctattaggcccatgacaccgtgacactagcatggaatatggtaaaagccagggaacacacaaacatatggcaatactaatagaaatcaagaatatggtaccccattcatttgaaaaattagttactatgtccatatttcattaaaaagaataaaaaatgtaatgacaaatacaggaatcatctcttgttaaaccaagttacaggattcctttcatactgaagaaaaaatgtctgaaatatgcaccaaacctgttgagtattgatgtcaactcctgaaagccagcaaccaaatccaggatgggaatggtaccaacctaccaccatttctggcctgtaaaagcaacgaaattatcaagcttaatttgcttgcccacagaaaagctgagtaaaaataattctagataaccaagcaaaaggtgtcgaccaacagagcaacaaaatatctaaagttatggccaacaccaatatccaaataacttaacagaagttgaaatagaagaaccaaagagataacaagatacaggatatgctgtatgagaagacaggtgttctttctttccaatatgattactttcagttatgatctaaatgcacttgaacacagagcttttcatgtgtgaagaagtgctcttaacagcaagtaaaatttatcattttttctctccccgagaaagcgcaatcttttttaacagcacaagtaagacaattctcacggacatcgtgttatcggcgctacgttatatgcggctaggaatctatgactattattacaaaaagaatcaaatctagaccttgattcttcttcttttttatacatgatatatgatacagaaaagagtaaaggcgcaattaactgaccaccactaaaacataagggcaagtcttagatcttccaaattcaggcatatagcaacaaacgatgaaagaacactgccaatcaatcaggcaaaggcaaaagcattattacctcccggtctgcttgagcatgtcgagcatgttggtctggaagacatggtcgacggcctcgacgctgaccccggtcccgctctgcggcatggcgaagacgtcgaccaccctgaccgtgtagtcgtcgacgaactcccccagcatcagccccatcacctccatcggcacgccggccctccctgcggcgcgcaggcgggtgagcaaaagagccgcagaaaccctagccaagcaggagagggggggacgcaccgtgcttgagcatcttgaggagggcgagggaggagatgtagacctgctcggaggagtcgagcagcggcgagtccgacggcggctgccccatgccggaggcgccgaagatccgctgcagccgctccatggcttctccccaccgccgccgccgccgccgccgccgattcttcgcttcgcttcgcttcggtagtttcgtagggttcacaggatcttttttcttcttttccttcttttcttttggatggaggaggagggggagttacgctgaaataaccaaagcatgtaaattttaaatggagtaaatttcacgaaactactgacactttagctaaattatcataaaactacatatttaaatatgatgtatcacaagactatagagttgacgccaaatttatcacagaaccacaaatttaaggttaaatatcacaaaactacaaatttagtaataaaattatcacaaaactatacaatcggaatgagattctctgacgcagtgaattctacgtaagagggacgtccggtcttggatcgccattctttgtgcatccgacgggcaacaactcttccacgtcctcagtcgtaggcccataattaagctcgattccagcacatttgcatcagtgattcacggcgctcaacagtcgggatctccggccgccctcaccgccatccgccgctatcgatctctcgctggtaaagcgcgtacgcagtcgatgatcctcagacaaccacatcatgctcatcgacgaggtcagccagcattgaggacaaatcgaagggaaaaaccactccttttctcttcaattcgcatacagagaatcctttcattggtcaacatcgtctgcactcacttggtctcttgttttaacagaagggggaaaaagtatctgttggcaagctctttttttttctttaggctactcggggagattttctaccagcaagattttcaatcacatattcacatactgaaggcctcagcaagattttcatccacatcccaaagatcccggcagtggtatcgcgtcccccatgtgagagtcgaggaccatcgagtgtgaacgcgcttcaccagtgagagatagcggcgacgatgaaggctagagatcccggcgccgcgattgcttgccgtgaatgggctataccaagcaagcttatgggcctacagtgaaggatggacaaagaacggcgatccagggcaagacgtccctctcaccctctagcgtagaattcactatgccaggggatctcgttcctatacaatcatacgtactttgtaggcgcacatattttacaaccctagttttactagtattatttatgcgagttgtacatataaccttcgttaatccagcaggaacgaaatatcataatgaacattgacagtgtttaagaggaggggataataaaagaagatatgtaaaatgaggtgagccaagtatgttccatgacagttcataaaaagtttaccgtgtattacacgttaatacatgttttcctttaatttctaaacatgcaagagtatatagacctgcaatatgtggtggagacgggagcgttcaacgacatcacctatcctataattacccactaaataatcacatgattagctaaatagttgtgttcctagatgaaatgtggttcactcgcactaactatcttacccatatattaatcttgtcagaaaaactactgtacgggatcccatcccatcgacgcacgacgggatagaccgctccatatggatcaatcaatccagacttcagccaggccactcattgctctagtcttatcctctttattcactttcccctttttctctttccactacttagtagtttccaccatccatggattcgtacaacacgatacaagagactgtaggctatagctcaggcaagacaacagtgaggctggctgaactccactggcgttgcaagcagtgagaccttcctcgcgtgcgcaagtagcccggatgccatgccgttggttggggcaatatcaagttgagcctttgccggtgaactttgctcatgtggttcggcaacaataaccgtgtcgacgccattggtggctagtgcctggtggcctctagtgtggttggccaagtgctccacaggccaacgctgcctctaggtggttgcttgcacaattgcacgtggaatgaagggtggcaggagagtattcattctaggagacacatagagaaagatcaacatgctaacaggagatcaacaatagcatgtatgagcaattggttgttgattttttttcactcggaatttattctcaaaattggattttggattttcttaggttggctttcctttggatgcagcgctattcggttacgatactctttgtggtatcatcgtgatattccagtggcatcgatatgatatttttggtggtatcaacatggtaccctaacggtatcggtacccatgtggtatcatgatacctcggtggtaccatagcatggtacctccggtattggcatggtacccggatggtatcggcatggtacccgggtggtatcatgataccttggtatcatagcatggtaccttggtggtatcatgatacctcagtggtaccatagcatggtacctccgatggtatcatgtcatatggttcaagggtatggcatggtatcgggggtggtgttatcgtgtagtctagctaggcggccttttttttctctaaacaagctagctggtgcatgtgtgcctcgtggaagatggtgcttgtgggcctcaaatcggtgagaacgcatcgagagttcgagaaaaggaggcgctaccacgctacgcgctagagtatttgtctgttagattcattaactaccccgtaacccttacgggattccgtgctccagctgccctctaactttatttattattttagaaacttcattaattactaaattaccaaagacattttgatagatcaatttcaaacatacattgtcttttctggaatttctgctaggttgccaaactacaaaagcataattaccgctttacatatatgagagatatgtagtatatatgttgttgtgctttctatcaattatcttctttattatagtcacatccaaatcttgattccatggtagtgaattgtagtatcaatccatatgtgtagccatggacccatatcctctgatgtatagtagcaaggttagaagatctacaatgactccaactcctacacacttcttccctcaaatatctaatccctttgcactgtagaagtaggacgacacaaaagtaaggctgtgttcaggagtgagggttggtaacccttactcaccggcacgcaaaacgaagtagcgtttagcgcgtgattaattaagttttagctatttttttaaaaaaatggattaatatgatttttaagcaactttcgtataggaactttttgtaaaaaagtactgtttagcagtttgaaaaacatgcgcgtggaaagcgaggaggaggagttgggagcatgtcctaccgaacacagcctaaggagcaccaacacccatggccatgtttcttctacctatttcctagtgtgattgtagccactgcagcaacatgagcattctcgctcatctaaccgagctggatagaactcgagccccactctccaatgagcttgacatgctctcataagtggtgtgtaatagcagtttgaggtggcgtcgtggtgcggctcacgttagcaagagaatcaaggctcatccagcaccatgaagcaggattgcatgctccaccggtgcccatagaaatcaatagcaggtggttgttgtttttctaccaccgctgcttagtgatgtcaagattaaagtgggccaaattcatcgaaggacataaagaaacttgctttcaaacatgcagacaaaaataggaaggaaatgtgggataaaaaaaaaagagacgtttaatgtgtttgaatggtagatatggacatacaatatttctctaacttttgctattgcatgccagaggatccgagtccgtatagccaccatgtgacagcaaatttgcatgtggtttatgtgtacataagacttagttatatgtgcactacacatattacgttttatgtgtcgggagaagggggggttgaggggttttgaatttctagctcagtatagaaaatgtagcaatttaaaattgttcggatatatgtgaagttgcttccatctaataccatatcgtcatggagtggtcaatcaaagttcagccttttgccactgacaataattttcttgtatgatttttcatcttcccatttatttttctatacttctttaaaacggagcagtgttggtgatgagtggtgaattaagatgtggtatatatacataaaataaggataatactgtaattatctttaattaaaatccccgttacaagcattatatgctgctagtagtgtaacagctcaagatgcatatcccggtccctgtcgccacgagcacggcacgatacgaacgtccgtctctgccgcacgtgacggtggagcgcctgagcccctgatgcgccccatactgccgtcgccgtcgccccacgtttccttctccagtttcccacacacactcacccctggccctgggcactggcaccaagcatgtttgtttcgtgcaacacctgcacacccacgacacgtcgcgccgctcatgcccttttcccacccgcacccccgaacaaacacagcaatcccatctcactcccccccgcccgatctcatccgtccacaaccgaatccaacggcaggaagcacatccacgtggaagatcactgcaatatcctgtttctgcaggggggtaaacggaagatgaaccgaatagtctacttgggtgtattgcgactcatttttttttatatttattttttccataattacttcctctcgtctctgtctcgtcctgtctttctccgaggaggagaaacaccggagggagggtgggcgacgaggaggaggaaaaataa

SEQ ID NO: 25785 - DNA, 18186 bp, Oryza sativa
cgaacgttaacgtgaaatgcaatatatatatatatatatgtatatatatatatatgtatatatatatatatgtatatatatatatatgtatatgttacttcgcatttgactatatacatctttttgtatcttgcagaaaagacgtgttgtcggagtcgtccgtcaagcctgagtggaagagctagccctagaaggaattggagcaggcaagtgacgtaataatataaatgattgttatatttgtaatgcaattaattaagattattagaccttgtaattagacttatcatataagattgtgtagtgttctaatattatttgagttttaatataagattactttatttgtaattagacttagtatgtaattattgactacggaagtggtgcgacaagtagcaattgactattgtagtcttaattagacttagcatatacgcacgaaacacttagcatacatgactattttagtcttagcatgtaatattatttgaatatatatataagattactttatttgtaattagacttagtatataattattgactacggaagtggtgcgacaagtagcaattgactattgtagtcttaattacacttagcatatacgcacgaaacacttagcatacatgactattttagtcttagcatgtaatattatttgagttttaatataagattactttatttgagattagacttagtatataattatttactacggaaatggtgcgacaagtagcaattgactattggtgtcttaattagacttagcatatatgcacgaaacacttagcatacatgactattttagtcttagcatgtaatattatttgagttttaatataagattactttatttgtaattagacttagtatataattatttactagctagggttgtataatatacgtcacctagacttagcttatatcacgatttgtaattagactagcacgtaagtttgtgtagggttctaatgtacgacatttacacttagcatacatgacttagattgttaaaacataaatgtctcgtgacttagcagatgtttcttgtatcaacagatggctgaccgcgatgaggaacagatattgtacgatacaatcgcggagggaagcagtcagtactggaatgaagaagaggggaacgaggatccaaaccagtacttgaacgaggaagggaacgtggagagggatgcggaggggaaccagcaggggcacgtggaaagggatgtggaggggaaccaggaggaggaggctagtggtagtcaacccccgtggacagaagagggcacgcgggcaacgaggtgcagcgaagaagctcgagggtcggcacatcataacggaagtggaagaagatggacgtcctagtgccccggccgaagccgccaagaactatgtacgtcacagcggttgggttgtgcgggataacgtgcctgtcagtacggtgtactggcgaagaacaagggcacgaggagatcatgagagctttgtcccagattcggagaaagagatgctgtggaccacaatgctcgagacattcacccttcctgcgggtacagaggacaaagtgaagaggtggactctgaagaaaatggcagaacagtttcagagcttcaagggagatctgtacaagaagtatatactgaaggggcagacaccgaacttcgacacattcccaaagctaagggatcactgggacgagttcgttgcatataagacaggtgaacaagggcaggcgatgatggaaagaaacaaagaaaatgccgccaagaagaagtaccatcaccacttggggtcaggaggctatagcgtcgcgatgccgaagtgggaggagatggaggctagcttgattgagaggggtatcgaaccggcaacagccaattggccggaacgatcgaagttctggtactatgctcacggtggaacgctcaacccagctgatggctcactggtattcggcgttcagatacgagaggctgcgcaacgactaacagatgcagtggaagcctcctctcagggcacgttccgacccgacagagatagggacgagctgacactcgccctgcagactccagagcatccaggacgaacacgagggaaaggggtgattccttggaagattggtttcaaggaggacatccacacgtataggagtcggatgaggagcaagagagataccgaggcgaagattgcagacctagagttccgggtatcgagctacgaactcaacatgcaagaggaggtggcaaggaaggttgatgaacgcatggccgcacatcggtcccatgatccccagccgaccattcctcctgcaatggtgagcccgtcaggaaaccgtagcagctgcgcctcaacggggcaggtaggatcgcagagcatggacgccatgcaaacacaggacgaatcgacctgtcccgttgatgacatcactcagcggacaccatgtgagctgcatattcctttcaagaacttatcaataaaggtaagatttagccattccgctagttcctgcttatatatgttgattactaataaataatctctcacaacatgaaggtggcgtcgggcatggccatcccaacggacccttcaggtacttaccactgcaggccgattccagcaggatactcgaaggtcgaagttgagttggtcgaaggtgcgtacgaggacctcgagctggattaccctggaggagacggtgagacgcatctacgagacacaagccatgccattattctatggcgcaggcggtacatcatcctccctgggcgacaagcggcgtctcgtgcaccatctcctccggctccgccatctcctcctcatgattctgcaccgtctcctcctcatgctccgccagcaccgtctccacctcaggctccagcatcgactcctcctcaggatcctgcaccgactcctcctcgtgctcctacacctactcccccgcaagctcctcttccggcaccttcaaagtcaagggcccccccagctgcaccgcctgcccacacaagggcaacgaagaaggcgaaagttgacgccgccaagaacaaggacccggggtacgattgcacgcaagaggagcttgacgcttacgttgcatcagaagtcaagagacaattcaagcctcgaagtccagaaaagaagattcctatagaccccagtgtcaggaacttcttcaggggtatgtctgcatctgtcaaggaggccatcaagctatcggactatgagcgaacgctgaagaaagcatcttctggaaagtccaaaccagtccctcagcttggagagcaaccaaaacaggagatcgagccgttggttaccggtaaagaaatgacgatagaacaatttattactgacaccggtctaactacggatcaattgctaggagtcgcaccaatcgaaaaggcggaagtgaaatacatgtacgaactcggtaaaccgcttgtcaagcctgagctgctgcagtccctacccacacaaatgtacaagttccatcagctgtacatggagatgagcgccgccggtagagagatgatcggagcgaggatcagggacacggacttcttgcaaggagatgacattctctggatcaatttcaagggaatctacgaactataccagctggacgccctcgacgtctctattatgagttgctggattttgtaagtatatcgttcggttagatttcttactatacgtctcctttaataaattaggtccttgtatataagtagactatagaaaataatatactcccttttatcgttgtagaatggagattcaaagggcccgacggcggagggttttcgatactggattcatcgaccctcggagagtaaacgtcgcaatgctcgaccaatatccacaagaaacagaggacaatctcgtccatctcctgaaggcgcagcattacaagacgttcatactgttgccatacaacacagagttagtttaattttactgtcttcctacataccaaatttcattcccgtacgaactttctaagtgtttcatatgtaatgcatcccacgcacattgcagattccactgggtgcttttactcttcgacctggaggcctgcaccgtcaacgtatatgactcaatggataaaaaagagtctacgtttgacaaggttttcgaacttatagacaggtaccgtcataagttcctttgttaattaagaaaatcttgttatgttaattgctactacgaatcatatctttaaactccatgtagggcttggtatcggttccgtcatttggtccgcggcaaatggagagaaagacttaggcggaagttcaaatttcctgtgagtacacatgctctatatttatatttctccgattcaaatacatacaagtgtatattaattagatctctcgttgtttgtcatttatttgtagtgcgcaaagcaaaagcagggaaataacttgtgcggctattacgtgtgcgagtattgccactgccttgcaaaccaaatcatcaccacaagagagctcgatgtacgtacaaataaattcaaaatttcattacgtagcgatttcttgtttaattactaatcaatttcatacattcatatagtttattcgcatgagggataacctgaccacacacaaggaatttatcacggcggttcaagaacaactcatgggattcatcaacgaagaaatccttaatcccaagggtgaattctactacgacggaaacacaattcaccggtccttagcttctgagctagcagcgagtactactacgtcgaaatgatagctagctagctaggacatataatagattgtaattaatacatgactacatatgtttctatatgcatgtgtacacattttctataatgtaaatatattttggtcatatatatatatctatatacatatgcattaatttgcataacatatatatgtgtataaatacatatatattatgcatgtatatacatataatataatataatatatatatatatatatatacatatatatatatgtatgcatatatatgtattgaaacatatatatgcatggtttatatatatatatatatataaactatatatatatataaaccatgcagcaacagggccatgcaaaaaaaaaatggtcagctcgatctttagtcccggttggtaacaccaaccgggactaaagatcgatctttactcccggttatttcacccgggactaaagatagcgatctttagtcccggattggtactcccggtttggaaaccgggactaaaggggggttacgaaccgggactacaaagggtttctccaccagtgatctatctatcgtttagtgatgatttgtctgactcggccagaactcaagcgagctggattagtttttactacttaatttgatctgtttcagttggtcccatgccgaaaccaccacaatcttgttcagtatgatggagtgaacgtgtattcctgtgcggggcgtcgcatcgcatgcaaacggaaccgatcccgcgtgaggctgcaacctagcgctagcgtcggacaaaaaatatacggaagagaaataggagaaactcaaaacccaggtaaacacagatgacgtaacaaaattctgacaaaaacatcttgaatttttataataggtaaagataagtagatatttatctataaacttagttaaatctgaagtaatttgactttgaccaaaattaaaacaatctataatcttttttttcaaggaaaaacgatctataatctaatacggagggagtagcagagaagagatgcagtatatcggtagagagcatcaggtcggaattttttttctctttttaaaggagcgcggccggattggtgttacggtgttttgtggcagcgcgcgcgaaccacgcggttacggcgagttcgaatctaattcgactattcagtagtcgagttcgaatctaattcacagcgcaaaacgagccttcttcttataaaatagacaggcagcacagcaacacaggccagcaatacaccagatcgatcggtcaagcacaagcgctagccctgcaggctgcagtttaacacgcgaaggtatggcaccaatatcctctctaaccccttgtagttattccatataatgtagttaactcgtgactttgtgagtcttttctatggtttctggaaacatatttatctctatccttctactacctccgtttcataattttaatgcatttttttctaattaaacttagggagtagctatatttatgtcgtcatatttttcaccaaaaaatagtcggcatatatttacattgtaagttcctataaattacatatgtaattttagcgtatttataatgtaagtctcaaaattacatatgtaagtccgaaaattatatatgtaattttagtgtatttacaatgtaagtctcaaaattgcatatgtaagtcccaaaattacatatgtaattattatgtaattatagtataattagtatgtaatcatctatcatcacgatatatgtgtggaaataatcttctctcacggaagcacatgcagtgggaggcctgtgcggctgtgtgaccaataggcatgtaatccgactgtaatcaagggaaatttatggcgacataaatgtagcaaatccgttaaacttatttagatttaactaagtttataaaaagttttactccctccgtttcataatgtaagttattctagcattttccatattcatattgatgttaatgaatctaaatagatatatatgtctagattcattaacattaatatgaagggacaattacattgtgaaacggagggagtagtaatatctactatattaaattagttttattaaatttagcattcaatatattttgatatacatttgttttgtgttaaaaatattgctatatttttctaaagatttaatcaaacttaaaaactggttgagtagagtaaaagttaaagctaattataatatgaaacggaggagtacctttcaaaaaaaaaaaacgtggtcagtggtaggtgattattgttaatattctcttggccactgacgatgtactccacgtaggtcttttttttttcttttgccttttctgttttagtcagctgtacgttattttgttctaaaaatctggcgaacgtcttatcatttttaggtaaattaaaaaatattgtgagggaaatggagagcgttttttatgacaagctagggaaaaagaaacagatcccatctgagcacttatttaccttttaaaatacaatttaattttcttgtcaatatgagcagtcttataacctttcaattttctacaccattatagcagaggaactgaggaagaaatgctagctcacagtatggagattagtaaggaaggccaagaatatttagctcttttggatcctaatattgtgcctgtgctactatttgttgattacaacgttgatgatagtgagtataacactgatggtgaagattattccatcgatgatgagggtgaggagttagatcacgcaagcaacaattcacttgatgaggatatcaatgaagatgctgaagatgaggaagatggtaaacttggggaggtagatgataggtgtgaagaagataatgagggaagtgaagaggatgtagggacagatgaagttacggataatgatgatcaggaggaagatgacactgtgttcttctacagtataaccaaaagacaattgatgtccgaaagagtggaggaattcaatacacacttctactggaccacaccacagggctggttgcttatggtgcatcctgaatcacataaagttttcttatggagtcccttcatagatcagaggatcaaccttccatttgatgaagacggtttctttacaaataatacagtccagtgcttgttatcgcataaaccgactgattcaaactgtgttgtgctagtggtgaattgtagaaacactatattttggtactgctatcctcaaggacatacatggttcaagcatgagtatcaatcaagtattattagcactcgtgaaagccattaggacgtcattaaaacgatgaagctactcacagcaattaatgggagattctacacatatttatgtaatgataaggcaattgtggcacttgagttcttgccaaagccaacatttagaactacgccggttgaggatgcaccaaatccaagttattggtccatttatactagttacttcttagaatcttgtggagacttgtttatgttgtcatacaaacatccagtgttatgtgctcaaaaggtttcgcagattgaagttcacaagctcgatttatctagaagaatttgggtgaaagttagcacaattggtaacatggcattttttgttgacagtactgattctggagtatcagcatcactcaatgcagaagatgttggattaaagagaaattgtatttattatgtgagacctaaagataagggattatatatttatgacatagaaagaggaactactagcgtacacaatccaggggtagatctagccgattacctgacacctgacattatgatgactccattatcttgaatcattcgcgctatatatgttttattttcttttgtataatattctatttttgtaatggtatattttggagtgaaatatatattggcacgttggaagagaatacaatcttttatttaatgctacagtacaactttgccaggtccaaacgttttagttatatttagcggattaatgccggtaaattattcttgccatgtttttcaaatatgagttatcaaaaacttatgctacaccggtattacttagacattcattctaatttatttgttagatttagatttatttttatctttacttattataaaaattgaagatgagcatgtaatcatccttattttcgtctgtaggctgactttggagctgggatgccccgtgaacgggtcacacgattgcgcgtgcctgtcgtcttactcgcgaacacgtcgcgcgcgatgggcaacgtcaaaacgacgttggactaattgtccgttcttgtgattggccttttcagcgtgcgtggatccgttgcaaactccgaaactcgtgtgttctatcgtgtgtggtcgccagccttcatcagtcctcatggacacctaatcgcatcaggattcattcccgtgttcgatcacatatcaatatatcatgacaagattacatctacgcaaagtttaaaagtttttctcattccattgcaccgcggagccatcgacccaaccaaagttgcacaaaaatatattcctcttttttaagttatgatgatgaatatactagcaaagtcccggtgaaaaatatattgcagcattactaggagagaaactgaaattatgataaacattaattagtatattatcatggttcaatttttgtgatccaaaccattaagaaaacataaacttcaccctaaattgtaactttacttttacctgttgcaacgcgcgggccctttagccctctttttaatattattagtcattttgattttttttcctaatcaaacttctttaagtttgatcaagtttttatataaaatttagcaacatctatcacagcaaattagtttaattaaaaataatatttaatatattttaataatatattttttaaaaaatgtttctatatttttctataaatttagtcaaactttatagagaaagaaaaatcagtcaaactttaaagagaaagaacaatcaagatgacttataatatgaaacgaagggagtatataatttatttcatacttttatagcaggctggtttttgtacgaattaagaattgaattggcatttaggtatgtaggttctaattaatttataggccataattaaattatgggaattgttatgcttctacctgctaaatgttttggggaaaatccaaataacccctacaagtcaatggtcttttcaatctccccctacaacttaatgtagtgcaaagcactccccataggtctattttctcttccaacttcccacctatgtctagttttcggtgattcttcgtcacactaagtgatttctagatctctagtgtggtgagcaaagatgtcccatgtgccttctcaatgaatgcaactgccaacagaaccttgaccgcaaccatggcatagacgtcctcgacgatggtgcacctgtcgtcgtccaatgaactggaaatttcatccgcagttctaccgccggtttccatcatggcatcaactgttgagattataggcatataatgatttaatctattctataaataaatcatgatattacagatgaaaactagcatgaacgcatcattagatctatacttgtaaactacacagtataacatgaacagatcaaatatgcgcaacatattgaacacgtaccgaggtgacggaaagaccggctgcttggtcgaaacttttcgcaggcgtctacgaaggcacgaaacacgcgagcgaagaggaaggcgagccgtcgcgaacgaacagggagcagtcgcgcgaagcgcttcccaaaaaccttattgccgccttctcccggtgcaggacgtcgaaggcagaggttccggagacctgctctcccgatcgttggtgcacgcaggcgagcgggatggagtagtctacgagcgacggcgcagtacagagtaggaggcaaaccctagattgatttcgcgtgtgttgcgtgaagacggcgggtcggtttatatagagaagggccgcttgatcagggcatccgcacgatctctactgcgcgtaaccgaaccggataagtcgcgcgtaacttatccgaactccacgccgtttgcacgcaccggatttttcggaacgtttccaaaacaaaaacgaatccgaatttgcagcaaaacaaaactgcaaaaggaggctacatctgcgcaagggtgaggagtcaattttttggaccattcgacgtgtacgtcgtgcacgcgcgccgtcggcccggccaggcgagcgagcgcacgcgtgtgtttccccttttctctacaccacacatgcttcaagtggttaggagggcatcctcccttttaaggaagtccccctctcttagaataagcaaggtggtactaaactccacatgcatgccatcccatgaggtgggcttttgtgattttccaaagaattaatcttcgagtgggctaaggcccattcattaattccaacatcaacaacaagcactcatgtgtggcctactccagaagtacaagcagtaccacaggattcggtgatggccatgttggctgtttcaactaccccaccatcgtgtgatccttcaactatactagcatctccgaagaaggtaatgctcatggtgttattaatgtattggttgtgcaacatattcacaagagaatttctttagtgttagatccaactttaattgttagtgtaagaccaatgttcagagaaaatttgttcaaatctcaggtgggtattcaaaacatttttttttaaatgaaaagcggcaaaagacttgccgaatatattagaagaaagaaagagaacccacatagttcagtttacatattacagactgggccactaggggtgagacgactaaaaactgatggacagtacttgataggattacaatttctcagaaacgtgggagaggcaactgaaaaacaaactcacagccccttaatgggattggttagctagatcaagctgggcaagccacttgattctcagtttgggagatttgaaggaaaatcctacggttatgctctagccatacaatccaccaggttacctggaggtctcccaatatcttcctcttggctattggagaaatgttgcaaagcatctcccaccaatccatcaaggtgggcgctgaaggatgctgagaaaccatatcatggccctgccactgacaaacttggttccaaatggctcgtgtcttcaaagtcacctctacaaagactgcatatccaatcacagggccaatgtctcttcaacaatttttttcacagggtaatcaaaacagaggatccccacatatccctaaagttggaatgacttttgaatcagaggatcaggcatatgaattttataactactatgctggtaagatcgggtttagtatccgaaagagtcactcaagattgagacgagatggcacaatatatcaaaagcatattgtttgcagtaattaaggagaaagaggtgctcattcatcacatgatactgtaaagaaaatgccaccacaaggacatcgtgcgatgctcgtgttcaattcaatatttgtcggaagggcaactggagggtgcaaaaggtcgtacttgaacataatcattaattatcttgcaaatccagataagagacacatgttgaggtcaaaacgtcgtttggtatatgccgataaaatttttattagtcagatgcgagaataagctgaaatgtacaattttttcaagcagtggtatggaggtactcagaatgtaccttttttatgaatggattgcaataatcatttgggtcatgagcgcaagaaatatttggaagtgaatgatgcacaaacagttagaagacccttcctttttttttatgccatacaattagatgaagaggatggttggaaagatatttttttctggacagacggtcagttcatcatggattatacttgctttggtgacattgtatcatttgacactacattacaaacgaataagtttgaaatgatttttgcagggaatttaactatttcccactattgcctttgccacttatccaattgcccctcttagatttgcctctctcttcttctttttttttttttttgcccttctaagataatggcttcttaactaattgccactttttcttacgtggcttgcaatcctaaaaaacagagtgggacccacaaatcagcctcttcccttcacttcatcttcctcctcatcctccagctcgctgatagggaggagcccgctcctagtccggcatccctccatgcctccctctgagcctggcaccgacgagctcccgtgcacacgcctccctccgcgagctccctacctccctccaagcctggcgctggcgagctccctccatgccctgcgtcccgcaagctccggcggccctctcctcgacagcaggcggccttcctctcggcggcgatgcgggtgcttggtgacaacaggcagtcctccctccatgcccggcgtcccgcgaactccgacggccctctcttcggcggcgggggatctcgaggagcccatccgccgccgccccgtggtcccgccatcattgagaggagggccgccgtcaaccgccgaggatcaatgaaggggaggacggcggggctggccggagcagcgtcagcagccggcggggcttgccgggctgaagggagagaggaaggggagagtttgtgagactgataagtgggtcccacattgatatttacattggtttgccacattggcacaccacgtgggcaaaagtggcaaatagttaagagcaattagcattgtattttcaagcacaaagcatcgtccttgcttgtggcacatttatgaaaatgctagtaaacatctcagccatgtaatttctaaacatcgtcaatttcttccacatttcaagaaatgtgtctatgaagagaggtctgtcatctgtggcacactttgaaagaaaatggcatgaactactgagtgcttataatcttgagcaaaactcatggttgaaaagcatatatgatttgcgagagagtgggcttctgtcttccgccatgattcaaagtttgtaatctgaaatatttaatctctgtaaaacgttaagagtttgcaaggattgtagtgcagatgctatgagctgtgatttgacatcttcttttgttgttcaaattgcaaagaaatcgagatccctttgtaatttgtacaatgtatgtaaaatacatttggcgtgttaagtgctctgaaatctgcattctgatggatgtgttaataaatgtgattatttatctgattccatagataaataaaatatggaatattgtgtaatccgaaatcttaaatgtctgaaatcgtatagtccagcattatgcatcaatttgatgctgtctggtgaattgataagtactccccaaaacgtttcggcactggaggctactggttataatacaaaagcgttttgaaccatagcttctatagccgccaaagcagggttgagtcgagctgacaaaggcacgcgagccgagcgcggaggatgggccgccacatatcgcacacggtgtggagagccgaggatagcgcaccattggatcatgcacttgtgcacgcgtcagatatgttggagcagggttgcagtcttgcagacgagagaaggttttttgcagccggtctccacccgccccagatcagaattttttttttctctttaatctggccatagtcggatagtccggcatccacggagcccacggggtatgcatgcgtatgcatggtaacagaacgtatgcacggcaaattaacaaatcccagtatgagttttgagttctggagtccgggacataattcttctggcaccacggcaagaagacggaaaggaagcgcgcgcgctgcggccgcccgtctccacatgtaggccgcgcccgcgccgtgtaaagccatgtgcgtgtgaccttgatggaggtgcgaggcgaggcgcggctgcgctgccgcgcgcgtagtactggtactgttctgcgtgccgctgccgccgaggccgagcgcgtccagattcaccctcacaaccacgtcccccgtcttgtcgaaacatgaattcggcaataataaaagggggtagcgcacgagacctaaaagtggatggatgtggagacaaaggatttagacaggttcaggccctctcaatgagaggtaataccctactcctgtttggggaattgaatccaccgggtgtttattgatctgacgatcagattgtcccatgccccctagagggcctcctgcccaccttatataggatggggggcaggattacaagatagaaaccttaaccaatacggtatcggtttcctaaatcaggactttaggccgttccgtaatatacaaggaaacgtaacacccaagtcatgatctgttacatattacatagatataagttatcccctataactagtcggataaccatgccgtgtgggtatggggtacccataatctccacagtagcccctgagaccttcacagtcggaaagataaccttctctcgaactagattactccaaagccgagtgcttcaatcatcttcgccatggtctcccgagtacttttaccaaatctgaagactgtggagggctggaaaataaagtcaggtgtaccgactagatgcacctaataggtgtagcccccgacaatgtggttaattgaacaaaccaagcatatagtcaaggaataaataatccaatcaaccgagtggttttgataatcgtaatcaaccaagtgacttgatatcaatatatagcatatgcagtgtgaaccctccaaataacatgatccgagtgatataccaactgctttgtaaaatatgatgagtgatatagcaaaatagctataaagaagcttgtatattgtgaataaagaaatttccaaagtattgggcatacgccatgcgcacactgctttaacagatgtgcttaagtccctagaagacacatggtttcaccacacctggaaatatatggcgtatgtggtgtaaaatccgagtaaataaactcataaaggatttaccaaccgcctagaaaatgaccacaatatataatcagcctaagccataatattggtcaataaaaatgcacacttacgtggcgaaaagcaatgatattgtatccaatcaattgcttaaaaacccaaacagcaccttgacttatatagaaaaaagtcagcgggacagctatataaagctttactgtttgacaccttttaagatgcattgtaccaactcctaaaaagttaagtaactgcggtataaaaggattttaaggtattgggcacttgatcacgcgcactttggcctaagcaaaaagtgcctaagtccctaaaagaacgtgacaggccacacctgaaaatatgggctgcagacatattaggcctaggccaaaaaatatgccttcgacaccctttaaaggatgacgcatgtaacatgcttccgagtaataaatcttccgggtgatatagaccaagtgtagctcatatgaatagcttctgatctgaatgattatcccttatgggatactccaaaataaatataataattgaatcccgactggcgcaagtattcggttgatagcccttacggggaataataattggtccagtctttgagcatagaaaatagactcatgactattaatccatgtggaatgtatccggaacaagtccaaatcggagatataatcctcacgcttgagttgatgagcccctgagcatatagcttgtccttctgtcatagtcaaaattgtctattggcaataactgacgcagtcggcatggagatgaaatgaccaacatgaagacgaaattgctcatcagaagtaacggaagatgtcagtggtagtaaagatgccaccaatcaaatgtaatgaagttgcataaccatggaggtgaagaaaccagtcggcaacagtcaggtcagctagcagtgaagatgtaggcgcccaacaacaacgaaagaacagtcggtggtgacaaaagcaaaccgacgatgaagacgtagacgcgcatcaacggtgatggcggaatccaccaatcatgaagatgaagaaaataattggcggcgacaaacgcatccgacggtaatgatgattagcggcaacagagatagccgactatgatgacgaagtttcccatcaacggcagcagagttggctatgttgatgaggcttgacaagatgttgatgaagatgacgatgtcagtgatccagtcgatagcgatgtagcagccgatgataacgatgagatcctctatcggaaatatttgaagttgttgaagtagaatgtctgttccgaagcaaagatgaagataatgactcctggagttgactcattggctgattaattgatttcttcagcttgacataaaatttgtcaaattttgagccttatatttgtgtagcccccgactctttggttagttgagaaacaactgaacatagagtcgagaattatagcttcttgtcgtcgagtagtcattgcttgattgaagatatgtgttgaaggtgtccaagtagaaatcctgaatattggagaggcacttgttgtagtaaaatatcatggcattgcatgccgagatgtcgaggttcacaaagacgtcgtggttggtgaagtagtaaaacttgcgaagtagcagcaatagagtttgccggtgccgaagataataaagatgaagtcgctccaccatgatgacaaagttgtattgccgtaatgaagtgaacacaagtcaacggcacaagaagcaaaccggtagtgaagacgcgtagttgtgaagataaaagcaccaatcggcggcagcataatcagtcggcgacggaagatgatgatgtccatcagtagtggtagctgtataaaccagacgtagaggtaagggcactagtcagcagcagacgagacgaccgacgatgaagatgtagatgcccaacaacagcggcataatgggccaatcaacactggcagaatcatgcagccatggaagtgaagaaaccagtcggcagccatggcaaacgtaggcagcttgtgttgaagatactggtgcctattagtagtgacagcgatgtagccagccgtgaagaagatagcatcagttggcgttataacaggccagccgtacaggcggtgacaccagtcagcggcggatgcggcggccggtcggtgaagacgtagacgcccaacaacggcagcataataggccagccgtgtagggggaaacaccagtcggcggcggtcgaggcggccggtcggtgaagacgtaggcgcccaacaacgacggcataataagtcagccgtgcaggcgaaagcaccagtcggcggcggacgaggcggccggtcggtgaagacgtagacgcccaacaacggcggcataataggccagccgtgcaggcggaaacaccagtcggcggcggcgaaggcaagccggtcggtgaagacgtagacgcccaacaacggcggcataaaggccagc

SEQ ID NO: 25786 - DNA, 530 bp, Oryza sativa
catgtgttatggtgttgcgcttctccgtgaaacgtctgatgtagtcggagaaacgttcattatcaccctgaataatttgatatatagaggtcccaggggtgccacgagtgggaacgtgccttggaagttggcgatgaactggacctttaactcggctcatgagtcgatagcattcttgaggaggctagttagccaggcccaagttgccgaagtaaacatcgatggcaaataattcgccatagcgcactggtcacctccggcagcttggatggcggtggagtagactgacaaccaagaagtggggtcagattttctgtcatatttgtcaatcccatctgctttaagttggcaggccactgcacccaacggagggtgttggtgaaggcggggaccccctctgcttggtcagggtgatggaagtggtactctatagattgaatctgtattggtgtgtgcacaacacgacgtgtgaatagcacgtgctccctccggtttcattttaattgacgttttggacaatgacgggctgc

SEQ ID NO: 25787 - DNA, 20682 bp, Oryza sativa
  unsure (1)..(20682): unsure at all n locations
catcgcaacattctagcattccccttgttcctgaacaaacgccttagccgtggtattatagggaaataccacatcaccttagcaggaattctcttctttgttagctgcccgtcaacttctcctggatcgtcccgtctaatcttgtatcgtagtgctttgcaaacagggcatgcttctaggttctcgtactcctcaccgcgatataggatacaatcgttcggacatgcgtgaatcttatgaacttccagtcctaacgggcagactatcttcttagcctcgtacgttgtctcgggcaatttgtttccccccggaagaatgttcttgacgagtttcaataaatcgccaaatgccttgtcactaaccccattttttgccttccattgcaacaactccagagtggtatccaactttttgtgcccctgctcgcaacctgggtacaacgaagttctgtggtcctccaacatcttgtccaatttatgggcctccttttcactttcgcagtcctccctggcgtcctgcaacatttgaccaagatcatccgcaacgtcgttaccatcagcagctatttcctcctcgcccgtttgatttccttcaaatccaacaaattgagcaaagtccggaatattgtcgtcttccacttcatcttcttccatttcaacaccttgctctccgtgggatgtccaacaattatagcttggcatgaaccccgactcaaacaagtggaaatgaatagtcctggatgcagaatactccttctgattcttacacttattgcatggacaacaaataaaaccccttttcctgttagcttcggccactctcaaaaaatagtgcacgccgtcaataaactctttggaccgccggtcagcgtacatccattgccgatccatctacatgagtcaaaaaaaccgtacacaaataattattcttacaataatgacagtcatacaataattataagatatctttattcatacaaaaatcataaaatattacaccaaataattcttaaaaactatttgttaagtaataaactaattttaatgtgttttacttcttttaattttcattttagtttgttttctattatttaagattaactttcactagagttttccttctcaactattttataaaaccttgtttagcaaatgaactaaatttctatatattctttcttccacacacacattttctctctcatcaacttacaactacattttggagacaaaaaaagtgtgcaaaacataggtgcaaatgtagtatgacaaaaaaaacattggaggatgaagttgcaaaccttttaggcacctccgatttgtatgtaatcaccaaaataaattcaatagaaattttggcatgacctcccctcttttttgaagaaattttgaagcttgctcgggcagctggaggaggaagaagacatatatataggatgggactttagtcccggttggtagcaccaaccggggctaaagatcaccgggatctttagtcccggttggtattaccaaccgggactaaagttaccatctttagtcccggttggtgttatcaaccgggactaaagataccgggagggcctgacaggccctgacagcattcgaaccgggactaaagatgatctttagtcccggttggtaacacaaaccgggactaaagatcaaatatgcccgttacccttttgaaccgggactaaagaacatctttagcctcggtttttattgcatccgggactactgtggaaatcggccgaccgacgaaagatggtttctccaccagtggatatagatatagatatagatatagatatagatatatatatgtgtgtgtgtgtgagaaaatgattctatacacccaggtgtacgtactcctggttccatccaccgtccatccgcacacaccacctttcaagccagctagcggatccaataccgagcccgttttgatttttgtttccaaaaaaaagaaatcctcacgatcttaattattccgcactagccggaagcccggaaccctttcgaattgctcgtattaatatctcgtgggtggttctaaacagaatcgatagatcgatctgcaggttatatcgcgatcggacgattcggaggtgacggcggcacgacccatcggcgattcggaggcgccggcgtcttccattactggtgcctccggtatggctgtccccgggcgattggctgggcgaagcgctggtgaccaaacaacggcgccgttattcttcgggcattggcaagcctgtgtgtccgtgcggcgacggcatcgatccaggcccgtgcaacgatcaagatgacgatgagcgccgtccagaactgcaacatcgacgatgctggcaagttcttctttcttccgattttcttaatttgctttttcttgcagatcgataatgcatgcatgtatactctttcattttcctattagatttatctctcttaatagcagaagaggatgcagacatgcatgcagtccccgacctgacgctgatcgaatgataaagcatctaaagaaacgaatttgtttggtgaatgcagatacgagatgcatgtatcgtggacatggatggtgctaaccacagaacagtccagcatgtgcggacgtgcggcgactgcatcagcgttggcatcgaacccgtgattcctagttgacggtgttgatcaaggaagacacattcttggccccttctctggcacgcggtcggcgtgatcccattgatgctaaccgatctgttagcggggatgcagagattcttcgatgagacttacatcgagggtgatcccgttatgtttttttagtctccatgcatgttttggtttccgaaagtcttgcattgtttttcttctttggtctgtccattcagaattcagtgcccttctagggtattttttttattcataatgcaacaacccgatactttaccagtgatccagtctgtgaatctttggtacggtaacacttctatatcattgaatgatacaatttattcatagttagcaacccgacacgtcccaaatgtacacactcttctctaagaaaaaatggtatgtgctattttacttggaaaaaagtacatattctattcatggaaaaaatgccatataccatactctcaatgaaaggtattagcaatataatgctctaaagaacagcatatacccataaaaaatatatacttggtatgagaaagtgtataccggtgctaagttaaaaaaaagggtatatactgcactaaagaacaatatatatatactcataaaaaatatatactggtattagaaagtatatactggtactaagttaaaaaaaggtatatactgttactaagttttaaaaaaagagtacatacgtatactgctactgcagtttaaaaattgtatgtacttgtacatctagtattctagtatataccggatcctccataaaaaagtatatgctgaaactaatcagggatcagtatataccggacataccggtttccttgaagatactgatcgaataacaagaagtagtatatgcagtatatatactgacaaaaaaaatatatatatgcagatactgatcgaacaaacaagtagtagtccctagtatatgcagtatatactgagcaagcaagaaagaagtacatactcaaccgatcgatttaagtatatactgaatacttgagaaaaagtatatactccttaacgtatcaatttagtatatactggatacttaaaaaacagtatatacttttaggaaaaatactgtataatccaaacatatgcttgacgtgattaaagagagcaaagtagactgctccaatgagacatatactgcccgtaattacaaagtagatagtgtatacaggtactatatataccactactttgtgaagaaaaaggattaagtatgtacttaaaaacgtatgctctcttttctaatcattttgatgaagaagataagctccacgtgttctgagtatagttacgtgcatttaaattttgaaacacacatgcactcggtcagtcggttgtaacaaaactaaaagaaaataaaatacctttttaaaaaaatctgactcaccatgaacccattggataatccaatatggagagggtgtatgtactcccggtgtatataatggtcatcatatatatatatatatatatagagagagagatctactctaggcgttgcgcgttactccctccgtctcataataggtgacgtttttgactttttatttgcaatgtttgaccattcattttatttgaaaaattagtgcaaatataaaaaaagataagtcatatgtaaagtacttttgataataaagcaaatgacaaacaaaataaataataatttcaaaatttcttgaataagacgaatgatcaaacattgacaaacaaaaactcaaaaagacaagtaatataggacggaggtagtaccaaataccgtggcgcgactaacaacgataccccacagcgcgtcctgtttttccgttcctagcgatatccctcccaatgttatctcaggaaaaaaaattactatgtggatccgtgatttccgtttttagtgtgatcgcttcctgatttttcgtttctgtttttcacgagtgctcccctgaccggaaacaataaatccagttgcgtttgaaccaatcaggctatcgtaacaaaattactgatgttcgctttttccgttccgcatatacctcctgctacttgcttttcatttggtccaagtaaaaaaattactacctatcgtgctccaaaataggccaaagtaaaaaaattactacatcctacgggtcagtaaaaaaataattaaccgcctcttgtataccaacgtagctctagtaaaaaaaatgatatatcctactagtcagtaaaaaaaataactaaccgtctcttgtgtaccaacgtagctctagtaaaaaaaaatgatacatcctactggtcagtaaaaaaataactaaccgcatcctgtatacctacatagctctagtaaaaaaggtgtgcctcggcggctgcggcggcaacaatttgggagggatggacgaggacgcaggcaccgggatccccatgcttccctccctggtgctggctgaaatccgccccaaatgcatagcctccatctccatggcgttcccatccggcacacatggcagtcctcttctttgaccaccgccggcaactacacgtctggtggtggcatgactgtatctaagagcgtgctcgaaccagacaagacactaatttaacaaaacactaaaaaacaagaccataacaaccattgacatgtatagagctagcgtaaccgttggcatagtgcgagtgatttccgagggcactcaatagacttagggtttgcctcaacagaaccccctcatctgtgaatctgtgatgggctatggggggtacatgcctcgtcagtgatgagtgtcctcgccatctccactcattgcccctgcacatgcttcagtgcttcactaatcaccacagtgagctgtttaaagtcaagtatctgacacataaacaaaaactgcttcatcatatatatatatcactgaaagcatccaaactagaattgaatggaaatatatggatctcattctcatataagaatgatagtacagatctttaccaaaaagagatatggggttctcagtcaccacaatagcactacacattcacagaacgggatgatatgaaatttatcagatcgacacaatagaagggaaggggcaatgcaccagatttggtccgggaaaacggatccaagcagccgagtcgacaaggacgttgagcagcctgttgcctcgagctcaagggccgatcgtcacatccgcaccgtcttgtgcctgccatcggatctggctgccctaaactcaatgcatggccactcaatccagatgagctagggttggaggaaacgtaactccacatagagattgatccgtcggtgaaagtggtgcatcgaggtggaggacagttggtggaggtggagaagagccggcaaatatatagcaaattcgaatgtgggatttgggcagtccgtcgacgagagcacgatgagctcttgggccgcaatgatcttagagccaatggctcgccaccaaacctcatcctagttctctgggggggggggcctaatacgcgactagtcgcgtggcccccatgcgcgcgatcagttctagtactagtagtattagtctagtactggtactactgtagtactactactattactacactgctattactactactactagtgttgttatactactactagtattactactataaataaataaataaatatatctatattttttgatgtataaaaaaaatatgcacgtatacaaactttgtatacgatgtgtacaaactttgtatacgatgtgtacaaactttatatacgtacgtattaaaaaataaaataaaaactagaaaatacatcatgtatacaaaatacaaacttttgcatacgcgtatacaaactacgatgtgtacaaactttgtatatgatatatacaaactttatatacgtacatattaaaaaaataaaataaaaactagaaaatacatcacgtttacaactttgcgtatacaaactttgcatacgcgcatacaaactttgcatacgtacgaatacaaactttgcatatatacgaatacaaactttatattcatgcatctttaaaaaaactagaaaaaataagcagaagagaaaccggaaaagaaaaacgaaaaaacctaacaaaaaagaaacgagaaaaacggagaaaaaaaaagggaaaaaaacaaccgaacagaaacgacaaaaaagagaaaaacggaaaactcgctactccctcctcctctcgcgcggggcgtccgccgcccctctccgcgcgcgacacatgtccagtcgcgcggggaggggcgcgcgcgactgatcgcccattagctttttcgtagttctccccctccacctccatctccgcctcccccttcacaggaatcctaattggcgcgtacgcgccggcccacacggcccaagacacggttagttttttttcccgaattttttcatatatgtgtaaactttcaacccagatttgaatactttcaactccgacttgaaaactttcaactccaacttgaaaactttcaactcagattcgaaaactttcaactcgagattcaaaaactttcaactcagattcgaaaactttcaagtcgagatttgaaaattttcaaatcagatttgaaaactttcaactcgagattcgaaaactttcaactcagattcgaaaactttcaactcgacatttgaaaattttcaagttatgatttaaaaactttcaactcaaaacatttagaacaaaaatacgtgtgctaaagtttttaaaaaagtaatcagaaaaaagaaaaaaaagaatcagaaaaaagaaaaaaaagctaaaagaaaaaatcaaaaaaaaaagaaaaaaaatcacgaataaaagagaaaaaaaggctgatgtgtcttgtgggccggggggcagctgcgcgcgcgccaactagcaacccccctccccccctcatggacaacctcgggatgacgagcccatttctaccattccgccctctgcttaattccctccttgtctctcccaccgcctccatccccgagcaaccgcccacactgctggccttttgctggctcgagagagagttcaagagaccgagagagagcgaaacggagattaaaaaggaaattggcaaattgcctcgtcgtacatgcaggcctcgtcagtgacaaataactgctcatctatgatggagttgtgtctcgtaataaataagcgcagccataagtttccgtgtcaaaaataagcgcagccataagtttccgtgttcaactttgaccgttcgtcttatttgatttttaaagaaaaatctaaaaagcatcagtcacataaagtactatttatgttttataatctaataacaataaaaatactaattataaaaaaaatttaaataagacagacggtcaaaattagatatggaaacttatggttgcgcttattttgggatgaagggagtttttatttaacccgatagaactaacattatctgtgacgggtcataatcatccgtcgatgatgtatcatcacggataaacgggaaaaatatgtggtgaaaacaaaaaatatagtggaaacttgaaaactaccgttggataaaaaatggacgtcggagattcatcaacgtcatcacgagtaaaaaatttactcgcagtaaaatttttactcatgagtaaatccgtgagtaaaatttttacttgtggtgacgtggacaaatcttagacatccattttttattcaatggtaactttcaggttttcatacgtggtttccaccacatattttctccggataaacagttatgtagcagtgtatcttaaatgtcgcccatatgtatacaatcattgatcatgtagtgtctccctaactaatgctataagaaatttgcataatgacaaattgtttgtacaactctcattaattctaggaaaaagtataaaatacccccaaactatcacggtcgaccgaattaccgccctgaacccgaaaatcagacactgttcaacctgaactttcaataccggacgaagtatccccctcgacccaatttagagcggttttgttctacgtggagtacacgtggcaaaccagccagcattttctttaaaataatggtgggatccacctatcatacctctcttcccctctctctctcttgcgcgaatggcgcgcgcggcggtgaggggacaggtggtggcgcagatgatggcgcgaatggcggcatgcacggcggcacgcacatgatggggaaggggtggaggggagtggggagggggacaccataaggagtagcaacccggtggttggcggcgggcagtcagtgaaggtggacggagtagcggcgagtccagcaccccgaggctgtggcctggaacaacggcgcagggatgagagttgtccatagcggcttgatggatagaatttggtgtctggtgacggagacgggcttgaaggcactgatgacgacgagccccgagcccacacgatcctgagtgaagagcggaaggttggcaccggcggagggcgggcccaccctccacctgaggacgcagaggatggtgccggtggcaggccggtgatggctcgggcaagggaggccatcggcagagaaggagccggaggagggctcggtgcaccggcgggggtagaggcaaagccccgtcagcgaaggagaagcggtgccggcaacgggcttccatgagacataggttggaggctggtggagaggaggcgtcggtggtggaaaatctggtggtgggcgacgggtgaggaggagccgatggcagggagatccgccacacccgtctctggcctacgcccccgccacgctcgtcgccggccacggggtcaccactcccaacggctcacaatagagagagagacaggaggggggaaggnaagaggggaaagagaggggtgagagagtatggtaggtgggtcccaccatgtcacgccccgaaccagttccggcgggaactagcccgtgacgctccaaattaacctgttaatcgataccagtcccaggaaacagtgctggtatcacagggagacagaatatcatagcaacagaggtctctttattatagagtaggagtacagtcatgttgggctgcggacagatcctgagctcacaactgcattacaaaagcgaaacggaagccaggacttggaccaatcatcacaggcgcgacttgggaactaggccgaaaccctaaaactcatcgtagccggcttgctcctggaagaactcctcatcagcaggatctgcttcatcttcttcagcaactgggggggggatatttatatagagcaagggtgagtacgggagtactcagcaagccaggggaaaataagtgtttaatgcaggcttcaaggaatggctgttgtttttgcaattgattttatttgaactcttttctaaaagcaactaagtgagtgcttctcaaacgacacggatgaggcagtgcgtctcgtccggtcggagtatgtgcaatgtatcagtctttagatttgaacaagattggcacccggccaaaggccttttaaacggccacccgggccaacaccttttcaaacggccacccgggccaacaactttttaaacggccacccgggcctagctgatcccgtcagctgcggattcttttcaaacatcgaacccgatttcacaacagcaatttcacaagcagtagtcaaacaaaactacgctaggaatcacctcacatccgcccatgaccgtgggcacggctgttcgaacagtttgttaacctctgcagagggggtacactttacccacacgtcattactaacccgggtcacccagcccgtggggatcagccacgtcgggagacctccaagctttcatgacaaggcatttcgaaagccgatgcaggtttgccatatgccgacgagaggggtcccagaccaacaacaggttaggtcccagaccatactgtgccaggaagcccaggggtcctccccgacaccaccccggcgaatccacatgtctctcggcatcaaggctcccctgataagctagttactcagccaggggtgtcccattccacccatgtggtcgtacttgtcttatgtttggatgaaattccaaggaatcggtccttaagtgcgagagcgggaaaccgtacacccggtacgttccccggtccgcggttttggaaattcatttagttcgcaagcaccgacccaagtgtcgggttttccaagtcttttgtaaaactccagttttacccaagttgttactcagattttaagtttgaaggcgaccgtcgatactcgcacagagtgcacgagtatcgaggcgcaactgggtggttacaaggggacatggcatagcaattaacaatggaaggatcaaatgcgacaaattaggtaggtctgccaatctgccttgcagacgggacaacagattaagtgtgatcctatcaatgcataatattttgcaagcaatataattaaatttcaaatataggctcaagatgttcaaaggtggcttgccttgctcgagatctggagcttgatcctcgaaatcctcgcactgcgggtcttcgggctccgaaactacacgcgaaacgggacaactcaacaaacggcgagaataaagccctattaatgacccctaagcgtgccattagatagatctcgagatttgggaaattttggaagttgaacggagtcaaacggagttatggttggaaagatattgaatttctaagattattggatttttggtctaaaggaaaaaggatttaattaaatcctttttggaaaaaggaaaaggaaatgatgaagggagggaatctagactttcctcgggcggctagggcgcggcccaaaggtattcggctcggtccggccgagctaaacgggccggacggcccaaagcggcccatttacgcgcgcgcgcgggagaggagagagagagagagagccggtggaccgggctcacctcgcgcggccccgggtgggacccgcttgtcagcggctcggcccaccgtgcggagggagcacgcggcgcacgcgcgcgggcgaaagggggaaagcggtgcgcgcgcggtttacggaggactcgggtgcggcgggcccacgcgcagcctcacggcttgcggtggaatgcgcgcacggggagggatcggccggggtcggcccgtcccgagctcagccgagctggcgccgacgtggcgcctacgtggcggccacgtgggctggcaggaggtagacgacgaccggccgcaaatgaacggcgggcgacggcggcgagcggtagagcgggccacggcgataccggcgaaggcgagcacgccgggcggtagtacgggacgagaggagacgagccaacggctcggattcgccggaggttgctcggcggcggcggattgcggcggcggcaaccggcggcgggagaagagggaaacggcgacgaggccacgagaggtcgatctccggcggtgagagcatctacaaggccacgggaactcgatgctagggttggattggacggagctatgccgagctaggctggcgacgtgcggctacttcggagctcgggcggcgacggcagcgagcacatggcgagcaacggcatcggtcggggcggcgccggccaactacgggaggtctactcgagctaaaaccgaagtctaaggggggggagacggagcgaggagggagaacgaagcgaaacatcaccgcgggaaggagaggcgctgtgacgagaggccgacggcgcgggagtgatctctccggcctcgggccggggaagaggaagaagaggcgcggccggagtcctcttcggcgtcctcgctcgtgccggctcctccgacacgcgcggcgacgattggagacggcgaaaatagagacggcagtggaggaggcgaaaatggggaggaaaggagaaggggaggccgggggtttaaggaggcggcaatgtcggtttggggaaccgacttgcgcggtcaagagcgcgagctggcgctcggctagcggccaaagcggtggcagacgggatgacgccggcgggagaggaaaaaggaggaagggaaaaaggaggaggagaaaggaattctctcctttgccgattcgggaaaaggagagtgggcgcggggcgacgacgcggcagagggaggtgaggcgcggcctccgggccttggcggctagcgcgcggagtggcgggggccggcgatgacgacggcgggcggtttggagcggagcggcgacagcggcgactggcgcgggcagagctgacggcggcggcgaccgggcggtcgcccactcggcttgcgcgggcgcgaggcaacgggcgacggcgcgcgggggggtgggggaaaaaggcggggcgcgggcggctcacgcgcgcacgcgcgcggcgcgcgggcaaagcggcgggatcgggagagagcgagggagcgcgagggagagagcgcccggggagggagagagagagagagagggaaatgggccgggggggagagatgggccgggggggcaaggtagactttgcggaggaattgattcggaagatttggattcggaatttgaactcgacgatagatcggggattgagatcttgagatggcacggacactagacaacaatcaaaggaacaaaatttcgcaattagggtttttgagagataattttcccgctaggcgccacgacggaacgggcgctacacaccattttttaaataaaaaaatactgactggattgccatgtgtacgtcccataggataaaaccgcttcggattgtgtcgagggaggttattcatccagtatagatagttcagggtttaaaacgtccgattttgtggttcaagggataattcgtaccgtcagtgatagtagtgatagtcaggggattatttgtactttttccttagtactatcgtttggcagtacgccagtaccttatcagtccaacaaattaaatgtgctccgtctttaacgttgggatgccacttccctgttcctagattacgttccgatctttatcccataataacaaaaggctattccccataaagctcagattagtggttatgcctcgcctcctaatgcaagttttatagtggagatgatagttaaccttaatttagtccatatcatcaacttattaattaagaggcaatacatagaacaaattacctctagcacacttgtcccaatacatcgtattaaggtcatctttgtttaggttaataagccaacttataagtcgaaaagtctaagcttaaacaaacttttcatttggcttttttgaagtcataagccattctaacaccattaagtcaaaagctaggttggagaagctttttttatcttatgtgaggtcgatgtatgactccaccactaaacttaggacattaaatccactgcttacaaaatcataagccaataaactgatttaaaagtctaatcctaaacaaagagggcctaattttactttatttgtttcctatcaattcattggtctcttgttcttatctatcttagagtttgtgtagaggtagcccttgcatgagaggtggcttcttctctcttctttcatatctctcatccaccttatcgtatgagcttacatggcacctagagacaagtgcgtagaggcttgtagtacttgccttaataaactactcgtattgtatatattactatgctagtgataactgctacaaatacatcattgagtatgcaacttatactgattaaaaagaactttaccccggctaactaaaatataggagaaccctctatacaacatatataaacaaatttacatatactatataacacgatgtataaatcaattatcaccaaagtcaacccatgtactgtaatctgccctttctgtcccccaatattcttttgttgctgctccgtatgctaattcataagaccaaatgtttgaaccacatgtttcaaggtacgtatctgcgcagaacggtaactttggtacgaatgccaattggccatcgcgagcaacaagatcaacgtggacggtctcaggccacttatagaatcttggaaggaatatcatattctgcatccacttaaatttggacctcttcatcatcgtcgtcagcgatccagtgaatattgtttggccttgcaagctctctacctcctcccactccatcgtttgatcattaagcttgacaacatggacaaccttcccacggcgtcctattagtacaaccatcaactcacctttattggactcgaccaagtagctgtcttcacatttgaatccgaagccgttgggcttgttaagaatctcaaacccttcatcaggcctgcaaggattatacaccaccaatttcccgtcttgagcaagaaggtatagcaaaccgttatggaggacagggttggtgactggtgatgcccgaagccgtggacagtagagatgattctccgtcgacttccagccctcccactcatcactggtgtgtcgaatggagctagcaaccttgatggtgatagttgccttgacaccaaatagcctctcatcatcacggtcggagacgacaaaattaaacaacatataaggttcttgcggcaatacttcaacgagggcgccggtgacaaggtcgatatcatacaccaaggctttgtccgcgcacatcttgaggtgccgtcccgtggagcagcaaatcttcgcgccaggcaccttgagagtgtcatcgacctcgaaattcttatcgtagtaggggctatagtatcggatgttggcggtgccaacctcggcggtgttgagcaggagcggagtgatccacgccgggtaaaagggacagagcgacgcggcagagcgccagtgccggcacaccaacgcgacgctcgggtggctcgaccaccgcagactccccagaatcaggacgagcacgtccgtcgggagagacgaccagccccgagcctgtgacgtcgatgccatctcgatcgcttgctcgatctcgccggtttaaaccgtacccagtgccggcctgatcgggagagacgacgtgagcgcggtgtgtatcttcgtctgcctatggcgttaattttcttccacttatgacttgctaatatgtacgtagggcgcagtggagcgaaaataccaatcggtttacatgtgggagttgcaatgcgatccgagttgtccggggaaaaacaaacctacacgtaaacgtacatacgtgtgccgctggccggcacggtatagctctgctgcacgtacggtcggcaatttggaacggtgattttccttagaaagggatcggattttttttctactagaaaaaaatgcccgtgcgttgcaacgggtgaaggctattttaattatattattgttatgctagaaaaatgcacatgcttcgttatgggtaaagcaacagttaaatgctataaagtctagagttaacatgtatatatatataataatgtttcaagatagataaattattcattaggctaatgataatcacgccggataaaaacacgctctctctctctcaacccttgtgtgacaaactgtgatatcattgcactgggtaatggtgaggtgaatgaaatttgacctcaatgatttattgaagcacctttatagttatcacaaatgcatatttgtgtttggataattaatccgctctacacgtgcaggatgtgaatgatgtccctaacacatggtcccgatgattgtagcattggagaaacggacgttcgagcaacgcacctttacgtataagtaaataatgaatttttttgggagttcattaattattttaaactacattttttatgacacttttataatcttttttcataattgatgattgctataacattgcattgattataatcacaatgcaacagtacagtgctatgctctaaccgacaaaacctgaacagtgccagccgtaccatgccgttcctttttcttttgtagaaaacctcttagcacataattaattgagttttattattaaaaaaaattaagaaaaaatatctagtattttatatcaacttgtatatagaaagttttaaaaacacgctaacaaaaatcgagatagaaggaacggagccatggtgtgaagtttcacgccatgcacatattcaattttcatgtatttttaaaaaataccggttggttcacgtgtttatactgatttttttatataatataataatctttatttttcgaattaaaaactggtgcactataagatttcagaatcactaaaagtctgttaaagaaagaggtgcagaacttttgatttttcagccatcggatgtgcatgatccgtgctagtggttgagagaaaaaaaaatacgcgcaaatatgatttgggacgagggagggaaagtagacttattctagggcctaggtcaacatatatttatattgatttttgtgaatataatttaattgtttttaattttcgaattaaaaactgataagataaaatttcataatcaataaaaatctgttgaaaaaagagaaataaaatcgaaggcaaatataatttgatgtgggggaggcaaagtagacttattttaagagaggcctatacagtgcaagtaataatacacatgtaagagatattacggtatatagattgaaaccgagaggagcggtggctggcctgtgctgctgtgctgcctgtctattttataagaaggctcgtgttttgcgctgtgaattagattccaactcgactgaataatcgaatcagattcgaactcgccgtaaccgcgtggggttcgcgtacgcgcgctgccacaaaacaccataacaccagtccgaccgcgctccttattccgacctgatgctcagctctctaccgatattgtactacatctcttctctagtatctctactactccctccgtattagaaacataacaatcgacgccatcagatcagataaccaacattttttttttgaaccaaaagtttgcatagacatcctgtcacaccccaatccagcactaccatacaacggcacctaacgggaccgtgtcgtaaaaaaaacggtgtaaaccgcttcctacgaaaccgcgatatcggtagcagtcccagtacatagtgctggtaccgacggtgacaataatgaaccattgcaatccttaaattaaataaatgacttatctaccttaacttaagttgcaaccctagtaaaaaaaaacggaccagcccaacggttgaaccggaaaaaatcggaaccagcccctcagccggttcggtttgctgtaaggaccggatatgccatcgaaccagtcacaaccggatgaaccgggcggtttttggtgaaaaccggcgaacaggacgcatatgaacaagcggttctggcgagcacgtggaccaggctacaaaggcccactaggcttataattgagaattgtcaccacccctacattcacctcaaacctactgcgggagacggagcaattaccgggaattaattacctagagctagctaaacactaaagcaatcaatatattttactggattacagggaacaagatcccgcacgctaattaggaactaaccaagagttaattctcaccgagcaaatcttaattactcagaatgataattatattaaagatgagtaattaacaaagtaaaataaataagaagatgattaccgacaactccagaattcctccgacttcttctactatactctctccctaattctagtatacaaaaaagtacaataaaacctcttataattcagctcaagcttggagtgtgtgggtgaagtgagaatgggagctcaatttataggcaggtaatggtggttataactatgtgaattgtaggaattgccctacaaccaccatcaggagaccatctagaacgtccattacaaaacctggattcaacggtgatcaccagggttcagccgaacctgggctgggcccccagatttggtctgggcctcctcgctgctctgccttatccatttattcggtagttgggcccatgttctgatgttttgatggagtttaggagcccagctcttgtatggatagaattcttcttcacttaagtctaaatttcctcccaactttggtggtttatcacctgcatccaaatatacacgaaaaatgttagaattaaaccctaccactatgtttgatgtattattaactatgttttatgcaggtattggcagcatagaattgtcatttaatagctgccaacactggtattttgcaatcagttttgttttcgagttttcaacaatctaagtgtgtgatttccacgaccagagtgagacgagtcttagctcggtcgggggtgagaagttacaaattgatttgcatgttttgcacaactccctgagttgacctcaaagttggttttcccaaccaaacgaatttcccaatctttcagagtttggttgtctccaaacaaccaggtacttcttgggactgggcaacaaccagttacttctagggactccctgtcccactgtctccttgatagccacttgcttttccaaacatcaggtttcccaaaccacaacaccttttcacaaagcagggtaacacaaaatctacgctaaggaatcagtccttaaaagtgaccgcacaagcatcacgcacaggaatggacttgtgtcgcgagttttgtttttaaaactcacattctttcacaaggcaccgacctaggcgtcgggttttccaaagcttttataaaccaagttttacccaagatgtttctcatattttaaatttgcaagcgaccgtcgatactcgcacaacgtgcacgaatatcgaggcgcaacaaggtggttacaagggaacatgatataacatttaacaatggaaggatcaaatgcaacaagttaggtaggtccgccagtctgccttgcagacgaggcaaacagttccagtgtgtcacgcccagaaattcacgaactagaatttctaagctgaatgtgcattaaaccccctgtccaggaccagccagggtacacaaacgacaattgttgacatacagatccacgtcttacaaaaatataaaagattacaaatgcagcggaaaagataaaagcgagataagcctgaagacttgactcctgcagcgggcgattccattccacagacaacccttgacggcagcgacgaaaccaacctcttcgagacatcaccaactgagaagaatttcaactctggtgtgggggaaaagagagcaagactgagtactacccactgtactcagcaagtcataccggaagaggaggtatgatgcaagatatatccaagggaggctaaagattcttttgcaaaaagccggcatttcaaagcagtagttgaaaacagtaaaacaatttcagtaattaatcaatattgaccaatcactgctcaacgctacaccacgttgagacaggcccaaaccaccacctgaactaaccagttccaaaggctaactaggggtgagactaatcacggtgaatctggtcgaccgcccataaccgcgggcacggctattcaaatagttttactctgatcagaggtgtacaactgtacccacaagacacagccccacgacacgttcccgtgcgccgacatgccaccacgacataccggaaagaggccgtgacaggactcttcgcataaccccctctaaccgatcgcaccacaccttagggttcgcccccgtccccagcaggcaacgggcagcccccctttcgtgccgtggtgaatccggaagccgatcaaccggacacctcggccgacccatgtaacgccccgattttcgttcgggattaaaatttatttaataatacattttctagaaattaaataaaagttaaagcaatttaatcaagtgaaattatggaggaaattaaaatttcctttaaaaatcattggctggaaatattttgtaatattctttgtgccctaatgtactctccggaattttccgtgaattttcggagctcaagaagtaattttaatagcacaaagttcatccaatcaatttaaataaagagaaaacaaattaaatttccatcctcaccttttgggccggttttcggccaatccacccctttcttcattccccccc

SEQ ID NO: 25788 - DNA, 24201 bp, Oryza sativa
  unsure (1)..(24201): unsure at all n locations
ctctcccatttccccctcctccccgagcccgcggcgccttttcccgctctcaccgcgcgagccccagctccgccgctcctcggcgaactccagccacgccgcgccgccgctcccgttcaccccgcactgcgccgtcgccctccccggcaccgcagcagccgtgcgcaccccgtccaccgctccattttccctctccaccttcgaagcgccgcagccacgcgcaccacctnttttcgccgccaccgccggctccagccgcctcttctcgccgcttcagccaccgccgtgccgtgccgtcgccaccgtcggcatctgcgcgccgagctccaccccgtnctacacctctttttcccaatctcccaccaaaattccacctncactggtcacccgagccgccttaactataccgnctccagccgncgtctntcgtcgntctagccgtcgccgcgccgcgtcgccgcgctccaccgcaccctggctgccgctccattccgtccagaaccccacgggagccgcttttccaaagtcaaggtgagctccactccgtatcgccgccgtcggcagtcgtttttggtcgctccgtgccggctcttccctccctaaccgctccaatatcttcccaaggtcttgccggccctcggccgcggctccgttgtggtcgggcgtcgtcggaacgctgttcccgtcgcctcccatcccggccgccgccatcctttccgccgccggtcgtcgccgaggccgcccgcgccgtcttcccgagaaggcgtcgccgccgcccgttgcccctcgccgccatggcgctcggtgagctctccctccgtctcccctccctttttccctgcatcggccgcttcccgtgcccgccgctgcgccgcgtcttgtcgccggcagccgtccggccatgcgccgccgccggcgttcgggtccatgccgctgccgcgcgctggccgtggcccgttgctcaccgtggaccactgtggtcttggtccacggtgtagccagtcaccgtggtggaccgagtccaccgtgggccgcccccttggcctgctgacgtgtggggcccgcctgtcggcgccggccctttgctgacgacagcgcttgtcatttcctttgagaaattaattattaattgcgcaataattcggtttaattctagaaattcatttaaatggctcaaaacttctaaaatccatatctaattcattcgaactccgaattgagccgttcaacttgcaaaattcatctaaaattgagctctacatgtttgtttactttttatgtactgttttcttggtttttattagtgtttttcctcattttgcgtgccagcgtgtagaatccgtcgtttcggaggtccgcggtcgcgaggaaaagagttcggaagattgttttgaagaagcaaggcaagtcacacattccccttgagcatattgagcctattttataaatgtttcaccgtttgcaaataaatatgcatgttttgctaattacatgggatctgggtatcacctatctgctcgcttgtgccatgtttacttgatatctgtcctttgtcaaccttgggtaataaataaactagctcatgttacttatgtgacctagctagaactatatgcttagccctgcttaaataacactagctcagttgatgggataattacaatattagacctttttagtatcagaatgagctgcgtgctcaagacatctggccatgcttcatggtcgtaattatccaactaaaatgcgactacatggtgggctgtgggtgcatggttttgctagtcgcacccatggcaattaaggaccggttcgcgggaaaccctggaagaatttatcgtgcttaccacaagccagcgtgggcaacggctgggcttgtagtgtagctttcctctagctgacgcatccaggcaagggtgggcgtgatggagtttggatgggccctgcgacggcctatgcggcttccggattcacctaggcacgagaggggactgcccgctgccttgcgaggagtgggggtgaaacctgaggtgtggtgtgcttggttagagggggttatgcgaagggtcctatcacggcctctttccggtatgtcgtggtgacatgtcggcgcacggaaacatgtcgtggggctgtgtcttgtgggtacagttgtacacctctgatcagagtaaaactattcgaatagccgtgcccacggttatgggcggtcgaccagattcaccgcgattagtcccaccctaataaatcgacccaatgcaccgtagttcaggtgggttggttgggtctgttcaacgtggtgtagcgttgatcagtggagatttaatgttactttaattactcaacagttttactgttttgctcaataaaatgttttacaactgcctttatgcaaatggccacaaaccgtccttgtgttccccttgcacgtctgcatcgttggtgtggctgctgaggacggtggttgtactcagccttgctattattcccccttttcagaagtgtagtgcttctgagctgaagacgaagttagaagaccaaggctcagaccccagttgagttttgcctgtggggtggagctgaagccccgctaggatcgccttttccgctgctgttgcttttgtttcggtgtgaggactaagtgcctcttctgtaagtattttacgctttatttacgtttggaactgtatattacttgtcgttttgtgtaccctggctggtcctggacagggatttaatacacaaaatagtctggaaatttgggctaaatttctgggcgtgacaacccaactccatcacgcccaccctcgcctgggtacgtcggctagagaaaagctacactacaagcccaaccgttgcccacgctggcttgtggtaagtacgataagttcttccagggcatcctgcgaaccggtccttaattgccatgggcacgactagtaaaaccatgcacccacagcccaccatgacgtgtattttaattaaccaacaccattacggtggcactaaaccaaaactatgccgataatcaagtctatgctttaatgtgatccccctttgtgcactagttgaactaagcatggctaagcatctcctaaatcaacatctagtcattttaatacccaagttatcaatggcgtaagggaaacaacataaagctgagtaataggacccatcccacatgatattgtaaaacaatgcaatatttaatagaaatgcggaacatttgtaaattgggtacaatatgatccattgtaatgtataacttgccttgctctcgcactgatggaaccacagcaacgtcttcgagaaaccgcgaatcgacgaaacgaccgaaatctacgcgacaaacaaagcacacaagcaaaacatgctataagactactgaaacaggaaacaaaaccagtttttaatggattctatacatttttatgaatttactgagacttgaatggacttaatcggagctcggatgaattagatatgaattttagaagattgtttgtgtttttactaataaagaaaagtccttaatgaattattgagcaataaagcatcccagtgctgacgtcagcacaaggatgggtggcgccgacacgcgggacccgcgggtcagtgattcaaggagagagaggggcggctggcaagcgggccccaccgagcggcggctcatgggggaggaggagacgcccggtcggctcggctcggcctcaaaccggccgaccggttatgcgaaggcggcggcgcgcgcgcacggtcgccggcgacggtaactgcggcggtaagccgctggcgaacagcgcaaaggcggcggcggcggccgaagcggcggctcagcccggacggcgctaggagggagaggaaggggaaaagagggggaggggcgcctcaccgcgagttggccggcgtgggggaatacgacgtcgaacggtgacggcgagcggccggggacgggcgacgataggcatacgagctctgagacctcctagggaccaagatgggagggattagagggagaggggtggttaacggcgagcggattcgccggtcgaaggcggcggccatggggtactcaccagcgcgcgaggagaagcaagctccggcggcgggattgatcggggaaacggcggacggggtagcgcacaagcttgcgaacccggcgccggcgacggcccggtgcggcgacggctctagcggtggcggagtgcggccggagctcgcggcgaacggcggatggcggggtgaccggcgcgggagcaatggagagctcgggagggcttggctgaaaaaggaaaagagagaggaaggtgcgagcgtgctaaaataaaagggggggcggcgagtcgtggccgggacggcgcaatttccccggagtagtggggaaggtgaaggagaagagagaaaaagccgggattcaaatttgaatcccggccatctcgcgggcccgggggtgagcgggagtggggcgtgggcccgggaaagccggggcgcgcgggggagtggacgacgtggcccggggtagcagggagcgcgggccggcggttgagaaggaagcccgcccctccggctggaggttaggggcgatcccgacaggtgggccccacctgtcggcgcccgggagaaggtggggaggccggatggacttcggggagggggaggacaaggaatgggccggcggcccaaaaggaagaaaagaggggaaaaaaagaaaaagggaaaaaggaaaataaaaggatttctagggattctttaatgcttgtgctctattttaattggttaaaattatttccaaggctctgaaaattccactaaaaatcccgttagcttattttgacatgtagaatccaagaaaaattccacatgccgattccgattatcatttgcatttattaatttgaggaattagctctaggttaaattgaacaatttcttcggacgatttattttacaaattttaaagctggaaaagggaacttcagggcgtgacacagtgcaatcctatcggtgcataaatattttgcaagcaacataattaagttcaaatattggctcaatatgttcaaaagtggcttgccttgctcaaggacttgagcttcacaaatcttcaagaaattcacgcttgaagaaaatccggtaaccgcaacttggagctgaggtggcggtgcgggcggaggggggcatccgcggcgacgcggccggaggggaggtacagctcccctccctctcctatcccgcagctctactctccctctgcgctcggcctcgacaacgacgatgccgccgccgccttgatccgaggaggggaggagggcaccatcagctggaggggaggccagcggcgccgccggtgggttggggtggtggtggcggatttatttattcgctaaaaatattttcgcaggcgggtggttctacctaatgattttcgcaggcggtccgccgggccgcctgcgaaaattatctattttcacatgcctttacgtgcagacggtctcttccccgcttggaaaaaaactatttttggccgcctcgaaaaactatttttctaagtagtgcggattgtatgtacaatctatcacacctagaaaattgcataagtaagtattttatttaatactgttgtgcccgttagagatatgggattgtttatgaccatgactgatggttaacgacccgtcacaaataactactcatctatgatggtgttgtcaatgggtatttgtttaaccgatagaagtaacgttatctgtgacgggtcacaatcatccgtcgatgatgtgtcatcacggataaacagttacgcagaagtgttttttttttttagataatgagttacgcagaagtgtatcttaaacgtcgcccgtatgtataagatcattgatcatggagtgtctctataactattgctataagaaatttgcgtaatgacaaattgtatgtacaactctcattaattctatcgtttggcagtacgccagtaccttatcagtccaacaaattaaatgttctccgtcttttaacgctttgataatccacttccctgttcctagattacgttctgatctttatcccataataacaaaaggcttgtcgaaactagatttcggcaataataaaagggggtggctatcaagctaggaaagtgtatgggtttgaagacaaaaggatttatacaggttcaggccttcttataaaagaagtaataccctactcctgtccggggatgaatccgccgagtgtgttattgattgtatgatttggagaaaatccaacctctgcccctagaggcacccggaccccccttatatatgggaaggagtccgtattacaaaagataatctatatccctaacggaataggaagatacagataaaacacagtcgtgaccgactaagtctcagggtgtttccttgatacacaagttaagaaacaaacccgagatacaaataagatattctatctacattaggtatcctgtacccagtccaaatactatcgccgtgtagatatgggatatccataatctccacagtagcccccgagacctttgcagtcaaccatcgtagccatctcaaaaataatccgagtgcttcaaacttttcatgccaaggcccgccgagtagcgaagacgaagactgtaaagggcgaaaagataaagaatatggtgcatcgaatagatgcacctaattaggtgtagcccccaactatgtgattagttaacaaactaaacatatagttgagaacaaaataacagcacaatcatgcatcatatgacaaaagcatacgcggcgcctaaagagacattcttgccgactgctttctagccatatgagtccgagtggtttacactctaaaaggttcacgaatgaacatactggacaggcatccgaatataaaactctaaagattacccaccaaatattataaaaattatggtaatgaataagtctaatagcctaggctatgactatttaccataatgaaaataggtaaataacataccaaggaagtgactatgataaaaacaagtcattccaaattaacccagacagcttttgtagcctaataaagctaacaaaaagcagtataacacctttctgtcgggcaccttttaatttgcattgcaataattccaaagaattatatgaccgcataaaaaggattttatcagcattgggcaacactattgcgcgcataatattgccaaagcaaaatatgcctaagtccctaaggaacacaatgggccacgctgttaaaagtattgggctgaagtactgttcaggcttaggcccatttgcacctccgatacccttaacaagaaatcccgagatccaagcgacgcttcgtcttccccgccggaactctcaccattttccccactccttgctacagtgcagcactgcgccggcgaactagggttcaccattccactcaaatccaccttcgaaaagtgcaccaaaatccttcccgtgatccaccgccttaatccctcatttctcccaagccatccctcgaatcagatcagcacatttgagaaaaatcgatggcggaagagagagaaagcttcgaaagccaatgggtgccgtccgacatgacggaagaaaacctgaaggagatggtggcgcacggcgttctccctgccaaggagatcatcgggtggcggccagcgtgcggtgaggcttttccaacccctgatacacatgagatcgtagtcttctcgcatttcttctatggcggcttcgctcttccgacctcgaaatttttccgcgggatcttgaacttctatggaatcagcttgcatcacctaaacccaaattccatagtgcatatcgccaatttcgtccatgtttgtgaagcctttttgggaatcaagcctcactttgccctgtttcgccggatcttcttcctcaaaccccaaccgaacaagagcaaaccgtgcgtagtcgggggggcaggattccagctgaggggaactctgagccaaaagtatttctctatgcccttcaagacttcgaacaaagggtggcatgcaaactggttctatgttcaaaatcctgagcctgctcttcccgggtactcttgtcttcctccggtgtaccaagatacctggaactctcttccaatcggagatgaagcagtccaagccttggagttgatggaccgcatgttaaaacttaaagaacaaggcttgcaaggagagcagattactcggcatttcattaaatgccgactggcgccaatcaaagaaagatcccgtacagcattcgagttcgacggcaagcatgatcccaaccgtgaagaaccggactctctggacttcaaaatcatgaaggagagaatgtataaaattttctcaaatgctattgtcgtcagctactcgcatcagctgccagttgtgccatataatgcattcaatccgcctccgcaggtatgcatctgaaattcttcaacccaaggtcaaaacataatttaatcttcatgttgagttggctaactgcagaagcatctcattcaggaatatgtattgatgaaatctgatcccccaattgctcagcgccgatctccccgccagcacaccgttcagggaagtggagggccgacaatcaggtcagacccgcaacctcaaacttcccaaccgactgggcagacaggttctcgcaagagaaaactggtgctaaacgacgacgaaggcgacgacggcgacaaatctggggacaagggctcgcctcacaaactcccaaagcgtaccatgcccaagaagaaactggctggccgtcaaatgccaaagattagaacatcctccaggtaaaaactcctcggtaccatctctctttgacatgcctctctcatagaaattatgctgaatatcaaaagaacacttggcaggaaaccatccgacatagatccaaccgggaaagaccctgatccggctgtggcagaaccaaatatatccaaggatgctgagccgactgccgaaagccagccgactgccgaaagccagccgactggcgcccatgcttcggatgacaaggccaatccgagtgaccagccgccgactggaaaccagtcggcaacaactgaaactgcaacaacccgagagcccccaactagaaaccagtcggatgtaggtcttgatcaagaaatccctgaagttgaagcgcaagcgacagcttctcaaggaccagaggctggaaatgactcgatgattggttctcctgataaagaacaaggatcacctcgcgctcagccaggcacatcctcaggtaactcatcttctcaagtgatatcgttctgaatagctccagcttgctcgtctaatgtcttggaaatacatcaggaacactaggtgatgacgaagaaacaattcctcgcataaaggcagctgatgacttccgtcctcctatcttgctcaaatggtgggacgagaactcgcaagctgccggcatcgttataaatcgtcagaaagaagatgaggaagtgtgccagctgaagaaagcacttggagaagccactcgcattgtaaatgtaagtcttctaggtaactgcctttgatgactttattgtctcgttagcaaaactaatccatgaaccaccatgcagaggatccatcttcgcaatgaggccaagaccacaaccttagaaaagctggttcctcatttgggaactcttgaagccgttagggaccagctgcatgaggccaaggagtatgctaaaaagacagagaaggagttaagggaccgaattgcccagctccaggattcaaacttcgagctaagtggttcatcaaaaggtaaccttccagatctattccattgatctatgctgtcataactgtatcctcaaatatttggatttcaaacagcacaagctaccaggatggcacaaatggagaaacagattgaagccttgaaaagagacaaagtagaactagctgtgcaaagggactcagccttgaaggaggtcgaaggtactgccaaccgacaatttgaactttcctctcttttatgcagcagattcttattataaatatgttttgtagaccgtaaaatcaaatctcaagctcagtttgatgtcctgattggtaagatcaagaagcttgaaggagcaagagacgaagtcgccaatgtcgctacaccactcatccaagctatgttccttaataacagtggtccgagtgcacttgacgcaactgaaatctttgacaagctgagagttgcaccggatgtatacttcaagaatatcaagaaagctggaagcatgggagctagcatggcattggcgatgaccaaatccttgtacccgagaattgaaatcgacaccattgatggatttgcagatgggacaagtgaagaagctgctcttgatcttattagtaatgctcaaagtgcggctgacaagattgcaagtgatgttgtagagcaattccgcaacaacgaccttcagccgagcaataataactctgatgatgaaaggactgattctgactgagtgtaaatgtaacgaatggaggcttaatttgtacaatactggtgtatttatgctgtgcttgatagttctagccaagtctttgatttcttaaaagtttttatcaagctttgttgagcctaaaacccaaataagctattaaaaactttcagtcctcgcaaactaagtagaaaaagccaaacaaggcaatgatagaccaagtaagcaaattaaattgataaaaaatcacactccattattataatgatagcccccgactgacaacttcaagaagaaaacttgatgttgacagtcaagatagggaagtacaatgataaacttaagcgtagaaacgacgaagatgctcaatattccaagagttgtcgacaagagtaccgtcttcgcgcttgagtcgataagaacctggccgggtgacttcagagataataaatggcccttcccatagaggagataacttgtgccgatctcgtgtagtttgaattttccgcaaaaccaggtcaccgactaaaaaggcacgagatcgaacattgcgattatgatagcgccgcaacccttgtaaatatcgagccgaccgaatcaaagctgcttcgcgggcttcttccaatcggtgcaagtcatccactcggtcctcctcgtaactttcttcacggaaatttcgaaagcgcaaagactcgaattcaacttcactcggcaacattgcttctgccccatagacaaggaaaaaaggtgactggcctgtggcccgactaggtgtagttcgcaaagaccaaagtactgatggcaactgttgtacccatttgccggcatagggttttagccggtcaaaaacacgcgctttaatcccttgaagtatcatgccattggctcgctccacctgtccattgctcatggggtgtgccactgaggcgtagcaaatcttgattccgaagtcttcacaaaagtctttaaaaactccgccagtgaactgtgtgccattatcggtgatgatccgattgggcactccaaatctatgcacaatgttgatgaagaagtctcgagcattatccgctgtgattgtgacaaccggtttagcttcgatccacttggagaatttgtcaatggccacaaagagatgcgtgtagccgccgactgcctttttaaacgggccaaccatgtcgagcccccaaaccgcaaacggccaagacagcgggatagtttgcaactcttgagctggtaagtgaatttgtctggcgaaaaattggcaaccttcacatgtgcgcacaattttgtcggcgtcggacactgcagtaggccagaaaaaaccctgccggtaagctttgccgacaatggtgcgtgcagcagcgtggtttccgcatatcccagaatgtatgtctttcagcaattgtctcccttcctctaaagatacgcagcgttgcagaattcctgaagggcttttcttgtataactcagattcatgcataacataaagtttgctccgccttgaaatccgctcggcttcatctttatcttgaggaagctcttgagaagttaaaaatcgtatgaagggctctcgccagtcggcttcaaccatagctacgtcatgagtgtcggcatcttgagtagtatctttatgaggtacggtcggtgtataaaggtgttcgacgaaaacatctgagggcgccgtctcgcgcttggatccaaaattggcaagtctgtcggcggcttcattgttgtgtcgaagaacgtgactgagctcgagtccatcgaacttgtcttccaatttgcgtacctcttgtcgatatgccatcatgttgtcgtcaaggcaggaccactctttcataacctggttgacgaccagctgtgaatcgcctcgaacaattagacgctttatccctagggaaattgcaatccgcagcccatgaaggagggcctcatactcggcaacattgtgggacgccgaaaaatgtatccaaagcacgtagctcaatctttctccagttggggaaatcaaaaccactcctgccccagtgcccgaaagtcgtttggatccgtcaaaatgcatggtccagtgctccttgttctccgcgggggtatcctcctggcactcggtccattcggcgacaaaatcaactaacacttgggacttgattgaaattctgggcttgaatgatatgtccaaagacatcaactccaaagcccacttagcaatacgtccgtttgcttcgcgattgtgcagtatgtcaccgagtggaaatgatgtgaccaccgttaccgagtgaccttgaaagtagtgagatagcttcctggtagtaattagaataccatataacagcttctgaacttgagggtacctcgttttggagtcggctaggacctcactgacaaaataaatcggtcgctggactttttggacatggccttcttcctcgcgctcaacgaccaagactgtgctcacaacctgggaggtggctgatacatacagcaacaacggctcctgcgggtgtggtgaggctaggactggtggctcggtgaggagttttttgaaatcttcaaaggccttctgtgcttcgggtccccactggaaatcatctgttttcttcagtagcttgaagaagggcatcccccgctcgccaagtcttgaaacaaatcggctgagcgccgccatgcatccagtcagcttctgaacatctttctgggtacttggcggtttcatgttgaggatagcagtgactttctccgggttggcttggatgcccctatgagacaccataaagccaagcagcttccctgacggtactccgaaggtgcacttttcagggttcaatttcatcctgaaaacacggatgctcgcgaaggtttcttctagatccaagatcaaatcatccttttgcttggtcttgacgactacatcatccacataggcttcaacgttgcggccgatctgcgttgagaagcatctttggatcatacgttgataagttgctcctgcgttttttagtccgaacggcatggtgacatagcaataagctccaaagggcgtgatgaatgaagtcttcaagcagtcggattccttcagtcggatctgatgataccccgagtagcaatccagaaaactgagaagctcacagccggcggttgagtcaactacctggtcaatgcgaggcaacccaaaaggatctttgggacaagacttgttgaggtcggtataatcaacacacatgcgccattgccctgttttcttccgaactagaaccgggttagccagccagtcgggatgaaggacttctttgatgaagcctgccgctaacagcttggttaattcctccttgatcgcgtctttcctgtcttgtgcaaatcggcggagtcgttgtttgataggcgttgcatcttctttgacatgtaaggagtgctcaatcacctctctaggaataccgggcatatcagatggtttccacgcaaagatatctttattgttctgaagaaaggtgatgagcgcgctttcctatttacaatctaactcggcgcctattacagcagttttagtaggatcagagggatctaggggaatcttcttagttttggcttcgctttctccactctttgaaatcttggtagcgggcacttctccttcgctcgccgtggctgcagccagtcggatatcctctcgggcagacgccatctcgcgagtttgggccatgtcgcaactctccttgtcgcatgtgacggcttgcttgatgtcgctccgtagggataggactcctcggggaccaggcatcttcatcatcatgtaagtgtagtgcgggacggccatgaacttggctaacgccgggcgtccgagtatggcatggtaagctgtctcgaaattggcgacttcgaagctgatattctctgtgcgaaagttttcccgagtgccgaaagtgaccgggagggtgatctggccgagtggagttgcggataatcctggaatcactccgtgaaaaggcgcattgcttggttttagctcggagcgagggatctgcatatcatccaaggtcttggcgaagaggatattgagtgcgctgccaccgtcgatgagggttctgcgaagcttgacattacggaccactgggtctagtaccagggggtaccgccccgggtggaccactcggtcaggatgatccgagcggtcaaacttgattgcaatctctgaccatcgaagatattggggcgtgtcgggctgaacagcattgatctcccgttcagtcaacttctgcttccgtttagactcataagccagggggccgccgaagatatggttgagctccttgcggtgatcttgaaaacctgccggggtgtcgccgtcgtctttcttccttgacgtgctttgttcttcgtcggagttcttccgtgcagtcttggtgtattgatccgcgaattgcttgtagacgaaacaatctttggccacgtggttggagttaggatggtgcgggcattgggagttcatgatcttgtcgaacgtgttgacgcgcgaacgctgtcaagaagagtgactggcggttgcaacaagttccgcaggcttacgcttgcgatccttatgattgttacttccacctcctcccgtagccggcgtacccttgttttgcttccaactgggacccgactgctttgatgcggtgacggcgtcttcagctttggcgtactcgttggctttttcaaacatgagcttgactgtcctgggaggcttacgcccaaacttgccgactagttcttcgtggcgaatccctttggtgaacgcggcgatgatgacgtcgtcggtaatgtcggagatcttgttacgttgttcagaaaatcgccggatgtaatctcgaagggattctccggacttctgaatgacgttgtagagatcatattgtgtgccgggacgctcgaaggtgccttggaagttggcgatgaagtggtcgcgtagttcggcccaagatccaattgtaccgcggggcaatccatggagccaagatcgggcggaatccgctaaagccactggtaaatagttcgccatggccttgttatctcctcctgctgcgcggattgcgagaccgtagacggtaagccacgattcggggttagtggtgccgtcatacttctctattccagtcggtttgaagccggctggccaatccactcgacgcaggtcgtcggtgaaggctgctactccgtcaaggtcgtcgtcgtggcggtccggcgagtgatggtagcctcgagctgctcggcgctgtatgattgtgtcgcgaagatcgatggggcggcgacgaggtggtgagcgaggccgttccactcggcgctccctatgaaggtcgggaggtgagtgaacagaccgctcgtcgtgacccctgctcctgcggttggatcctgcgccggtgatgctgaggcttggatgacggtagtcatgagatcggaagtggggaactcggctgccagtcggcgtgtggacgctttcggagttaactgggaccgaggccgcaatcatggtcttcgtctggttcaagatgttgacgacgtggtcggatcgattgagctcgttttggttgaggagggtgtcgagaagggtgatcgcggcaaccgcattctgttgaggggtgcggaaaaccggtgtcccttcgacgtcttgttggccgatgagatcacgcgctcggcgccctgcttccaaagctcgctgacgtcgatcctcagcctccttcgcggtccgctcacggtcctgctgctcacgccgtagccgttcttgttcttgtgcttgatgctcctcctccagtcggtgacgttcttcggtctcccgggcttggcgttgctcctccgtctcattattggccatgaaaacgccaaagtagagaggagtgtagttgtcatctaggcttccgtcgaagtcgtcgaagtcgttgaagtcgttgtagcgagaactaaattcgtcgtactccacgatgtcagtaggacgtgagtcgatggtgggagagctgttgtagtcatccagttgatccgtcgaaaccgtgccgagtggttggaggatgacgccgacttccctgaagctaggcgaaatcggtgttgaagccgacttccgcctaggcctacgggatgaagacgctgtggtagtggagacggccgctaaatcgtcggggagcttcatcaggactggtgggtaagccccatcatcttgatctggtgttgttggagaagatgcgatctcggccgagtggtttgaagccgactcggttgagatggtcttgaagtagctttcagccgcgttcgggaatccgaacgagaccgaaagccggttctctcccgactggtctgattccgagtcgaggagagaaatcttgccgaagttgttggtgacgaagtcgaggctgccgaaccaaaacgtctgcccgggagggaagacgaggtcgtcgatgccggagacggaacccattgcactgatcggcgaaaagcttgacgcaacccctacctggcgcgccaactgtcgaaactagatttcagcaataataaaagggggtggctatcaagctaggaaagtgtatgggtttgaagacaaaaggatttatacaggttcaggccttcttataaaagaagtaataccctactcctgtccggggatgaatccgccgagtgtgttattgattgtatgatttggagaaaatccaacctctgcccctagaggcacccggaccccccttatatatgggaaggagtccgtattacaaaagataatctatatccctaacggaataggaagatacagataaaacacagtcgtgaccgactaagtctcagggtgtttccttgatacacaagttaagaaacaaacccgagatacaaataagatattctatctacattaggtatcctgtacccagtccaaatactatcgccgtgtagatatgggatatccataatctccacaaggctattccccctaaagctcggattaattagtggttaggcctcgcctcctaataaactactgtatgttaagtatgcatgttatactgattaaaaataactttacccggctaactaattaaaatatactagaaccctctatacaacatacttcctccgtttctggacgccgttgactttataagtatatatttgaccgttcgtttattaaaaacttttatgaaatatttaaaactatatgtatacatataagtatatttaacagtaaatcaaatgataggaaaaaattaataattacttaaattttttaaataagacgaacaatcaaacatattaaaaggttatcggtgttaaatatttagaaacgaagggagtatataaacaaatttacatatactatagaaaacaatgtataaatcaattatcaccaaagtcaacccatatactgtaatctgccctctctgtcccccaaaattcttttgttgctgctccgtgtgctaattcataagaccagatgtttgtaccacatgtatcaaggtacgtatctgcgcagaacggtaactttggtacaaatgccaattcgccatcgcgagcaacaaggtcaacgtggacggtctcaggccactggtagaatcttggaaggaatatcatattctgcatccagttaaacttggtcttcttcatcatcgttgttagagacccggtgaacactgtctggctatgcaagctatctaccttctcccactccatgctttgctcgttaagcttgacgagatggaccttcttcccacgtcgttcaatcgctacaaccattaattcaccttggttggactcgagcaagtagctgtcttcacatttgaaaccgaagctattaggcttgtcaagaatcttaaatccttcatggtgcctgcaaggatcataaactgctaaccttccatcttgagctagaaggtatagcaagctgttatggagaactggattggtgcccggcgatgcctgaagttgcgaccagtcgggactgttctccgccaaattccagtcctcccactcgtcactgtttgttcggatggcactagcaacctcaattgtgaacatcgcctctataccaaatagcctctcatcacggtcggagacaacaaaattaaacagcgcataaggtttttgtggcaacacttcaacgaggacgccgctgacgaggtcgatatcaaacaccgaggatttatccacgcgcatcttgaggtgtcgtccggtggagcagcagattttcgcgccaggcaccttcagagtgtcgtcgacctcgaagttcttgtcgtagtaggggctatagtatcggatgttggcggtgccaacctcggcggtgttgagcaggagcggcgtgatccacgccgggtaaaagggacacagcgacgcggcgtagcgccagtgccggcacaccaacgcgacgatcgggtggctcgaccaccgcagactccccagaatcaggacgagcacgtccgccgggagagacgaccagccccgagcctgtgacgacgatgcggcggcggcctccatctagctcgatcgcttgctcgatctcgccggtttaaacccagtactgccggcctgatcaggagagacgacgtgcgtgagcgcggtgtgtcttcgtctgccaatggcgttttcttttttaaacattacagtgttatggagtatatcgtggtgtcccgcgcgcgcgcgggagcttatatatgtacgtagggcgtagtggagcgaaaataccaatcggtttacatgtggagttgcaatgcgatacgagttgtccggggaaaaattaacaaacctacacgtaaacgtacgtacatacgtgtgccgctggccggcacggtatagctctgctgcacgtacggtcggcaatttggaaaggtgattttccttagaaagggatcggattttttttaatagattagcaatagtgcacgtgcgttgcaacgggaaaaacactgtttgataatgtgacaccttgaaaacctcaaatctatattaacaaataggtagaaccgagtctaatttaatgaattagcataggatttaggatttagttttagattttatttttcgagcctacttaggagtttatccgacggagtttaatttaaaatatctgagccatattgtttgatcaaatatactttcggcccaggtcttcccaagccggcccaaacttgggctggcccatcttcggcgagccgagtcagttcgacggcccgcaagctgagcagctgaccgcagcacatatgcggggatggtctgatgcacttccgcggcccattgggcgcagcgtaatctgctgcggcggcggtgacccaacgctgggtaaatctgaaccgtccgatctaatatggacggctctgatcgtccccttgccggatgaagtgccgaccaggagagaggagcaaaaccctagctcccaaatccctctttctcgatcacatttctcttcggcgatgagcgagcggaacgacggcgaaggcggtccggcgagctggtgtgcgcgtgtggtgacgcccgtcgagcagctcctgcttcgccggctgggggacgcaaccgagggcggcacaaagccgtgccacggcgtcggtggtccggctaggcgggcgcgcaaacggcgatgagcgccgagcggcatggagctctcggcgggaggggcgacgccaagccgacgcttcccgtcttcggcaagggatggtggaggggtgctccaggacaacgcatgcacaaggaacccaatgtgactgcgaggaggtgaaggtgcggcggtgccacttcccggaaaactccggtgagctttgggacttcaagtgcggtaagtaacccgaacccttagcttaattgatttggatttttgactcttagggttcttacccgaaattaggtttcttcgaatttggggaattttgtcgggaaatttcaatctattttattccctcttttcgagttatgcgagtttcaatatcgtttatccacttttaattttgggaacttcaatctagtttatccctttgctcaatttattttttttttttttgctttggccggcgtttcatcacgcgggcggggacggagggcgccgctcggtcccgtcgaaaagattgagattaagataagatgatattttcacagacgacggaagtaaattcaatttaattttgggaacttcaatctagtttatccctttgctcaatttctttttttttaactttggccggcgtttcatcgcgcgggcggggacggagggcgccgctcggtcccctcgaaaagattgagattaagataagatgatattttcacagacgacggaagtaaattcaatcgtaagatactattttattcttttttgttttaatttttttaccctgttttggtttcgttattacggatgatggaagcgttttcaatatttaagcagtagagatagagatatataggctgtatttagatccaaaatttggatccaaacttccgtccttttccatcacatcaatctgtcatacacatacaacttttcagtctaatttcaaccaaaatccaaactttgcgctgaactaaacacaaccatagtacaatgtcacatataatagtattcgatttttttaccgcgtcacatataattccttttttttaattggacagaattcatttttttattttttttccgccctttttttaccctgtccacgaaatcggattctttttttttccctttttttcacctgatttttttcgcctgattcctttttatcggacagtcggttttttttttcgccttttttacacaggatcggattcatttttttccccggttttttctcactcgatttttttatgcctggtttttttattttttcgccctttttttaccgcgtccacggaatcagattctttatttttacccgattctttttttctatcggacagattcgattttttatttttttttttgtgttttttacacgggatcggatttatttttttcccggttttttctcacctgattttaatcgcacccggacgaaacggggagaagtgacgatctgaaaaatactaatcttttaattagttaagattaagataagaaaagaaaaggccagtgattttccttgtatttatatgggtagcgtttatgtgcaagctagacatttcgcatggatatataatttgtgttgattataacctgtcacactaatcaacgataaaaattaattgtatttaaaacttttatatttatgtgtttttagcgacgtaaaagctaatgttacaaatctctactacttaaaaaaaatttaaatgattttgtcgtccattctatcatggcaaaaaaaatcggacctgaagaaaaaagagcgaaattaaaataatcggtcctattcctaatcacaaaaggacaaaagatctaataaaaaagataaaaatatgtcccaccacaccttgcgcttgcttcgcttctcccccttccgatctcttttttgcccttattgttttaaaaaataaacaaacaatttaaattactaatcacaaaaagacagtgatctatctatctactactttacttaaaaaaagaagaggtgcttccatcgtccgtcaaaaaaaccgggtgaaaaaaaccggacaaacaaaaaccagtttgtccgataaaaaaaccggtaaagaaatttccttcgtccgtacagagaaaggaaaaatacgcgcgaataaaaaagtgcgtgcaaaaatagtttctgtccgattccaaaataaaaaaaattccaagcgaaaaaagagtttccatcttcctacaaaaggaaagaatagtgcgaaaaaaaaagtttctatccgaagggaaacacgcgcgaataaatacctaattaaaaataaatatctatctctaaaaaaccttctgtcgtaaaaaaagaaaaaaaagaccgactcccgtagagaaaaaaaaagtccgactcgtgaaaaagaggttttctcgtccgtaataaaaaaaaggaaaaatacatctaactcaaaatccgtaaaaagaaaaggaggaaaaaacgacccggccaaacttaaagtcgccttgttgtccgtatatatctctttaactctaatctaatctatcaatctaatctaactttttagagagagaagtttccatcatccgttaaaaaggaaaaaaatgcgcaagaaaaaaataatttccaaaaaaatgcgcgggaaaaatacggtttccttcgtctgaaaaaaacaaaaaaaatgctattaaaaactatcagaaagaaatacaccatttctaaaaaaaatggtttcaaaaaaccacaaaagaaaaaaaactgtttataaaaaaaagccgctctgaaaaaactaaccgatgaaacactgtttataaaataacagataaaaaaacaaaacgactcaacacgcgaaaaaaaccgctgttttaaaataaggttcgagaaaaccgtccgacttaatgcgagaaaaaaaccatcatttcaaaaaaaaaatagaggaaaccatccaactcaatgcgagaaaaaaaaaagccgccgtttataaaaagaaccactccgagaaaccgtccgactcaaagcgagataaaattgatggacgcttgggtcggataagatccatcgatttttttccatctcctacacatcatttcctacacatcatttgttttctcatctaatccctgcactttttgtatacaataatcattatcagactttttttaataacatattatatgaaaatagtattaaaaataaacatatttttaattgttatttagagaagagtgcactgtgactattttgtgtagacttgatcctgagtgtaggatttgattaacctattattggttgcaagaataagattgaaagaatattttagattatatgtatattgttatatgaataatccaattattttagttaaagcaagcattggtaaaaagattgccatcatcgagtttggtcattacataaagatgctctaattttctaattgtgttagctacaacgatccatagaaacattatcattgatatgggtacgcttgaaaaatgtcaattgtcattggattatttttttacccgttgcaatgcacggggcatttttactagtatataataaaagaacgaaaatatgtctcaccacatcccgttcatgctttctttcctcgtgatctcatttttttctttatctttatctttacatacatatttaaaatatttgtagtgtttctattattcgtcactgtctagcgtacatcgacggttttcgtgtttctgcattggcgccctagcagcacgtgcgagcttgattgcttccaaaccaaaattcaccgcttccacgtcgacggtcaatcatcccatgtgtcagaatccaataggctccacacgcatcacatccgatttgccttcccatgccaagcaattttgtgaatctaccatttaaacgatgtcaaaggatcgccaactcgtgaattaggaaataacaaagtcactaatataacaaatatacaatagtaacaagcctcataatccatatgacaagtggacccataataattagaaaatctaaattaataattaattaaagtaggtccattatgcacccgtggattttatatatatatatatatatatatatatatatatatatatatatatatatatatatatatatatatatatatatatatatatatatatatatatatatatatatatatatatatatatatatatatatatatatatatatatatatatatatatatatatatatatatatatatata

SEQ ID NO: 25789 - DNA, 15684 bp, Oryza sativa
atatatatatatatatatatatatatatatatatatatatatagacacacacacatggatttgttctacatgaagttatgaacaaacacccaacctaagaatttgaataatacattttcgaggaagtgcagtgcctggtagcttgaagtggccgttgacggtgacccatacgccgacggaggccatgcaggtggtgtcgggtaggcctacgtgacatttaatatggcggtataaagtgtggaggtactcgcaatgggaggcaaagtggtcggtgtagctaggcattggtgaggcccaacagtggaagcggttcgatgaagatggggaagcgatgtagttgaggagacggtgagagtagaacaggagcccacgctttgatcacacaggcacgatcatcatatgctcaatggatttcttaatcattgtgttgtaccgccaccacaagggaccagcgtgtggggttcaagcttttcactccaagttattcctgtaacgtagtaagggcgaaagcagagttttgtatatccgcctactcgtccaaaaaaaaagtttcaaaaaaccggtgaacatacacaaatagagaaaacaaccatggaaaaaaaagttgaaacacactaaaaaactgaaaacatactatagtagagtggaatggaacgtttaacccctcttactagatcccgttgcaaagcacaatatatttgctagtaaactaaaaatatatcaagtttcaaaaaatctaaatgttggcaagaactgataagatgaagcacagaagatggaggcggaattcctccgtctcaaaaacaaattaattacctgctattgaagcggttgcatgacctagtgcggaaatgcaatttgaggactgtcctaaggctgagtttttttcccaactttcctaactcacctctctcgtttttcacacacacgcttttcaaactgctaaactgtgtgtttttttaaaaaaaatatattcaaaagttgcttttaaaaaatcatattaaactattttttaaaaaggtaaatacttaattaatcaaaagaaaatgtgttgctctgttttacgtgcgcaggaggtgagctcccaactcacctcctgaacacagcctaagttcactgtcacaagtcgtatgaacttaagagggggaaaagaatgtgtgcagtgtcctcttccctatcccctcgaaaaatagtcctcttcctagatatcctaacttttccccgacaaaaaaatatatatcctaatttctacaagggattacaaggttttagcttcagctttgcaaccccattttttcacttattcaatgcatcgggagcccagaaaacagaacacaaaacgtagtactacaattcaagatattttcttcaaacttccaactttaccgtcacatcaaatatttggacacatgcatggagcattaaatgtagacaaaaaaaccaactgtacagtttgtatgtaaattgcgagacaaatcttttgagtctaattacgccatgatttaacaatgtggtgctacagtaaacatttgcaaatgatggattaattaggcttaatagattcgtctcgcagtttacaagcggaatctgtaatttgttttgttattagtctacgtttaatacttcaaatgtgtgtccgtatacttgaaaaaattttagcacaccaactacacacacaaatgtacaaagttcagaatttccatcgatccagttcaacaaaaaaagaaaatcagaactcataaacgccgctgaggtagtagtatgtgtataaaaaggaaaataaagcctgtggaagagatatcggatatagaacctataaatttgggccgtgttcgcatatttaactttttcattatattaaaactttcttatatacacaaattttcaacttttccatcacatcgtttcaatttcaacaaaacttctaattttggcatgaaataatcacagccttgttcatgaaaaaaccacgaccttcctgcagaaaaatcggacatgcagacatacagtaagccaacaaaaaatccaggacaacacgtagaaccaatcggagcatcaaaaagtcagagattcgctgccgttcgaagaaggaaaatttagtccaatcaaattaagaatccacaagcgctgacgcactaacagggggtgtttaaatccagggtgaaaagttttggcgtgtcatattgaatttacggatacacatttaaagtattaaatgtagtctaataattccgtatgtaaagtgcaagacgaatttattaagcctaattaatccgtcattagcaaatgtttactatagtaccacattgtcaaatcataaagcaattaggcttaaaaaattcgcctcgcaaattagttgtaatatgtgcaattagttattttttagcctatatttaatacttcatgtatgtgttcaaacattcgacgtgacaaggtgaaaaattttagggagggatctaaacagggctaggtgaaaaaaaataaaagtggattctctgaactcaagaaagattcctgtagagtactccctccatttctaagtgcttgtttaagccgtgtttagttccaaagtttttcttcaaacctttaacttttccatcacattaaaacttttctacacacacaaaactctaattttttcgtcacatcgttccaatttcaaccaaacttccaatttcggtgttaactaaacatagccttagttcccaactttttcttcaaacttccaacttttccatcacatcaaaacttttctatacacataaacttctaacttttttattcaaactttcaattttagcgtggaactaaacacagcctaaatatttgacaccgttgactttttatcacatgtttgatcgttcgttttatttaaaaaattttgtgaaatatacaaaactatatgtatacatataagtatatttaataatgaatcaaatgataggaaaagaattaataatttcttaaatttttttaacaagacgaacgataaaatatatttaaaaaaatcaacggcattaaaaatattaaatttttagaaacggtgggagtattggtgttggtggctgtatggatgaaaacggatcggatacggacggaaactagctttatcatattcgttttcatatttttttcggaatcggaatcggaatcgaaaactcggatacggaaatgaaatcgaatattatcgaatacagatacggagcgaatacgagacggaacgaatacggtagcggatatttatcggtatataaaaaacccctcaaattgagtttcttgatcaaggaagagatatcgcttattattttagttcaacatctccaacatttatatcgtcaattttgtagacggtcccataaccctatgtgaaaatcgattttcatggctattcctcttacagatacatatgcaaatatgattatcattttctattttcaagaccttttactagatgtataacttacttaccattgtataaattggagaagttatttattttacttcacatcttcaaaacttgtaatgtttgttttatactttaaatgctttcaaatacaaatgttataaactacaaagtggtagatcccgttgagctctacaactttgatatggaacacatctccatcagatgtcgtttgaattgtagatctgagattttgtaaaaattaatatggtatattataatgaatatttagactccttaaatgacctcaaataataaaatagtcaataagaaagttgtagatctcatcgagctctacaatgttgatataaagtttgtcgccatctgattccatatgaaaaagttatgtatatatacatgttttttctaaactttgctcaatgtctgcggatatctgaaaaaaaatccggatagtttttccgaccgttttctgattccgacggatagtacccttactgtattcgttttcgtttccgagaaaaaaaaatccgaattcgtttccgaatccgagaatttccggatagttccgacggaaactatccgaatccgaaaaatggtccggacggacggaaactatccgaaccactttcacccctagctggctgtgcttgctccagatctgcaccatgcgacacagctcccagccgcttgatgccctccttcctgcccacgacagcaaactttgcaactgcgctcatcacatgctccgctcatctacagataaaaaactattcagagatcatcagcacaagatggtttcgtggtgtagttggttatcacgtcagtctaacacactgaaggtctccggttcgaacccgggcgaagccaagttaactttttttttccttctttttatcttcagattcaaatcaaccactgaattcaaactttcgttggaattcaaactttcgttgtttttcctccgaactcactgaattcaaagtaactcactatttttattattttttttatcttcagattcaaatcaaccactgaattcaaactttcgttttttcccccgaactcactgaattcaaagtaactcactatttttcttcttttttctcttcttttttttaatcttcggattcaaatcaaccagtgaattcaaattttctttttttccctccgaactcactgaattcaaagtaactcactaattttcttctttggattcagactagctaactgctgaattcaatcttctgttttttccctccgaattcactgaattcaatgtaactcattattttcttcttcgttctttttatcttcagattcaaatcaaccactgaattcaaactttcgttgtttttcctccgaactcactgaattcaaagtaactcactattattattattatttttatcttcagattcaaatcaaccactgaattcaaactttcgttttttccccgaactcactgaattcaaagtaactcacaatttttcttcttttttctcttcttttttttttaatcttgggattcaaatcaaccagtgaatttaaatttttctttttttccctccgaactcactgaattcaaagtaactcactaattttcttcttcggattcagactagctaactgctgaattcaatcttctgtttttttttccctccgaattcactgaattcaatgtaactcactaattttcttcttcgttcgtttatcttcagactcagctaactactgaattcaatcttctgtttttttccctccgaattcactgaattcaatgtaactcattattttcttcttcggattcaggccccgtttagttcacacaaaatttttacaccccctcagactaaatgaacgacttaattttttttcttcagcaccaaactgcatgacatttttcttccccttctttatcaaattaaatgaataagttcatcttgcaaatacactagaaaaacttactctaggatggacccttttctcggtgccaccatcattagcgttgtcatattggacgacggtgccaatgaagtcaaggacctatttggaagaaatatatttgcattttagtccttttgaaaattatttttaattttttatacaaataggtcattgacaccaatgacattggagtcgccatcttgatcatggcaccaatcacactggcgccgtgaaaaggaaccactcctgaaataagtttttctacgggtctatttgtaaaaaaagttttcaagaatgcccccaaaccatccaaccaaaccaatccggcccatcctctcccacgccaacctgttttgtcctcctaccatacatgtcgaagggtgaactcctcaagcgggggaccgtggggaccccctttctagttcagtccaggggcacggttgtaggtctgagagttgatggagagagaggcagagggggttgggcccctcgagagtgatggaaatgcaagaggtttatacaagttctggccgctatggaagcataataccctactcttgtgtgtgattgatttaggtgggagaataaaagtgcctttcttctctaggattcgcccctctctccactggggcatggacctctttttatatcttaaaaggttaccacaaaggcccaaaactagcttcaagggtaaggaaaatattctttacaggcaattaatgcttgtcttgtcttccgacatgtggagccacgcgcgccttaccgcggcatgggcccatcccatcacgccgagagacacgggcggacattccttcttaattatcgacgacttccggccattcattcccaccgttgggtggggatctctcatacggaccggtgcgagaagaactggtccgagctcaaatgcgaggcaaaaagcccctcattaatggcgattagacggggcggtcgcagaccacctcccctgctagcagtaggtgcgtgcgcagggctccctgactgccgtcacatcggtcatttcggccgcaagtttatactggtcagagaaggaggaggctacgcgagcgtttggaccaaacgatctatactggtcaaaccggcggcataggtacggtcaaacttgcggatcaactccggtcagaccgatcttcatcaaattcgagggtaacttttaattccgctaaaagtttcggttttgggtactacaaccattcacccctctctggttggcttagttcttgctattcgatcctacattaacgatgtgaaaaaaaaaagatttttggaacaagttcagctaccaatttacttattgggttgtatatataatgttagagttttgggtctagggggcctgtgcgggcggagcgcacgcccctgggacagccgtgctgcaagcgccgccgcgggtcgacaggtactggcaaagagcgcgcagctgaggaattgggcatgcatgttgacgtatgtcacgccctgaagttttcccctttttgcttgctttaaaaatttggctaaataaatcgtccgaagaaattatcttaattaacctagagctaattccctaattaataaatgcaaataataatcggaatcggcatgtggaatttttcttggattctacatgtcacaatatattaacaggatttttagtggaattttcagagccttggaaataattttaaccaattaaaaatcaccaaagtgcaattttaatcccaggaaaaatcctttcttctttttctttttcctttttcctccttttttttttcctcttcttgggccgtcggcccagtccatccctctcccgcggtccctcctccttgtgggccggcccaagccgcccctccctcctctctctcgggacgccgacaggtgggccccacctgtcggtcgtctcccacctccggccgctggagccgaagctccaaccgcccatgccgccgccgaatccgccgcgccgccgccttctccgctccacgtcgcgcctccactccgcgcccgcacctcgcgcccacgtcgccgccgattcccccgcatctcccggcccgcgcgcgcgctcgagagggcgggattcgatttcgaatccacctctctcactctctctcctccccacgtcgccggccaaatcggccacctccccggccacgtccgccccctcccgcacctataaatcgctccccgcgtcttcctctctcgtttttcgcactcgccgcgccctcccgtgcttcctatcgtcgccgcgccgctcgccccttgcgccgccgcctaccggcgtcttcggccacgcgccgccgcctctatagccaccgccgtgccgcgcagtcgccgccgtcgcgctcaccgagcccggccgcacctcggcaccattcggttgccgccaatcgtcgccgaagcgccgtttccctcgcacgccggtgagctctccatttccacccaactccggccggctgctctagccgccgtggtcgctctccctacccctaacccctctttgttttctcctagcgtgccgccgccgcccatccgcacctcggcatcgccggtcgtcgccgccgctttcttccttcgcgccggccgtcgtgctcatcggtgaggaatcccctctcccccttcctttttccccctctcccgtgtgcgccgccggccttcgcgcgtgtgccgtcgccttcagccgctgccgccgcctttcggccgtcgccgccgtttcccgcaccgccggtcaccgccgtcggtggccgtgcctcgccgccgcctcgccttggccgccggtcggctttgaggccgagccgagcccggctggcgcctccctctcccgccctgtgccgctgcccagtggggcccacatgccagccgccccctccctctccccttgtgccgctgccagtggggcccgcctgtcggcgcagccgccccaccccttgctgacgtcagccctgggacttattgcgcaataaatacattaaggcttttcttttatagtaataaacacagtttatcttctaaaattcataagtaattcatccgagctccgtttaagtccattcaagtctcagtaaatcaagaaaaatgcaaagaatccattaaaaatggttttgtttcctgtttcagtagtcttatagcctgttttgcttgtgtgctttgtttgtcgcgtaggtttcggccgtttcgtcgatccacggtttctcgaagacgttgctgaggtctcgtcagtgcgagagcaaggcaagtcatgctttacatttgatcatattgtacccaatttacaaatatcccgcatttctattaaatgttgcattcttttacaatgtaatgtgggatgggtcctattcctcagccacatattggttaccctatgccattgataacctgggtatcaaaatgattagatgttggtttaggaaatgcttagccatgcttagttcaactagtacacaaaaagggatcacattattacttagactttgtctattggcatagctttaggttggtgccaccgcaatggtgttagttaattaaaatacactgaatggtgggctgtgggtgcatggttttgctggtcgcacccatggcagttaaggaccggttcacgggaaaccctgggagacttaccgtgcttaccacaagcgggagtgggtaactgcttgatctgaagtatagctcgaccctttcctaggcaccggtggcgagggtgggcgtgatggagttgggtcggccggggtgtccggttgtccagctgccggattcaccgcggcgcaagaggggaccgcccactgccttttgaggggtgggggtgaaaccttagcgtggtgtggatggttaggggagggttatgtggagggtcttgtcacgatttccccctttgcagtatcatggtgatacttcggggcatggcgacatgtgtggaatcgtgtcttgtgggtacagttgtacacctctggccagagtaaaactattcgaatagccgtgcccgcggttatgggcgatcaaccagattcaccgtgattagtctcacccctagtttagcttaatgaactggtgtagttcaggaggttggttgggcctgttgcaacgtggtgtagcgttggacagtgtttggttaatattgattaattactacagttgttttactgctttcaactactgctttgaaatgcctgctttatgcaaaagaacccctagcttcctttggttatatcctgcatcatacctcctcttccggtatgacttgctgagtacagtgggtagtactcagtcttgctctcttttcccccacaccagagctgaagatcttcctagttggagctgttttatcgaagttggtttcgtcgctgccgtcaaggtttgcctgtggagtggagacacccgctgctgaagtcaagcttcccggtttagctcgcttttatcttttccgctgcatttgtaatcttttctattttttttataagacgtggatctgtatgtcaacaattgtcgtttgtgtaccctggctggtcctggacagggatttaatgcacattcagcttagaaattctggttcgagaatttctgggcgtgacaagttggtatcagagccgaccttgaccgtaggacaagccaactggaaacctaagagccctctgaacccctttttcatctgcatatgcctttttgcacttggaatttgttttgggaaaatttggagttttgcctctttggtttgcgggaaaaatcttggtcgttcattcggatcggattttttttttttttttaaaaaaaaaaatgagctcagcctagggctttagaaaaattttagttggagtttattcgacagtcagtcgggaatttattgggggttatgcattaggtcgtgtctatattcggtgggggcaatgttatgcgcatcattttccatgcaactagtctatgcattaatttattgtttagttgcattagtgtctttatttgagttcatgaaaaatattctatgcataaaaatcatcatgctcggttatttatttgagtcttcttttgctttgtttaatttggatttgagcatgagttggttcctatcccttgtctactttagatgtcagtcctatccctcgtttgcaagcgccgcctcgagcttcagagtcgccgcccttagctttatcgccttcttagtctgtttgcttgctagttttcgtgtttaggtttgttgcttgtgggttagtcggcggtcgatatcatgtgtcagtggtatgactgcctcaattaggagttgcgtgcctctttttcagtgttttaatcaagattaagataattgcacttaaattcataagcaagattagtttctgagccccctgtttttcttccttttctcatatttccacctatcccctcagatggagataaggaatggttcacgcgactccaacaacgccagtggcagcgaagagccgatcaatggagcacgtgccaacggtgcatctgacaacagtccgtccccaccgcccgagaacccaacaattgctcaggtgttgaacaatcagactcagatgatgacaatgatgatgcaacagatgcagcaacagtaccatcaggtgttgcagcaggtgcagcagcaagcacagccgcagcagcagaacctgcaatttggtcctccgcctcctcagtccaaattgttagaatttcttcgtgtcaagccgcccaccttctcaagcaccaccaacccaatcgaggcccacgactggcttcatgccattgagaagaagctgaatcttttgcaatgcaacgagcaagagaaggttgcttttgctacacaccagctgcaaggtcccgcttctgtttggtgggacaactacatggtgacccgtccaactggggcagaggttacttggacagagtttcgtcatagtttcaataaagcacaggttcccgagggaattgtggcacaaaagaagagagagttccgttccctgcaacaaggaaccagaacagttatagagtatttgcatgagttcaaccgcctcgcgcgctacgcccctgaggacgtgcgtaccgatgccgagaggcaggagaagtttttgtctggtcttgatgatgaattgactaaccagttgatctctagagattatgaggactttgagaagctggtggataaggctatccgtcaggaggagcactgtaacaaaataaaccgtaagaggaaggcagctcagttcaggactccccaggggaagagtcagaagcctcgtttcacgatgggacatcacggtggaccttccaccatgattatccggcagcaccgtccctaccacccgggtaacttcaacaagaaccaccatagtgacagtcacaacaatagtgagcagcacagcctcaaccctactccgagttcactaaagattccagcccaatcagttcagccagctctgccagaacagcccaagaggttgggagaaaaacccgaactctgcttcaattgtaacaaacccggacacacggttggaaagtgcccgaagccaagacgtgccggacccaagttcgttcaggcccgtgttaatcatgcatctgcagaggaggcgcagtcagcaccagaggttatattgggcacattccccgtcaactcgacaccggcagtaatattgtttgattctggtgcaacccattccttcatttccaagcgttttgctggtgcacatgggttatctttagtgaagcttaagataccaatgcgggttcatactcctggaggtggcatgaccacaactcactactgcccatctgtgacagttgaaattcaagggttgatttttccagccaacctcattcttctcgaatccaaggacctagatgtcatacttggaatggattggttggcaaggcacagaggagtgattgattgcgccagccgcaccatcaagttgaccaatgcaaaaggagaggtggtaatcttccagtctccagtgccgcagaagccagggattagtttgaaccaggctgctggtgaagaacaagaggtagcagtggagaaaaccactaagaagctggaggatattcccatagtcagagagtatccagaggtttttccggatgatctgacaacaatgccaccaaaaagggatatcgagttccggattgacttggtacctggaactgcaccaatccacaagaggccttacagaatgggagccaacgagttggcggaagtcaagaagcaagttgatgaacagttacagaagggatacatccgcccgagcacgtcgccttggggtgctccggttatctttgtggagaagaaagacaaaaccaagaggatgtgcgttgactaccgcgcactcaatgaggtcaccatcaagaacaagtatcctttgccaaggattgatgatctgtttgatcagttgaaaggagctacggtgttctctaagatagacctgcgatcaggttatcaccagttgaggatccgcgaagaggatattccaaagacagcattcatcactcggtacgggttgttcgaatgcacagttatgtctttcggactcactaatgcacctgccttcttcatgaatttgatgaacaaggtgtttatggaatttctagacaagtttgtcgtggttttcatcgatgacatactaatctactccaagtccgaggaagaacatgagcagcatcttcggctggtacttgaaaagttaaaagagcaccagctatatgccaagatcagcaagtgcgacttctggcttaaggaagttcagtttctcggtcacatcgtgaatgctcaaggagtagctgtggatccagcaaatgtggagtcagttaccaaatggaccccaccaaggacagtcactcaggttcggagtttcttaggacttgcgggttattaccgccggttcattgagaacttctctaaaattgctaagccaatgacacagctattgaagaaggaagaaaagtttatctggtctgctgaatgcaataggagttttgaagaactcaaacgacggttggtgtctgcaccggtcttaatcctgcctgatcagacgaaagatttccaggtctattgtgatgcatctcgccaggggctaggatgtgtgttgatgcaggatggcaaagtggtttcttatgcttcacggcagttgcgtcctcatgaaggcaactacccgacgcatgatctggaattggccgcagttgttcatgctttaaagatttggcggcactatctcatcggtaaccgttgtgaggtatatacagatcacaaaagtctaaagtacatctttacccaacctgatctgaatctccgacagcgaagatggttggagctaattaaagattatgatatgggaatacactatcatcccggcaaggctaatgtggtagcagatgccttgagcaggaagagttactgcaacgtcgcatgggtagaggaactatgcggtgaggttcaacgtgatttggaacatttgaaccttggtatagttgagcacggattcgtggctgccctagaggcacagcccacactggtggagcaggttcgcatagctcaagcaagtgatcctgaaatagcagagctcaaaaagaacatgagggttggaaaagcccgaggttttgttgaggacgaacaaggaacaatctggatgggagaaagattgtgtgtacccgaaaacaaggaattaaaagacctgatactaaccgaggctcatcaaactcagtattccattcatcccggtagtactaagatgtaccaagacctcaaagagaagttttggtgggtcagcatgagaagggaaatagctgaattcgtagcactctgtgacgtctgtcaacgagtaaaggcagaacaccaaaggccagcaggtttgctacagccacttcagattccagaatggaagtgggaagaaatcggaatggatttcgtcaccggtttgcccaggacgtcatcggggcatgattctatttgggtagtcgttgaccgactcaccaaagtggctcacttcattccggtgcacactacctactcaggaaagaaattagcagaactctatctagcaagaatcatgtgtttacatggtgtacctaagaagatcgtgtctgatcgaggaagccaattcacttcaaagttctggcagaaattacaagaagaattgggaacccggttgaatttcagcactgcttaccatccacaaacagacggccagaccgagcgggtcaaccaaatactagaggatatgttgagagcctgtgcgcttgactttggtggagcatgggacaaaagcttgccgtatgctgagttctcgtacaacaacagttaccaagctagtctgcagatggcaccattcgaagcactgtatggacggaggtgtcgtactccgctcttctgggatcagacaggggaacgccagttgtttggtacagaagttttaaatgaggcagaagagaaagtcagagctgttagggaaagattgagaatcgcgcagtctcggcagaaaagctatgcagacaaccgccgaagggagctcgctttcgaaacaggggattatgtgtatctccgtgtcactccgctcaggggagtacatcgcttccaaaccaaaggaaagttggcaccacgctttgtgggaccatatcgggttttggaacgtagaggtgaagttgcttaccagctcgagcttccctccaacatgcttggcatccataatgtgttccacgtctctcagttgaagaaatgtttgagagttcctgaggaacaggcaagtccggatcacatcgaaattcaggaagatctgacgtatgtggagaagccgactcgtatcctcgaaaccagcgagagaaggaccagaaacaaagtaataagattctgcaaggttcagtggagccaccactcagaggaagaggccacttgggaaagagaagatgagttgaaggccacccacccgcacctcttcgccagctcttccgaatctcggggtcgagattccgtttaaggggggtaggtttgtcacgccctgaagttttcccctttttgcttgctttaaaaatttggctaaataaatcgtccgaagaaattatcttaattaacctagagctaattccctaattaataaatgcaaataataatcggaatcggcatgtggaatttttcttggattctacatgtcacaatatattaacaggatttttagtggaattttcagagccttggaaataattttaaccaattaaaaatcaccaaagtgcaattttaatcccaggaaaaatcctttcttctttttcttttcccttttccctcctttttttttcctcttcttgggccgtcggcccagtccatacctctcccgggtccctcctccttgtgg

SEQ ID NO: 25790 - DNA, 8656 bp, Oryza sativa
cctgtggagtgaagacacccgctgctgaagtcaagcttcccggtttagctcgcttttatcttttccgcggcatttgtaatcttttctattttttttataagacgtggatctgtatgtcaacaattgtcgtttgtgtaccctggctggtcctggacagggatttaatgcacattcagcttagaaattctggttcgagaatttctgggcgtgacaacgtaggaaacaaatggaagtgagggcggtggcctgagctaggaaaggaggaattctatgcagaggccagaggacaatggggaagcgccggagcatttgcgtaggacatggaagcggcgacagacggcggagcgagcgtccatggctgagatcgggacggtgcgcgaagggttgtatgcaggtggccaggctggcgagaagctgaccagcaagacgaccaggttggtggattcaatttctgcacaaccaggttggcactcctgaagtcagagcttggaccggaagtgaggaattcttttggtctaaacaattatgtactccctccgtccaaaaaaaaaaggcaaaccctgggtttgcgtgtccaactttgactgtccgtcttatatgaattttttttaaaatttgtattttcattgttgttagatgataaaacatgattaatattttatgcgtgacttgtctttttaatttttttcataattttttcaaataagacggacggtcaaacgttgggcacggaaaccagggtttgtcttttttggatggacggagtattcgataatgctgttggccagtcgcccggcgcgggcggagctggatcgggcgctcccccgccggaaatgctactgggcgagcgatcactcgcccgcccagagcgatcggttccctccccctccccctccccctccctctctccacctggtttccttttttggcaccgcattactttcctattttagtaaatttatatacctaaagtttatacaccaagtttacacatctaaagtttagagaccaaaagtttataagtcaaaagtttatatatctgattcaaatttgaatttgaattcaaatactttttatatatagtatttctatacatctaaagtttatacacctaaagtttatagacctaaagtttatatatccgattcaaatttgaatttggattatgtccgattcaaatttgaatttgaattcaaatatttttcatatatagtatttctatacatctaaagtttatgcacctaaagtttatagacctaaagtttatatacccgatttcaaatttgaatttgaattatacccgatttaaaatttgaatttgaattatatctgattcaaatttgaatttgaattcaaatttccgatttaaatttgaatttaaatttaaatatttttcatatatagtatttctataggcctaaagtttatagacaagtttatagatccaaagtttataagtcaaaagtttacgtacccgattcaaatttgaatttgaattcaaattttttgtacataaattttttctaacgttttgtttttttaaaatttttgtgtggtgtactgtaataggaaaaaaaaaaggggaggaggaaggggagaaatgaggggcgggaccgatcgctggatcgcgatcgcccatcagacgtccccgcatcaacatgcagaaccactgagccacacatgcacatgcatgggcacgcatacatacatgcatatatactgctcacatgtaaacacacgtatctgcatgctacagtacctcacccatctgtagcaccatatactcttctcgaatttcttccaatctccttcgcagacaccgaaacttgcacacacacctcgtgaaacccgttgcgaagatctctcccacacgatgtccatccatcatgtgtcatgtgccatgtgccatctcgtacctaatttcgtcatctggtatccttgatcgtctagacctcaactcctccctgagtcgactagtcccgatccccaccgttgaccgaagttgacctcgaagaatcctaactctagtcaccttctcacatggtatcctaaccacattagacctctgcttctccctgagcattgtcccgatcctcacaattgaccaaggcggacctcaagccaactgcacataatcagacagaacaatcgtttctgggtacagatatcacaacctaacccacatgaatcacacgcattcacaccaacattcacacatactataaaaccaattctttggttaaataatttgcatagcgaattgttcatcacaaatattaatcataacttacagtaatagaggtattcctcataaaaaacaattatttttttattggaaaacagtatgggaggcccctacaatatattaattttctttaaatttaaatagttcatgtacggctgcaaaagattatgaaagaaaatttttttttactaatagttccaatacttaaaattaattataagaaatttcatacatatattctccaatctattttttccattacttattattattttcttaatttaataaaaaatatgaaaatgaaaaaaaataaagtgatttaaagaacttatcagtccaagatataccgttaaaacattatcttaagaaaaggataacatatgtacaacatgaaggattcaagatggaggcatcacaatctcaagtgcaatgttatctggtagatcttcccctggattgtgtatggtggtagttcctcgttccatgttataaacatataatcccttatctttaggtcttacaaagtaaatgcagttcctcttcaatccaacatcttctgcattgagtgatgctccaaagccagtacagtcaaccaaaaatgccttgttatcaattgtgctaactttcatccaaattctttgagataaattgagtttatgaacttcaatttgcataaccttatcaacacattcaattggatgtttaaatgacaacgtgaacaactctccacctgattctaacaagaaacaagtagaaaacgtgcaccaataacttggatctggtgcatccttaactggcgtagttgtaaatgttggctttggcaggaattcaagtgtcaaaattgccttatcctgatttaaatatgcatggaatctccccccaacagccgtaaggtgtttcacagttgcaataacattttctctgtcctctcctgtactaatcatacttgattggtactcatgcctgaaccatacgtctcctttaggatggcaataccagaacattgtgtccctgcaatttactactagcacgatacagtttggatcagaaggtttatgtgatagaaagcacttgaccacattattattcgcaagaaaattgtcttcatcgaagggtaggttgatcttttgatttgtgatgggactccataggaaaatttcatacaattcaaggtgcaccataagcaaccagccttgtgctgttatccaatataagtggatgccgaattcatccactcttttggatagcaattctcttttagctatactgtagaagaaaagagtgtcatcttcctcctgatcatcgctgtcatcactttcctccgttccagcatcatcgcttccatcataatctctttcgcacgtgtgattgtcatcttcatccccaaggtcacaatcatccttatcgttatcaacgatatcctcatcatgtgaattttcatccccgtgatctaattcttcctcttcatcatctatgggacaatattcatcatcggtgttgcccttgtcgtctgtatcaataatgcggtaagcaaccaacagtagcaccggggcaagcttaggatctagaagagctagatgttcttggtcttccttacaactgtctatactgtgggatagcattttttttccctgtgacagtgctgcagaaatttattgaaaggttagactgctttgtttttctttttttaaaaaaaaaaagaacgagctaccatgagccaagtgtgctaatatcattgaataaataagagggttagacaacatgctcttactaacaaaaaaaaggttgaattgtattttaaaaggaaaataaacaatttaaggattcttattgtttttattttttctttttccgtcaggacagcaaagacacactggccagattttattaaaaacaacacgtaggtacaaacgcaataaacatagaatgaatttactgagtaaaaataacatccaattaaacacataaaagaccaaaccaaactacgggccccttagaaaaagattattcgcctgattactaccgtggattatctatttgattagaaaaaaaatggattatctatttgattagaaaaaataaattaaatattttaagaaataaattaataagtactctgtagcttaataccaatgataaaataatgtagtaaaagaaatctctaataaatatttaatttattggctaactaactgcatattctcttcgttttaaaataaataaatctataattttaatatgagatatgacagcatagtagggatgtcttgtatggtttattttggaaagggatagagtaagggtgtgtttagttcacgttaaaattgaaagtttgattgaaattggaacgatacgatggaaaagttaaaagtttgtgtatagaaaaattttgatgtaatagaaaagtttaaagaaaaaattcgaaactaaactcggcccaagtaacgatattacttagtatgaagtagtcggatgtttgatgccatacctttacgcgtcgacagcagctagccagtggcctagtgcttcgcgctgcctcgccgatacacttcgcgctgccctgtgtctatttattggaactcctcgtcgtcgtgggctgaactggattcaccaagcggatgagaattggatatggaatcggacggatagttggtgtatacacgttttcggctatgatgcgctgatagggcaagctaggtgcgtgtctgtgtctgacacggatccagtgtcccgtacgtatctacgaggatacgttaggtaaaactccaactcttaaatttagcttcacagattagggatcagtttagcacagctccatctctagctccaactctggagcttgagtttaaccaaacagatttaactccacctaaaagaggagtggatgtggtttaatttgcatgtgagacgagaggagccccgtgtcacttaggggcaggggcgacacgggcggcgaccaccaccgcctcctcctcacccccgccttactccctcctccgcttcgttgtcgcccaagcagacgccggaaaacgcacggctacaaggacggggcggggccttccaactccctcgaggtcgcggggtcagtgctcatgaccccggccagatcaaggcagcgacggtgtggctgcgtcgagtcgtcggggtgtcgggcagggcgagcggaggcgggctaggtgcgggggtggcgacggtgccagactttgtgtccctcgccagatccgggccccactcggtctggccaccctctcgcggacaacggcgacaaccaaaggtggaggcaaggaaggtagatggcaggcgccgaggaagagagcagcggcgacgacgaggccagatccacggcgggctctgccagatttggagccggcgaaggtggaggaaggggaggatgaggtggcaggcggcgagggcgcaggagaggtggcggtggggcggcggctactgcaatgggcgcagccagagcctgccagagctagcgcccctcggacgtagtagggggcatgaggtggcgctgaaggcgccgtcgcgacatggcggtcatggcctcaagcgcgcggcgacatccatcacagttggcgacatgcaggggagttttctaggcgctggcgtcggcttgtgctccactggtggcaaggcatcctcttcttcatgcagctcctcctcctatggccagctcagatgtggtcgcggagagatccatggggaggatggaggcggtgccttgcagaggggagtggcttgacggcgttcaaagcgacgttgttactctgccggaactgtgggcgatggcctaggcctaatcgctgaagagactatgtagtagaccggcgacgatccttcttgtgcggattggttgtgtgggtttggacgggtaatcgctggcgaaagcctcgccgggacgttggccagctgacgatggcaatgccttttggcgtcgctcccctcttggaggcgtcgttatggcattgacccctctcatttccttacccaggggcggatctacagtatagtcattggtgtcaggcgacaccgatgactttcggcaaaacctatagcaaaactacttatccatatattatatcatcatattctaagcataattaacatactatgacactgatagacacgttatgataccaattaaacgattttctagatccgccactgtccttaccgctctctgggtgaaaaccttactccagcttccgacgagccgtggcggcaatctatgtcatgtccagcttgggggcatcgctttgtagagacttcttcgtgcaaggatatcgttgatggtctatgcattggcttcgaagcttttaaatcctaggttttgacgaggccttcgctttctggtcccaccttttgttttgcggtgggcgaccttcgctctttgtttgattttgctaggtggagtcagagctggttcgtcggggtgacaaagctgggcaacgatgacatgctacattctctttctaggggtgttgttgttggctgtgaatagaatgtggcgcttacgcggctttggctgaagttcatcgtggaaagtcgaagccacttgatcattttggcagcgagcttggtttggatgatgcatctggtttgaagtcggtgctactctgtcgcttggcagcaagctcggcaacaatgacacggttgcaaagtcagaacccctatgtcttttcggtcaagcttggtaactataccctaagttgggctccgttagtggtttcagttgttagtgagttatggcatgtgctgtgtagttattcagccagccggtggttgttttttttttcttttcttgtaacccatctagggttttactcctgcttattgaaaatataattgacagttctcctgctggtttagtttaaaaaaaaggagtggagctgagtaaagcgctctcacaaaataaactagagaggtagagttgggtttagatagctcaacaactccactccagactcaactcctggagataaatttaggagttagagctttaccaaacagtccctaggtctggagtatagttatggagcagcctaaacccaaaaccacctctctagttcgttttgtgatagcgctcccccagttccactctcattttagatggaactgaaactgtttggtagaatttcaagagctcgagctgtgctaaacatacccttattttcatgattatcacatctatatctactaaagaatccataattttctgatcgtactaatacgcttcgatccgtcatggtgcggcttcacccgtcatgcatgttgcgcccgtcgccccctaataccggtcgttcctttgcgtcatcagaatcagagaaagggaaaaatcataacaacagaatgctcataagaatccaatcttaaaaaagcactttccaaaataggtgttttacagcttttatccaaccaaatcggatacataacaccacaagggaaaaacaagaaccaaagctaaaaagctaaccaaaagttccctaagaaaacccaatctttgttatacctccatccacatgagaggcatcatcgacgtcacatcatctaccagccactgaacccctgttctcatcacccttcctctgctcccatcaccactagatgtagaggtacttgtggaggcagcgacaacgatcatcggacccctggtagggcataggcaagcatagagatgactggcgaggagacgatatcaggatggaggaggaggagggggaggaggtggtggagggcgtaggggcgggacggaaccgtgcaagaggaggcagtggatcaaggtgggtcggcggcgctacacggaacagaggagaaagtgttgcgccgtgtggagtgggggagatgcgtcggcatagatgtagtgggtggaacccttagggttagttttagttgggctgccagagctgctttgttttgttttttttttgttacaaataggtccactttacatcccttaaaattcataattttccaatcgtactaatacgctttcgtccatcacaatgcgccttcacccgtcgcacgtgttgcacccgtcgcccctaatcctggtagttccttcgtatcatcagaatcggataaagggaaaaaatcataacaacagaatcctcataagaacccaatcttacataagcactttccaaaataaatgtttcatagcttccatacaaccaaatcgaatgcataacaccacaaggaaaagacaagaaccgaagctaaaatgcaaatccaaaaattccttaaaaaaaatctttgttatacctcaagccacatgagatgcatcatcgtcatcacatcatcagctaccagccgctgaaaccctggctcccttcctcccgtgccatcaccactagatgtagaggtacttgtggaggcagcgacaatgagcgtcggaacccttgtagggca

SEQ ID NO: 25791 - DNA, 7043 bp, Oryza sativa
ggtgtgggtggaaccctaagtgttggttttagttgagctgattgggcctattgggtaaaatttgctttgttttgtttttttgttacgaatatgtccactttacatcccttatctttctgtcgggtttaaattgtatccctgaactacaacaccaaaaatcttgaaaccccccccagaaaaaaaaaacttagaaaactagtttaaattagatctcctggtagtatgaagttggtttcactaatgtggcatcccggtccggtaaagtatgaagaaaataaaaaaaaacataggaggagtagctaatcaatcatattacctttttttttctaaaagaattatcgaaataaacctattcaactatctaattgttcatgttataagattaagaacctatccctttttcatttgatttttgacctatgtaccttatatttgagctcattgagttgcatatttttaattcattttaagcattttatcatgggatttgagctaatctagttgttgagttagcttcatgattttttttcatgacttttgatgatgcagtcccatccaccacgaaatattttttgcagagcatcctactttgaattgaagcggttatagtaattttctttccttgctttactgttatgtcatgaaaggtagatccgacacctacgtttggattgatttctttgtaagttatgagttgtaactgcagatttttttttccctaagagtaaattttacaaaactaagggtattttgatcataatatcataaaactatatatttaagacattatattacaaaactacagatttagcactaaatttatcacaaaattacagatttaaggttaagtatcataaaactatatgtttaatactaaagttatcacaaaattacatattttaaagtttaaatctctagcactattgttagttttgtgactaaatttgttctaaatcgttttatgataattttgttactaactatgtagttttgtgacaccctattttaaatgtctagttttgtaatacatcgagttaaatatgtagttttacgatagtttgatcatgatatctgtagttttatgaaatttactcttttcttaaagtgaagttaatcatctcataaaatttgagtattcccgttgtaacgcacagcactaatttgctattaaataagacaaacagttttactatatttttgtcgccagatttatggctccatatatagcagtcagttttatggccattggattcgctataagattcgtgtccagttaaatccgttgcctgtgctcataccaccgctgctcgctgcttgctgcttgctgtgtttacacttttacacttcatgtttcacacttgcatgtttgcgtctggcgtctgccgcggtccgcgggctgtatacagtttcgcacggatggaattacagattttacagtatgtacctggtgtttacagtgtagttacattatacatgtagtataattacactgcacttacatatgtaatttttctatatttgaatgtaaattttgtgtttgttagttctctaaaatggatttttttttgtattttgactaaattaagttatgccacaacttattaataattaatattttactactccatgtggttcttgtcttaatcatatagggttttaatctcataggctgaaatccgatggtttttggctaaaaaatgtgttgcatgaagtttaggcacacccaacagattcagactatatatatacatatataaagactcgtaataatgcacgtggaaggcatgttttttacaatttatatttaaaaagtaaaaatatgaaaaaaaaatacagtacttgcaagggcatattcatacattgacttgagaaacatggcaagggtatgtccacacagtaaattcagatacattccatgtaattctgaaaaagaaaaagatatattccatgttcaaccttaaatggtaataggagtatattgtttacacacattgtaagggccaaggtcaaacactaaacccacacaaacctttacatcgacttgtgaatatttcgggatcgtagcgatcgtagaatcaggatactaatatttcgtaggatcatataaaaatgaatagtaagatcatgatactataaaaattaagatattagatgagatcggtatcgttttgatttgataggatcgtaatattataataagatactagagtacaaaccggtacactgataaccttgagcgcgacaagcaaaggaggtgaaagaatgcaccacaactccggcctcctgtcctcccttacccccacggaccacgcatgcagcagcgcgcggcagcgatggtgatactacgtgttgcttagaaagggatcctctgactcaactgcctgacatgtgggccatagaaaagtgagacccacatgtcagtgactcaactgcatgtgcagttaagtcagaggatctgcttccgtgttgcttctatgcttcctcgatcgatctccagctccccctatctggcgccaggtaccgcgcctccatgctgccgaagacgtcgatcgatgcaggggagctgatccgtcgccgaccaccgcggggaggccggatccgtcgcctgccgccgcggggacgacggcggcaggtttcaggcaaggcggcaacgacgacgacaacggtggtgacggcggcgggcttcgggcaaggcggcggcgacgacgacggtggtgatggcgtttttgctttttttttttttattttttttcccgtgcgtatgcgtcactcgcatgcgaaaatcgggatcttcgcagacacctcattccagatgggtgaaagatccgcccgcaaaaaccgattccagccgcacgggaaaatcgctgttgtactcgtgacagtcatgtagtatatggagatcaaagagcactatggctgtgccagattatttgaaaacatggacactcggctcaagctagacatttgcacgatttcccacgatttcattatgtaacacggaaatgaaacgaggattattcttaaccagtcgttatcaccttatttcatatacataatactttgcacctcactttgttttaaaagaaaagttttgttattaatagttccaaagctcaaaattaattgtaaaaaagttatacacgttgtccaatctaatactacctccgttattatcagatgaacccgttaatgtttagcataacatttaatcagccatcttatttaaaaatttagtgtaaatatgtaaaaatgtagatcacgtttagtttcttcaataataatgaaaaaagtttaaaaaaagatgacacttacttttttttaataagacgaattgtcaaacacaattaaacagttaacaatgtcatctgttaaaaagggagtacttttctatcacttattattctcttataatttataataaaagaaaaaaatatattctcttataatttataataaaagaaaaaataacaaagggaaatgtatattcaataatttaaacaaccaacattcaagatgtatcattagaacattattaaacaaaacaaggggaaacatatgtccagcgtgaacgattcaaaatggaggcaccacgatctgaagtgtcatgttatccggtaggtctgcccctggattatgcattacagtagttcctcgttccatgtcataaacatacaaacccttatcattaggtctcacaaaataaatgcagtttctcttcaatccaacatcttctgcagtgagcgatgatccaaagccaatacactcaaccaaaaatgccttgttaccaattgtgttaactttcacccaaattcttctagataaatcgagtttatgaacttcaatctgcacaaccttctgagcacataccactggatgtttaaatgataacatgaacaactctccacaagattctaacaagcaattagtaaaagtggtgtaccaataaattggatctgatgcatccttaactggcgtagttgtaaatgttggatttggcaagaactcaagtgtcacaattgccttctccttacttaaatatgtgcaaaacctccctccaactgcagtgagatctttcattgttagaatgacgtttctacggttttcatgagtagtgatcatacttgactggtactcatgcttgaaccatgtgtgcccttgaggatagcaataccaaaatgatgtgttcctacaatttaccactagcacaacacaatttggataagtgggtttatgtgatagcaaacaaacgacctcattatttgtaaggaaactatcttcatccaagggtagattgatcctttgatctgtgaaaggactccataagaatgtttcatgtgattcaaggtgtaccataagcaaccagccctgtggtgttctccagtatgagtggcaattgaatatatcacctcttttgcataatagttcttttctggctatactgtagaagaatatggtgacatcttcctcttggtcatcggtgtcgtcactttcctctgtcccagcatcctcattgttttcattataatctcctttacaaatgtcatttgccgcctctccaagtttatcatcatccttatcgttgtcactaatatcctcgtcaaatgaattatcatcctcgtgatctaactcttcatcttcatcttctatggagtagtcttcatcctcggagttgacctcatcgtgtgtatcatctaagttgtaatcaacaaatagtagcaccggggcaaacttaggatcaagaagagttgaatattcttggcctttcttattggtctccgtactgtgagctagcatgttttctgtgacaatagcataaaaattgaaaggttagagtgagaaggttgaatttatattccaaaaggtattaagagtattgtgttactgttgtttttcttttctcacaggaccaacaaagaaacagtggccaggttttattagggaagaaacgaagattttacacacaataaacaccaacgatattgctgagcaaattaaaggacaaataaccgaacacggaaaaggccaaacagattacgtgaatatacactagctacatcactgtccgagagaacatcaacaacaaatcacccacgccacgtttctttttttgtttgtttgtttttctgaaagtagaaaagacggacataattatgtttccacaaatatgtcaaaggctctcacgctaaataagtacgaagtagctaatctcctcgaaaaaaactacagtagctaattcattaatactcctatatgatataatacgaaattataaagtatagtaggttatagaggtttggtgccatgtaccttcttcacgcgtgttaactgcagactcgtactttgcttgatcgatcgatcgcgttgcctcgccgccttagtcgcctatatatctattctatttattgggaagacttctggtcgtggtggcgcgctgcgaatcagattagaactcgagtaagcaatatgatatttccttctccgatgccaattagattagaactcaagtaagcaatctgatatttccttcttgaactacatttacgttataacggacagcctagacggaatacgataggaaataatgtgaaagatctgttatagattttgagccgtgtgcgatcttaacaaagatggattagattacacccgtatgaaatacgtacaagaacatataagtcatggcataagtatatatcttgttgaaatacacaaaacaaaattaaattctgtaaaaaaaactagaaaaagaatttacattcaaacatactatgtaagtcacacggtaattacaattacaatgtaattaccatataataactatgtaacttctgtatttgccgccattgttttatgcttctctatcttctcatggaacctaagagcatggccaagagaggcccaaaactctatcccaaaattctggttttgggatttgtaatcgggctttgaggtgttgagtatattgctcgcttcaaaagatgccttaaatttctcaaatgaaaaggtgggggccaccggttaatccatccacataaatctcggttgtttctccccttcccatctgatcgctcctctccacgatcgttcacgccccgcgatgagcgcgcaggaggccaattgggagtgagacttcttccatacctatatatggagagcgataaacccagtgaagggaatcctgattttcggtttcatgtttagggccaccgttcgatctatttttttcaacaaaattcctaaatattttgtgtgtctgtgtgtgaaacaaagacgagagtacttcctccgtttcacaatgtaagtcattctaacatttcccacatttatattggtgttaatgaatctagacatatatatctatctagattcattaacattaatatgaatgtgggaaatgctagaatgacttacattgtgaaacggaggaagtagtagatatttttatttagagggatttattcactaggtaaagtcctaattatacccctgaactattgagtgagtacgaagtaccccgaaaatcagatatcttttaccctcaactatcaataccggattgaaccccctcctcaaagcagctttgcaagtggtttcggtactacgtggcagtctagtcagcaattcttttattaaaaaccaatgaggctcacctatcggatctctctcctccctatctcttaatctctttcccctctcatacatttctttctcgcgcgcgtcagatgccgaagaggaggcgcgccagcaactacaagtgtctcgcggtggaggccgaggacgagccgcgtgccggcggccgcgagcgtcctcgcggcagaggctgaggatgaggccgaatgtcctcgtggcgagcggcggccgacgtcggacttgcacgagaagatgatggtggtgggagggggagcggcggacggcaccggactcatcttggaatgacacccacacgaacaccctgtcaccggcgcgtcccaccactgcgaggctctgctgcactaccgccatctgcccatcgccaccctcagctccccctccatcgccccgag

SEQ ID NO: 25792 - DNA, 10675 bp, Oryza sativa
tagagaggggagaggaaaggacagagagggtgggagactgacaagtggggcccagtgattaaaaaagaattgctgactgaactgccatgtaggatcaaaaccactccgattcgagtcaggggataattcgtccggtattgattgttgagggtgaaagatgtttggtttttgagtcaggagccgattggtcacaatttgagagctctctagagacatcatgaaaggcgactggaaaaaaaaaaaaacaccacctctcctagtaatcctagattagcatagcgtgagtcggtcggtcggttcctcctgttttcaagaaagtgtctttaccatcgctagggctatgtcccgtttagcccgaggtcgctagtgcagtcttcatggcggccagccttacaaataattgatcaggtggtggtgggttttagagtcagttgtccagtggatcagactgcctcaacttcgaggcttggtgttggcggatcaacgaggtgagtggttacgtgtagggtgaaaacagtatgtgtattttctgaccgcccacctgactaaggctcactggaagaatgtgggaaagaaaatggtatacccgatactatctaagtttaaatccaaattcacaaaaaaaaatataggttaggatacgaggagagttgtatccgtccgtttgtcccatattatgaaacatatataaaaatctattataaatcaacctacaaacatgataaaagattggttaatcactattttacgaggtcacatgtaattttgtacaatttttttctcaatatatctcctctagcacttaattatattcttatatttaatatctataaattagagatacaaatacatatatgttacccaatcctatttagaggaaataatatgggctaggattcaagatggttgatatgttatccagcgttacctgtaccggtttcgaatttgaagaaaattatgagttagaatatgagaatgccaccgaacccgtccgttttcaccccttgcaggtgctctcttccgatagatctcgcatcagcgatccctccgctcgttggctttgctggtggggagatgcacatctgctcacacattcggccggcggtccaggagatccaacagggcaggagcttgatagcgacgaatctgctatctcattgacgaacttcgtcgatcggttgtgggcacagaggcagcgatttgtgccttcgtcgtggtgaaatccttctgattcaatacgcaggcaaatgttggtgccttcgtcataatgagatccttcttattcaatgcccgtgttgatctccctggattctttttttgaacttcatctccctggattcatgaagcacctgtttgatccagataatattagatacagtgaatcgtcaccatgctagtgctagcgtgattatgggctgctgttttatgggggtttcttctgttactatcgattgcggtggtcaacaacttaattaacatgtcgattttaccagtgaagtgtcagccacaaatgcgactttggtcagcagggatgaagctagcgctcctcagatttaacgtagagccatggcaattctatattgagaccgatgaagcttataaaaaatcaacaattcaacaataataaatatcaaactaataaatctcaaactgtgctttactctgtgaaggcaatcgaagagatcgccagtttctcaagcggcgtgcacgtttgtaaaggcctctcgatagaatcatcgcggcaacgctggtttcgtctattactactgcacgattgtatttggaagattataaccataacccagctatctttacctggatggctttatttatgtctttatgttgtactccctccagtttataacatttgactattcgtcttataaaaaaatattataaaattattatttattttgtttgtgacttgctttattatcaaaagtattttaactatgacttactccttctatttcacaatgtaagattttataatattcccctcatacatatagatattaataaatttaaacacatgcatatgtctagattcattaacatctaaatgaatgtgggcaatgctagaaagtcttacattgtaaaactgaagcggagaaagtatcttttttatattttccctaatttttttaaataaaacgaagggtcaaactttaccagcaaaacatcaaaacgacatataatttgaggtaacataagttaagacaatgtactgtgcatatttatatttccctaaactcttattaataacgtacaaattaagttattttttttagaaaaaagaaccggcaatggggcaatatcacgcggggagaagcaaggtacgtcccaatccggggcagacttcgcgcgtgcgttccgaattttttttatttttagatttttttaaaaaaaatatttacagaaataatctatcggccaaaaaaattgcaaaaatagaccctgccgcccacctctggggcggcaagctgacgtggcaaacgggggagggacgggcggtgacggagggagggtttttttgcagtaaagcccttgccgctctcttttggggcggcaaggggcccgaatgcaaaaaagctagtcgaggccggtcattttgcaggcggccccttgccgccctctggccgggcggaaggcctcgctgcctataaaaggcctgccgcccagcccccagccctcattcctcccctcaaatccagtgaaaaaaaacaagaagaaaggggaggagaagagaagaaggggtgaagccctgccggattcagacgccgatttcaggtaatattcatagatcctatatgtgactattgagttaaatagtgtattttttaaaactttatttgaataaatacattatatttttagggttttagttgtactaatctagaagtgcgtattgtagatattgttaactatgtagatctgctagtttggaatcaatacttttccgttgcattggcatacacaagaagatattacgttgtagatgtttattgcatgaaagagtaatatgatctagttattttgttgacagatatgtcgaacaaacaaatattccaagtttaccatggcccaggaaacgtctgttacgggccaactggggtagatctgtcagattttattgtatcagaaaggggaattgatagaccggctgagaggagtgtaccttctataaaaggatggttaatgaggggcttgagagttgatccacagacaagtgacataacaatcaatgttatagtaagtcgggcaactgagggtttttattgggaactaatgccagttcaaaactctcgagtgtggagatggtatgtggaaaatgcattgcaacacgggtggcctctagctatggttccgtttgttcacccgaaggatccatgtgtgcagatgaacatggatgatggcgagggaccaagtgctgaagtaaatgagacttctgtggaggaggtcaacgcacgagaggacgggggtgtagtagctccagtgggcattcaaccaggtgtagtggccgacgagggggagactgtcggtgccattgtggatgaaatggagagggaggattctgacaacgagcgtgtagaggaaggtgattcgtcagatgatgagacggatattaatccagcagaatgggctagtgaggatttttctgggttggtcgtctctgaagaggatagtgtgagatgggagtacaaagaaaatgagattattcaggaagcgatttatagtagagcagaagatatgaaggaggcggtaaaacattttgcagtgtcacttcatagagagttttgggttgccaagtccaaccggtcgcaatatgaagttcggtgtgttaaggaaaaagatggttatccctggagagtgcacgtgtataaggggaaatagaaggattattggacagtgtcagtcgttaccaagcatacatgttttctacctggtgttcagaaataccacaggaacattacatgtgcatttgttgcatctgagatgtatgcgcatgtcatcgataatctcacatatgaaccaaggtcaataatccgacacatcgaagagacatacaagtatactattagctatgccaaggcctggagagccaaacagaaaataatagagatgagatttggaacttacgaagcctcgtacgacaatttgccacgcctgcttggcgttatcgaggaaagaaaccctgggagctcttacgaagtgaagaaattcccctcaattgaacatcctggcaagagtgtgctgcaaagggcgttcttagctctacatgcatgcaagatggcattcgtgaactgtcgtcctgttctctgcattgatgggacattcttgacaggaaagtatcggggccagatactaacagcaataggggtagatgggaacaatcaggtattgcccttggcatttgcttttgttgagagtgagaataccgacagcaggtactggttcctgaaattggttaaaacaaaaattgttggtatgaggccaaatgtgtgccagatacatgataggcacgctggcattctgcgagcgatagaagagttgcagtttgggaatatggaacaaggataccctggtgagtgggaagatgtacagagcaggtggtgcatgcgtcatatgggagctaatttcttcaagcaattcaagaacaaggagctcatgaacatgtttaagaggctatgcgatcagaaccaggagaaaaaattcaatgagctttggaagagattagatgagttgacagccaaatgcagtgatcagcgtgcagcggctccatcaaccgccgatgctgaccctccttaagctcttggacctctcccaacggatagtccaacattggttagaagaactggattggagattcggaaattttctcagtggattctgcatgaaccaaaagagaaatgggccaaggaatatgacacaggtggtgctagatatagaataatgacaacaaatttggcagaagtttacaactaggtgatgcgcggtgttcgtggactgccactagttggcatagtggagttcattttacatgggacatgcaggtattttagggatcggttccaggcagttcttccctctatgccgaacaacagcattttgtttggaactttcatgcagaaaaagctagaagagttgcgtaaaaaggccatgaaacatcgagctctagtgcaaggtacccaacagcacaggtttgagatactatgtcaagataaggcaggcaggggtatctaccgcaagagagtgaagcagtagtgtgttctcaaagccgacggcacatgtcattgctcttgtgcaaagccgaagctgctccacagtccatgcacccatgtcattgctgccgcagcggagtgtggcataccagatgcagtatatgtttcacagtacttcagtaagcaagcaatatatcatacatggagcggcgagatttatgggttcggcatagctgggtagttcacagagactaacgatgaagtactcaatattcctgacacatcgaagctccgaggcaaggctggaaggaggaagactcgtcgcatccgcaacgatatggacgagtcggaggctggcagggtgaagcgttgcagcaaatgcgatgaacgtgggcacacctacaagcattgtcctaaagacaaggagaaacctagtgcggcagaggcaggactatcaggatcaacagcagatggagctcgccctacggatgaaggcactacctccactcgaccacgtcctaggcgtcgtcgtgccacgtctggctacatggtgtagttcttatgttctatgttggcatgtggctttgcttgtaatttgtttcgaacttatcgatgtgtttatgtttcgtcgtgaaatgtcagacttcggcatgtcatgtctttaggtctcgtgatgtaacgtcagactaaggcacctagtgtctctctttctttctatctgggcagctgagaggattgcgatcggccgccctgaggtggaccagcacgcgtacaaggagtcactgtacgcggagcgaccagaggtcgactaccctacgataggtactctgtggtgccgtcgtcaggtacgttgcatcgatcttctcgtattgttaagttaattgctaagttcattgtacatcacatcgatcgtctcgtattgcagcgccgatgggctcacgtccaggttaggcggtcgtatcctgagtttgttatggagttcgaccgccttctgccgactgacgtcgtgtgggagccctacagtgccgcggctacccaggctcgtgcgccgttgggtctgtccacagtctgcaccagggaccaggcgtactggatgactacggttccgatggtcttcgacatctgcgttgagcctcatgcccctttccgcgtgatgcggcagttcggcttctgtcagccctttccagtaccgtttccgacgaccgtcccagctgctgttcatcggtaagatctttcactacgctttgagttgttgcattaaaatctacatgtccataataatttgcaacatctgtcgattcacactaatatgacacattaattcgcaagtactcgcgcaagggtcagcagtcagctggcgactggcccgccaagttggcgacttttgttgaggactggttgctcacaaccgaggaggtcgtggaccacgagggagagccacacactgaggaggcgtaccaggcctacctacgctggtaccagccacgtacccgtactagggtcaccttcgctcccttggagcagcagccccacgttgcgagcactagagacctctacgccaggcaccgcgaccaggacttcgctcgtgctgtgagtaccatgcatcgcaccattcctttatgttttcatgtctttctcttcatcaaattttacgaatatgtacgaaaaaattaaccaccaatgtttaggcgcggggattccggtacccgtagaggagcacctgacgacatacacgcggatggtggagtcgatacgctcgattctccgagtgctcacatgtcgtgcagatgacgttgctcgggcagacgcagctgtacagcggccacccgtaccgactggtccccgtccagctatgcacgttcctaggccgactccccctccgcacggaggtaagtatttttaaggatttttctgtacatgccttgcacatatatgtgagccgtttcacttgccgattgcttcagggtttcgtgcaccgttcagcaccccgccttcctcggctaggccctctgttgtgcccccacaggtacttaaaaaaacaacattacttcgacaatcaatttacatgcattttatgtcttagcttacaagggtcccgttgtccatgtgtaggtttcacccagttcgctatgacgcaggctgcccacttctcccaggctgcagcgtcagtgtctcaggcagctgcgtcgacctcgcactcagtgcagttctggcagtacaccgggacttcgtcacaggcagccggcacgtcgagtcagggtccaccactggaccatgctgggacctcgtcggaccacttgctgccttccaccttgctcttcgacatcactgacttcgatttcgcttcaggctagacagaggatgtcatcggcccctcacagctgagaggggcaccgccggtgcagacgcaggaccaggcgcaggccactccgccgccagacactcgtgctacccgtgctgtgccaccggatcgtttcacctactcccaggaccacgtgcgagcacaggcccggaggaccaagcgtggtcgcggcgcggggcagggccagtagagcagtcttctctttatttatttgcttcactttccagtactgtatgcttgtgtcatgactacgttgttgttatatgtgcacgatacctttcggcgcatgcacgactactttctgccgcaccgatgcagcctcctttattcgcgtgcgatacgagtatttgcccaccatttgccgcatacgaccaatgtaactttcggcgccgatcaggcatgtaactttcggcgccaatcaggcgtacccaccatgcctcgccacgttcacatgtcagggatatcactcgattttttgcgcctatataagtcgccttaacgagtgaggcctcacaatctttcagaactcagtcacattcagtactctcttcccccacttgcttcattacaaatcctaccggctttcgtcaatggctagacgccggggtgttgaggatccgaactggcgtagcgatccttgtgtatacctactaccaccttggtgccagcgtcctctttgcctatgcggtgatcgatgccaactaatggcttcgaggaatcctgatatttgaggaaggcgcttttttaggtgccctaactatgaccgtgaggtattttattatctgcatatgcttattcattccgtatgggcaatcgctttattcttcgtaacactactctattcggcagacccgcactacggcttgcgcatacatcgagtgggtcgatacagaaaatcctgttctcgacctaaccacttgtttacaagaaggtcgctggtatttcgcatccgaaagtactgagcaatacttacagagaaaagcggcttatgaacgacaatgtcgtgaacaacagagcgactggcgggtgctaactacggcactccctccatgggatgcccatccaagatgcaggtgtggtgatcgtggtcaggttcttcgttccataaagcctacaacattgggtcgaaggttttttgtttgtccaaatattcttgacgacgatttcatggtaagaatattttgattacatgaatccttattttctcacaacatttactaactttgctcgctttacatctattctttcctcctaggaaccaccaaggagatatcaatacagaaaacggatagacaccagaagggttctaactccacctagccgtgttgagcagcttgaaactaccagagcaatatagggttactaaagcgcgttttgagagaggagagggatcctcacgtaggggttagctattatcggacaacttggcatattgaaatttctactgtcatgcttccttgtcccattactacatcgtcgttatgttcaactattgcactacctccctcctagttcgaatctaatattatctatgtaaccgcaatggaaatagttgtatcatgttcaaattgtactactatttcttcatgttacataattctccttgtttaaatccatataatgtttatacgaccgaaactgcgataggcctattaattatccgagtactaatacgtcgaataagttacaaaataataccttacttaacatatgaaattgcgaaacaaccaacttcaatacatttttataacaatattaacaagttttaccaataaatacttctttatttattattaacataacatagaaaaatcgtttggtcgtactttttgcatctgggtcccttgccgccctctactggggcggcgaggggcccaaatgcaaaaagtacgagggcaacctctttatgggcggcaaaaattgcaattagccccttgccgcccagggtaattgcaattttggccgacggcggcggacggcgcggtcgacccgccatctgccacgtcagcttgccgcccaccactggggcggcagggtctatttttccaatttttttggccgatagattatttccgtaaatattaaaaaaatctaaaaatgaaaaaaattccgtgcgttccaactacttgggccagaaccaaacgctaacccacagtcgaattagcccaactttaataggccaatacgctagctcgggaaggggtcgaaaagtccaatttgatcaaaaagtgtaacgacaccggcccacagtcgaagtggcccagttggccaacgcagcccacattaacaacgccaaccccaccagagcacgcgctgcctagccccaagtcccccaaccctcgccgccgccgccgccgcctcctcgcccccgaagcgtccccgccgccgccgccgcctccccgtcgggaaggatgaccctgtccatgaagccgcggaaggtgctggtgcggaaggcgatgaaagaccgcaagaagaagaagggccccaccaagcccaccccatggaagtgccccctctgccacgagctcttcctcggggtgcgcgagggtaaccgccacttcgaggagtgcgaggcggcgaccaaggccgcgcgcgccgccgaccagaggaagatggacgtggaacgcgctcgccaagaggagctcgtgggatccaaaaaggccgccccaccgaaggaaggtagagtctcgttttcgttcgcgttatttgcatcgcaatgcatggatgaatgaattagactttctggagaacaatcccgcaatggatggatgaatgaatgaattagactttctggagaacaatctgataaattaacgaattgaacccgcgtagttttcaggctatgaaaactttgctgcgaaattcaaacgaatgttccccaacatagataggaattccatgcagacatttttgacaaatattagcatgctgggtgtataaaatatatactgcactgagcaaatcttaaaaatcactcttttcaagaccttacatagttggacgcacctggacctgctgcaaagaattactagtgggttatatctgctgatttgttttagaacccatacatttacctttccgtagtacctgg

SEQ ID NO: 25793 - DNA, 761 bp, Oryza sativa
  unsure (1)..(761): unsure at all n locations
cccgcctatatttgaaatttaattatattgcttgcaaaatattatgcattgataggatcacacttaatctgttgtcccgtctgcaaggcagattggcagacctacctaatttgtcgcatttgatccttccattgttaattgctatgccatgtccccttgtaaccacccagttgcgcctcgatactcgtgcactctgtgcgagtatcgacggtcgccttcaaacttaaaatctgagtaacaacttgggtaaaactggagttttacaaaagacttggaaaacccgacacttgggtcggtgcttgcgaactaaatgaatttccaaaaccgcggaccggggaacgtaccgggtgtacggtttcccgctctcgcacttaaggaccgattccttggaatttatccaaacataagacaagtacgaccacatagatagatagatcactgtctttttgtgattagtaatttaaattgtttgtttattttttaaaacaataagggcaaaaaagagatcggaagggggagaagcgaagcaagcgcaaggtgtggtgggacatatttttatcttttttattagatcttttgtccttttgtgattaggaataggaccgattattttaatttcgctcttttttcttcaggtccgattttttttgccatgatagaatggacgacaaaatcatttaanatttttttaagtagtagagatttgtacaatagcttttacgtcgcttaaaacacataaatataaaagttttaaatacaat

SEQ ID NO: 25794 - DNA, 16294 bp, Oryza sativa
ttattgaaatgaaggaagtaacatatgaaaaattttctgcttcctattggccgcattttaactctgaactgacaaagaaacttgatgcgtccactgtcttcactgaaataatttctcatataaagggtggatatcaagcgaacaaaccttttggtggcaaacttgaaaggcttgattatttaaagctttctgagaagagattttcgtctctgaacagtcagatgagagaaagggtatatgatatttttcttgattacgaaagtatgaaatgcacagccagggaatttgacttgtcagattttgttaacagtcttcacagaaaccttctttctgagggctacaatggtgatattgtggattgtatttacatagatgaggtgcaggatcttacaatgacacagatagcactgctcaagtatgtctgcaggaacttcgaggagggctttgtttttgctggtgacacagcacagacgatagcaagaggcattgattttaggtttgaagatattcgctcactcttctatacctatttccttccagaaatggagccatgtggtcaagggattaatcatggaaaacagcttcgtatcacggatatgttccagcttacccaaaattttcgcacacactgtggaatccttcgtttggctcacagtatcatgagtcttctgtactactttttcccgtcatgtgttgacaaacttaacccagagattgggcttgtatatggagaagcacctgtgctgcttgaatctggtaatgatgagaacgcaattatgactatctttggagaaagcaagagtgaccctggtaacttgcaagggtttggtgccgaacaagttatattagttcgtgatgatgcaaccaagaaacaggttgttgaccttgttggtaaacaagctcttgttttgacaattgttgaatgtaagggccttgagttccaggtatgagccttaccacttaaatttcaattgtggttgttgataagcatttttcctgtttactgtaagaagccttttaggactgaattatgttgtattaaataaatttctaggatacttatttatttttaaaatatcattttgtgtaggacgtgctgctgtacaatttctttagctcatcacctttaagaaataaatggagagttgtgtatgactacatgaaaggcaaaaatgttatagaatcatctgaagagatgtcccactcttttttcgacaaaaacaagcattatcttctctgttcagagttgaagcagctctatgttgcaattacacgaactaggcaaaggctgtggatatgtgagaatgcagatgataactgccgaccgatgtttgactactggaagaagttgtgccttgttgaagttagagtacttgattcttcactcattgaagcaatgcaggcaggaagcagcacagaagaagattggaggcaacggggtaccagggttagtgttatactctccgtcaaaaattcaaggcatcatgtatttcaaaacgttgacatttacaacttttgtctaatactcgtttccatcatgttgggcatggtggataccagtacattagtccattcatcatgctatctgttttggcaaggttttagtcatgttgattgtttgccctttcttttagacaattgatatgtggacttatgttttttcagttttagctcttctttccagcaccgttgtgagctacttataacccatgcacattctttccttgtagctattcgctgaggggcaatatgaaatggctacgatgtgctttgaaaaggcaggtgatgcttacagagaaaagttagcaagagctgctggacttctagcaactgctgaccgtgtcatctctacaaactttgagatgggccagtcttcattgcaaaaagcttcagaaatctttgagtctattggcaagcatgagaaagctgctacttgctatatgaaattaggtgactacaaaaaagcaggtatgatgactgtcttaaattgttatatggttgtgtattacattttttatgtcttcacctttccatcttgttttaacaaatggcaagtttctcagaaaggttttccccaaaagtaaatgattcttcctcagcgaatttctgcttccagattttttttgtaacatttttttcctggtagtatcatactccctccattccaaattgatctacatatttcataggtacaccaagaccaagaaaagctaataactctctcatactatatttactatagcaacaaactcgatgcatgttccatccccactatttcctagccaatagcaaatcaagatattgcatgtgggttataaatacttgtgtgcatggatgcatgcatcaatgtccatttactccaatgcacaaataacgaatagacttaataaatgaatacaaatatgatgatcatttaggaataacctcaaaaaaactaaatgtagatcaatttggaatggagggagtatttgcctatattgggttttcacacaagtattaccacataactttcataacattttcaaaacatctaatgtggctttaacttctatcaggaatggtttatatggaaaaatgtggtaattccaggctaaaggatgctggggactgttttgaactgagtgcctgctggtcactggcagctgacgcatactttagagctaaatgttacgccaagtgtttgtccatgtgttctaaaggaaaactgttccaaaagggcctacttctcttgcaacagttggaggaacatttgcttgaaaattccagcctcgtcaaggtggctgctattagaaacacatttctagaagattgtgcgctacactattttgagtgtggagacataaagcacatgatgccatttgttaagtctttcagctctatggatcacattcgtgtattcttaaattctaagaatcttgtggatgaactgctgagtgtagagatggatatgggtaattttgttgaagctgctgggatagcaaagcatacaggaaacatcttattggaggccgatctgcttgaaaaggcaggttttcttgaaaatgctacacaacttatcctccttcaattatttgtgaattctctctgggcttcgcacagtacaggatggcctccaaaaaggtttgcggagaaggagcaattgcttgcaaaagccaaagaaatgtcaaggaatgtatcggagtcattctactgccttgtttgctcagaagcagatgccctttcagatgaacataagtctcttgccagcataacttataacttgattgagggcaataaatgtggaaacttgttagtcgaacttatagcttctcgcttgattcttgatgttcatcttcaggctgaagcctctggatactgttttgaatcagagccagggtctcatgatggacggcattgcaaagatatgctagttcttaatcagatatcacttgaaactctagtatacgattggaattactggagttcaattatagtcaaagtgctcaggcatcttgatcaccctaaggacgcagaatcaaatgatttggcagcaatctgtgaagatctttgtgctaaatactttggatggagaaaagatggtgattatgaccggtatgtggtacttaacacagactctagctggctgtctaacacaggaagaaattatttgcagcaagatggcaggagatgttggctggatactctccattgtcattcttgtgctaaggatttttggatcaatgaactttattctgttggtttgagtgtactcaagaagttggaatctattgtccaaattttgccaacatcatcatgctccctgggtagaactatactcgttatatacgaaattgcaaagtttctaaaggaatcagagtttggcatgccaaaaaataccataaagtactactctattctttgtgaacgtcgcttcttcgagttggttttccttgtctggagggatgaaacaccaaagagcctcttgtgtatacttgactcagcgactacatataacctgctctctgattccatctgttcatatcttggttcaagaaacaataaaatgactcatagtcaagttgggagaataactatgcttcttctccatgcagcaaggttggatgattcgttgatttcacagcttgtggaatatctagacagagggtctgagtgggcaactttttttctatcgttgaagaagtatcttgacaatggtgttagcagagacatcttactcttggacttcaaatttgctcttgattgcacttataaggcaaactggagggctgaacactacatatccccgatatgctatgtagatctcattgagtgccttggctttttggctacaacgcatcttgtactgaatgactatatgttttgcacaaaatctctgttggccaaaatgatgaagtgtcgcactaccaagggttactttgagacatgtatggctcctagcacagatatcgatctgggctatgcaggtcattcagcacggtgtttcatatacctgtcagttaaggatcttttgggaagcaagcgtatgattgtagagtgggttcagaacacctctactccaactagttcttatgttccaatccttctgagattagttatcacactttatcttgtgactgtaaaccaagacgatggagatttgtatgaggttacagctttcctcgagaaaaatcatgtttttacggatttacctcctgagttctctgaaaagattagaaatgctttgaggatgaagtctcgcacagtgaagaacttcatgagggtatttgctgatgcccttgcagcaataggaactcgcatggtagttatgggtgatattaagaaggcaatggcacataaatgccagccagacttgaatgctgatatgattagcagtgtggatttgagtgatgctaagaaggtaatggcacttctttcaacagagaagtcaagtagtttaaagcaggaacctcagctgccagagatcaaatctgtttgtaacaaaatttgcaacgctacttctggtcacttccctttgacaagtgtaggaggtagccagaagagtacaagtaattttaatttgagtgatgtggatcatcctttgttggagaagtttgaggcgtttcaagtcaatatgcctcaaaaggtgagttgataatttggtaaattcgtttggtcatcttcccttttgttcaattgtttaactacggacagcgtttttctgcagaaaaatggaagcttaatttctcaaattcttagaagtcccctttcctggatagagcaaagagctcctcctgtgcaaatgttagagttgagacacatttgcaagcaagtcgaagaacagcatgttaggtaagcaaatatggttgagttgtgtgacctcgtaccatccttgtgctgcttgccaacgtgtataaaatgtggaaacgatcacctgagctcatcatgttctagcagcttaacacagtacttttcttgtcggttaatttcgtgtgttctttaaacttcatctccatttttctgccatcacagggagaagagagctttgtccgtgaaggatctccattcaaaccgggaacatggtgatggtgaaaaaaatattgggaagatcgtcgacgtgcaaggaagccaatctaaccctgacagagctagcgaatggagtggatgctcagatgacgagcaagagacgggaggaagtaatgtggtgcagtcgaccaaagaagcaccagccgctgccagctccggccccagctccaaaaacaagccgcagaaaaagaagaaatctaagaagtccaagcgtagcggcaggaagtagtctctgttttgttttgctcttctgcctgaccaggcgtcggatggccttttttgcttacaccgttgtaagtccagcagcaaggccagctttgcttaactggatgtactccctccatactgaaatcgtttttgacagcgacacggtctccaaaacacaactttaacttcctgtttctataaaaatatttattgaaaagtgatatatgtatacttttataaaattatttttcatgacaaatctatttatataatttttatattttcaatctcaagttgagagatatttataatttatatttctaagttttgacttaaccttatcctaaacgatctcctttacgagtacggagggagtacttgataagaattgtttgcttatacagtgactgtccgtgcattagtggaaaaaaagggaatgctttctcacccccagtctttgtgtttgatttcaaaattaatttttaggggcttttgcccccccttttttttgcacagttctccattcaatgttgctaagaagagttaaaaaaatcaaactaaaattcatccttaattcaagttatgaaattcaaaactgctccgtttcctattatgtctctttttcaaagttagaacttgttaaaagtttgataaagtttatagaaaagtgtaacaacatttataatactaaattagttttattaaaccgatcattgaatgtgttttgatagtttttgttttatgttaaaagtattgatatattttcatacaaacttgatcaaagtttgaaaagaagttaaaggaggttgacttataaaaaaattgaaaagaagcattgtactactccagtagttaaagaggctgtaccgctgtactactaagcaggcggctccgcctggccggtgacggtgagatactccagtaaaccccacgaaaaccctcaccctgaccctgctgctcccccgcggtgggctccccgtaaattctcccccgaaaccgcccgagatggcggctgcggcggcgcggctgttggagagggcgacgagaaccgcggcatcctgctcctccgctcttctccgcagtcctctggattctttctccggacgcttcccaagcttccggtcgcccctcctacggccggctccggcgccgtcgaccgtcttcccccggggcctctccgacacggccttcgacgcgcaggcgctggacacccgcgtacccgccaccgtcatcaccggcttcctcggctccggcaaggtgaccgctgctgtccttccccttgtgcagtcttgctagctttttttagataatggaagctttatttagactcagttaattacatcaagatgatacaatcaaactgagtcacccccggcctctgcataaaatgcacacagccaaaaagcgctggagccatatagacagtgtacttgagaggcgcttgcggcgatccaaacttgacggggtaatttgaactagaatccaagaacttgatatatctgtaaaaatcaaattaaaaccagtctggatttttgcactatatggggcttgcttccatggttccggagtgttaaatagtaacatacatgatgatacagtttataggaaacttatgcttgtgtggtatagttggctaattgtttcgaatttaccttttacagacaaccctcctgaatcacattttaacttcacagcatgggaagagaatcgctgtaattgagaacgaggtaattctaagcagccatatatcttgcggacttgtcaaaattgcattgttcagttatgtgcaacagaatcttcagatcaggctgaccattgtttacttgatattctgttttccaatatatccatatttacattcaattagcttggtgactagtgaccacatactgactcagttatttcttagtttggtgaggtggacattgatagctcactcgttgcaagtcattcatcagttgccgaggacattgtaatggtgaacaatggttgcttgtgttgtactgtccgaggggatcttgtaaagatgcttctgaagttggtaaagcaaaagggggacaagtttgatcatattgttattgaaacaacaggtgggcctcactggattgtattgctaaagtatggaattggaaatgcctccttttcttgaaggtccatgatttttcaatgcctgacagagtcaatgccattaacccaggtcttgcaaagcctggtcctgtcattgagacattctgttctgatgaactggtctctagatatgtgaagcttgatggtgtggttactatggttgattgtaagcatgccatgaaacatttgaatgaagtaaaggccaggtgggttgtaaatgaggctgtagagcaagttgcttatgcagacaggattatattgaacaaggtatttactgcctactaatacatgactcagtagtcagtactataagttcttaaaaaaaggaatacaattttatcttttctgcattcttccggcttaaaaaaaaaacttctcaaaaagtttcttgttttactaatgttccgtaacatacatttctgcagactgatttggttgataatgcagaactggaggtgttaattaacaaaattaaggtaaattgatagagcggattccttaagaaacaaaaatataagctgatggatttttgtacaagctgattcctttttgtgcagctcataaatgggatggcacagatgagaaaaacaaagtttggtgatgttgacatggattttgtgctaggaattgggggctatgatcttgataggttggttatgcatgggaacattttttggagggtattgaagaaaaaaattggttttgaccctgagttagatatatatcttgcttctctaatttgagataggtaatgtacaggattgagtctgaagtccagttgcatgaaagaaaagagacaggtcattgccatgctggagaagaacatggtaaagtttgctttcatatccttgatcaccatgccatggttcccaatcatattagaatcatgtgaattatacctaggagtctaggacaccatgcaagagttaatggcaataaaacattcttattaagaaatgacggtaatacctgaaaaaatgagatagcagccagatccttaccacagatagtctgtgtccatgttttcttttacctgcttctactgtcaattcagtcagattactatttagtttgtactctactgatttgtagggcatcagcaccatcatggacatgtccatgattcagctgtctcaagtgttagcattgtttcggagggagtacttgatcttgatgaggtaaaccaaagcacttggaacatctgtttaaaatatgattattcagcagggatttttgttctttgctgctagaagtatactcagcaaatcaactgatctatcactactgtctttatcaggtgaatgactggcttgagagactcgttgaagagaaaggggaggatctttatagattgaagggtgtaatctccgtaaatgagtcaactggacgtttcgtattccaggttagctgatctaatagcttttgtattccaacattggtgtgatctatcactacctttgtttatccattgttggtacagagagctcttgttttaatgcttttgcaattcaatctactctaattctgtcttcttccattactaaccctttcttaaaatctaaaacttacagggtgtgcactctatgttggagggatgcccagctaaaccatgggagccggatgagaaaagattcaacaaattagtatttattggaaggaatttggatgaagctgcactgcgaaaagccttcaaaggctgcttactgtgaacactctgatcacgtattgagtcctgggaagccatgcatatatcaaactgtacaagatgtttgccttgtgctcgctgataaaatgcttactgtttgtcaccaacgtattaggccaatctaaatgtgttgcatgtcatacgtgggtggtgggtcatggtttacgtttatttgtggtatcctcatctgtgccaggatcatacctgtgtatcatggacaatcagacaacagagtaaacttttttaagggaaaaccaagagttcatgtcccaatggtctgaatttctgaatgcgtggttctgcctcttgattgaatctcgagcataagtttatcttatcgagattgctctggccggaagatcgatttgcttcgatgaacatcggatccgatgcaaacagtgagctgacggttgattagtgaaagaacatcaccttacccaataagataagggttaaaattgataatcggtttcatgatctgctattagcccaatcacaattttgatctagtagcactagatgatgatgatcccagctaattttgctactgctaatactagtgcgattgtgtgtgaactagtgctaaagttgctaaccctaagttgcagctgccacatcccaacggctattttttttctcggacacactgctagccgttgcggccgccgttccgtataaatattttgacggatctaccagtaaccccacaaggatactactccgcgaggcacctctctctctctctctgtgagtttcgtgcgatctcgcgagcgaatccggcgcgcgacccaggctctccaagatccccgcgctctcctcttcggtttactgatctgaaatctctgcgtcgaatcacctgtttgttggcttgaattgcttgtccgcgtcgttgatttcgttgtggtttcttgatcttcggtggaatttctttgcgttggattgtctccacccctgttggtttcttgtcgattcccgatttgagttgttcgttggcgtgaaaaggattctttttttcccctgagatttcttgatttttggtgaaatttctttggtgttgaaatatcatcgccttttggtttcttatcgattccgtcgttccgattggagttgttcgtcggcgtgaatttttttttcctgattcatcgttgcttgttgattggggatcgaatttttcgtctacgatccatcttattcgtggtagcagtatctcttcttgttgctgcgctgtgccctgtttatttgtttctgcttgttgcttctgacccatggatgcaggttcgcactcgatctcatcggagaagagcagccggtacgtggcgccgcgacagccactccaggaggccggatccagaccgtacatgccatcgctgagcacggcgtcccgcaacccgtcagccaagtgctacgtgagttctctgttctaagcgtcgccaaggaacgcacacaagctgttcgacgaaatgactgaacgggtattctccttgtttggcagggtgacaggtttattccggacaggtcggcgatggacatggacatggcgcactacctgctgacggagccgaggaaggacaaggagaacgcggcggcgtccccggccaaggaggcgtaccggaagctgctggccgagaagatcctcaacaaccgcaccaggattctctccttccgcaacaagccgccagagcccgagagcatcctcacggagctccgtgctgatgcggcttccatccaagccaagccggcgaagcagcgccgatacattcctcaggtatgcacacctggttctagtctagtgttcattgctgccatttagctgtaactgtctagtgcctttggattatggttggttgctgattgcctgattggatgtgcgctggttgaaaatcttgtgcagtctgccgagaggactctggatgctccagagcttgttgatgattactacctcaacctactggactggggaagcagcaatgtgctatccattgcgctgggcaactcggtgtacctctgggatgccacgaacagttcaacttctgagcttgttaccgtcgatgaggacaatggccctgtcaccagcgtaagctgggctcctgatggccggcacatcgccgttggtctcaactcctccgatgtccagctctgggacaccagctcaaaccgactggttagtacttagtacctcttggtctgtgtttgaatgttttcattagcattgcatgtgcagttgtgcttagttcctgattgtgattgattctgcagctgaggacgatgcgaggcgtgcacgattcgagggtcggttcgctggcatggaacaacaacatcctcacaactggtggaatggatggcaagattgtgaacaatgatgtgaggatcaggaaccatgttgtgcagacataccaggggcatcagcaggaggtgtgtggcctcaagtggtcaggatcagggcagcagcttgccagtggtggcaatgacaacctcctgcacatatgggatgtgtccatggcatcctctatgccgtctgctggccgcacccagtggttacacaggcttgaggatcacttggctgctgtgaaggctctcgcgtggtgcccattccagagcaacctgctggcatctggtggtggtgggagtgaccggtgcatcaagttctggaacacacataccggcgcatgcctcaactcgatcgacactgggtcacaagtgtgctcgctggtctggaacaagaatgagagagagctgctaagctcacatggattcgctcagaatcagctcactttgtggaagtacccgtcaatggttaagatggctgaactcactggccatacctctcgtgtccttttcacggctcaggttatcttttgctccttgtacctgccgtttaaattgacaaatattgctctgaacagattgctgattacttgtcttgtggtaatcttgcagagccctgatggtctcacagtagcatctgctgcagcagatgagaccctgagattctggaacgtatttggggctcctgaagcacccaagactgcaaccaagggttcccacactgggatgttcaacaattccaaccacattcacatccgttgaggaacacagtaagtactaccttcatctgtatttccctagcgcttctacacattacacagtatcaatgtgatgtccaaaagctgcatgcatatctattaactacaagtagctcattgtgctgttttgctctatgcatctttgcagatacccttggttctgtgatccagtcataacttacaaagaagcagacttggtgtgaagggtcatttgcaggagagatcatcttacattattagcagaagagttagattttgacatgttgtatataaggttttgtgctatgttgataacaattttatgtacatcaagaccggtttgatgtattgattggcgtagaaaaaatgtaaaaaaattgcttttctgccagtaatatacatttttatatacttgccaggcttttcttgtagtaagttcctctcgttgtgtagtaacttgtaatttgattgattttactctcgagccaattgagatgtctggtaaccaggaaattgctgagatgagtcttcctcttactccattggattgctatgatattttacttaatgtcattattagtttaacaagcttctttttcagcatgactgttgtgcttctggggaacagcaaatttgtggtgctgttgggctgttttaacaagtccattcagtatattttaattgcccccattttaattatagcatgcctttacagtttacataaactatttataatattcacctaagcaaccagatttacacacacacacacaaaaaaattagatgatagtttcgggttacctaccattcattttgctgctgtgttttaaaggttgatggatttggattgatcatggtcatttgtacttttgtagtctttatctttagtgcattaacccaacgtcccaacccatgatagagtgcttccgtctttcggcgcaacactgtccatcagatcctgccagcttgatcctggccgtccaacgatgtcatactagtagtacatggtatactagcctagccttcttcaccaaccggccatcgcccaccggcccacgagcaccatctctcctctctgctccgcgagtggccttttgcccacctaagccgcctccccatcctctgcttgctccggcgggcggcgagcgccccgccggaccgacgacgacctcgccgtcgagctggtggccgctcaacctctagcgctcgcagggatcccgggaagcctccctcggccgcgtcaccaccggcatctggtgctttccgctcccaccacagtgtgctgctctcgtcagttgccaccgcccgactcggcgctccggagcccagatcttggttccggaggatcctctccggcgatggatttcgtgaaggttttcgatcaggccgtgcgggagatgtaagttgtgggccgagcccgagatctcgccattgctgttccgatttctcgaggatgtggcgtgttctgagttggatccgtgagatcctgatccgttttctgtgtgtgtgttgctttgcagaaagagggaggtcaatttgaaggtgctcaaggttccagagctcgaacagaaggtgcgattgcgatatcacctttatcttaactctgtgatttttgcaatagagttgtaacagctggattggttcgtatgatgggtgtgggagcttgggttttgcataatcatgtgcttttgatatatttgttgtctgaccccattacacgctgttagaattcatgtaatcatgtcatagtagtactttaaggaaatgaatttcaggagtaccaaaattaagtctgcaatgtgtttactatttaggacttgaggtaaaccagagatctcaagtgctttcaattgaagtatctgtattgccaaatttgtgccgttgaaggctactgtctggagctgatgcgtggatatattgagttcattgtacattttgtagcacgccttgatagttgatagtcatgttgctttgacaatcatgtatcttgtccgtggtgtagatcatggttgtaagggttttcgtctgtaatagtacattcacccttatggtgcatgtttggttattctactgtgggagtatattacagatatgtatatttcttattaacttccacagcaaaaaaatatagatgtatatttttgttcttagctttgaattttaccttcgattctttttcttatgtagtaaacaatatttctttcctttaaaatttcaggtacttgatgcaacaagcgatgaaccttggggccctcatggtactactctttcagagctatcacatgccaccaagaagttgtaagttacaatctcttattaactaggtgaaaccccgcgcgttgctgcgggattttagtatgatagcaataagtagaaataatgtgtaagatagctagacgacataagcttacataatttgatatggtttatgataatttaaatagtatttaaaatgatggagaggtatatttaaatattatgtgaattatgtgagatgatgatttaacatatttgcattttaaaagtcaaaaaattaataaattatagaattatagataatatagcatgcttgcatgatgtttaagatgtaataattattagtggatgatgtgacatctttgtatgttgagctttaggatttagtgggttgtaactttatagtaagataggataggatatgtattttccccttgttttttatgctgaaatggtgctttcaaattttgtagcgctgaatgtcagatggtaatgagtgtcctctggactaggctgtctgagcgaggctcgaaatggcgtcacgtgtataaggtttaactcttgaccattttgtattttctttgtcaagtactggggctttgtactatgagttctacattggtcactatgccaataccaatggtcaaagtgaacagcaaaccttggtatatgcatggttttgtatcagcaatgtaactaaggcatataactattaatgtccaggctttgacaattattgagtacttaatagccaatggttctgagcgggcagttgatgacattcttgatcactattcaaagatctcggtatgtcttgtttatgcttttgtttctgatatatagtatttcttttctcttttttgaagtttatgtcattaaaaactttgttctctgtgctatatttgtcaaggttctttcaagttttgaatatgtggaacctaatggaaaagatgctggaataaatgtgagaaagaaagtcgaaactatattgggactcataaatgacaaggagaaaataaagtctgtaagagagaaagccgccagtaatcgtgacaagtgagttcttaaggaaaagaataagttgtgttatactatcttttttctggctgtttattcatcctgtacaactccaattattaacatatgtttgttgtggatgaaggtatgttgggctatcatcgacagggataacatataagtcaagctctgcttcatttggtagcaactatagttctggtgaacgttatgggagttttagtggtacaagggaaggtgattcatacggtgacagttatagggataaagaacctgttaaatcctctccaagttatactggcagccagaaatctggcagcaggataaaaaaggatgtgaa

SEQ ID NO: 25795 - DNA, 12078 bp, Oryza sativa
atatatcctgattattataactatttggctgaagtgaacaagtatgcaggttttttttttccttttatcgtgaaaagtagtcagtgttatatgatacattttccaaacatgaagataatacaattgtagatgtagttgtgatccttaattctttcaatctctatctacaggtgcagctaatacaaacaccagtggcgtggatctttttgccccaaacttattggatgatttcatcgatgtgcctgcagcagcaactcatgaaacaaacgactctgcagacgctcaggttgatctgtttgctgatgcagatttccaatcagcaataccaagtacagaaacagctgcgggttcagatgtccaggtttgtttatccatgagactacttgaatacttgatacattttttttgcaggcctgatgaatatagagaaaaatgtttatcctagtcctccaatctgggatatgaaatgtgctgaaaacaattgagggtgtttctccttaaatatttagttgtgcttcattaatcttagaaatcatatagttcttcaatccattgatcatgacacagggtgttatatcaaaatgatactgcagggcaatgtagacctttttgcggaacagccagccttcacagcagcctttccaccacagacagggtttattccaccaccaagttctgggacatctgaagcaaatacttccacgtctaagaacacaactcctgaaccttttgatccttttggtgctattcctataaacagctttgatggatctgatccatttggtgccttcaactccgatgttggatcatctagtataccaccacccacgcagagttctgttggaaatatcagcacaccaagtcagaaccctcaagcagcatctgactttggtggctttgtgtcgagcactgtagaaacagcagctaaggacccctttgatttttcaagtagcaatcttgggaaaacacctttggcagatccaaaggctgatgcatccgattttggtgcctttgtatcgcacagtgaggaagtagccaaggatccttttgatctttctttgagtaccagctctggaaggacaaaccaagcacctctggcggctcccaagtcagataccaagaaagaaaattttcaggtcaagtctggcatatgggctgactcattgagccgtggactgattgatctgaacataactggacgtaagttcttccttttctccttgcccttttgacaaggatatcaccttgccatatcttgatggcagaattattaatgatttctcattgttcttcgcaaattacagcaaagaaggtgaacttagccgacgttgggattgtcggtggcctcgatgacgggtctgatgataaagctctgccctcatggaccatgggtgcaggaggttccagcctaggaatgtccggaattccttcatctacacaaagtggtggcattgagagcttagctaactacaacaagtaccagtttggctttaaatgagctttcatgtgaggctttctagtatatgccggttattgtcggaatgtcggcttgtgccttatttattttttgttgattctattctcccctcttttgatgcttacattcctttacaatcgcctccaaggatcgtgatcttggttcgtcttgtcgcgcttgtattgtatttattggatttgcggatgagagactcctacctatatcacaccctgattcaatttaactgtactgttatttcacaatcgtgttaatcctatggctcacctctatattgcgatttatgattcggtacagcaacatgggatcgttccttctgccgcttccttgaactcattgaaatgaattgatgcttgtgcatgtttgggtcagagtgggggatagagagaggtccaacctgacctgcaactttcaggtttcagtactacagtacaactttacggacattcaggaagggaaaagtacaccgaagatccctcaacttgtcatcgagttacaaaatcgtcccccaaccgcaaaaccagatattagagatttttcaactaacaaaaccgttcgcttgagatcctccggttgttttggacccggttttgtatgacgtgatgggtgagtcaccgtgggccccacgtgtgaggctgccacataatctccctccccctccccctctctctcactcttctctctctgccacatctctctctctctcttctctcctctcactcgctgcagggcgggcgcggccaccggggggcgccggcgaggtgggcggtggcggcgacgggggtggggatgagaacggcgggggaaggggaggggagcgagtcaagggcggtggggaagacctcgtcggcggcgaggcggcgaaggggcgacggcgaggataggagggcgtcggcggcccccacacccgcaaccacccagcacgcgccgccgatgcccggcagtccctcgcgcgccgccgttgcggacgacgacgacgaactctcgcgcctcctctccctggccgaggccgacctcgacgccggccacctctgcgccgcgccgcccgcctcgacccggactcctctcgacccgccgcggcggaggggcgacggcgaggagaggagggccggcgccgcgggcgcgtccggcggccatcaggtgaggagggccggcgtggcgggcgcggtcggcggccgacaggagggagcgcggcggagaggagggccggcgcgacggtcggcggccgacgagggaggagcacagctgagaggacgcctctctgctcccgccgcgcccggagccgtcgcgacgatgagggcgagtggcgtggagttgttggcgccgccgctccctatccgccgccgcttctcggccaccgcgcttgcccgccgacgccgccgctccgcttgctctggccgcccctctggtgcggcggcggctccttcggggacgaggccggcaggttcagatcgaacggcagcagcgagcaacgcggggcgggggccttgtcgctggcgcccgaggcgctgtcctcgtagagcacggaggaacaggagctgcgatggggagagcgaggagaccgccgtcgtcatccacggcagcgggtggagaggcgacggagaccggcggagtgggaggcggcgcggccgcagaagaacgaggcgaaggcggacggcgccgatagggagcgtgacgggagagcgaggagcccgccgccatggctacacatctgtcgcccgccccgtcgacggctcgggtgacggcgtgggggccggccctcctactcccacgtcgtcgctgccgctgcgtcgcccgtcgcccatcgccggccgcccgacgtcctcctctcccgcctcgccccgccagccggcttgccgagacagctcgagaacggcgagggcggcgtgaagatggcgcgggggtcgttggctgcgaccccggcgcggcggcctgctcacgcgtcacagctgccgtcgctgcctcgtcggccgccgccctcagccccatcacgccgctcgtggccgaccccttcaaccggtcaccggcgtcggcgtcaacggaggaggaggccgcgaccatcacactcgcgcagagaagagaagagtgagagagagagaggaggaggaagggagagatgacgtggcagcctgacacgtgggatctacgtggggtccacgctgactcacgcaccacgtcagacaaaactaggtagaaaaccaccagagtacctcaagcgaaacggaaggaacctccggggaacgattttgtaactcgatgacaagttgagggacctttggtgtacttttcccattcaggaatgcacttacgggagaagccaaactggttgttcgcaagagccgcttctccctggttgttcggaagagcctttcttgggggccggcccattagtatttgtgtgaaatactttcttggggccgatatagtgaaaatggtactacatttattctaaaatgtaatagcttttagctgcggatctaaatatgtgtttattcaaattcatagataagcttactatattttagaaccaatgatgtaggtaataaccgtgtcatctttagaggcatgacgtaaaatcactactagaaaacaacacaaaagggacggcactatagttgtcagaaatgcaagaaccaatacttataacgtttttcccgcccgagcgcgcacccggcgggcgccatctttgagaactgacacctatgcggcgacataggtgctggtctttaatagaaatcgatactaatatcattagtgtttttttaagagaaccgatatctataatatattataggtgctagttttataatgagccagtacccataaaataagagccgagccggtgtccttatccacccacctgcgcacccacgcctacccatcctttctctcgacagttacgcctctccatccttatctcctcccctttgtcatctctctctctctccctctctctctctttcagctcaactccaacctccacccctcgccaagctccttcctgaccatgcccacctccttctcctcctcctccaccatccatcacggccataatcacctcctccatcagatccaacagcatggatcacgataaccactagagcggccagatctagcggcggcggtggaggagggtagatccccaaagccctcctctcctctttggtcggcgtccctggagcccaaggtgtcaggaatgtgtcagagtccgccagcggggagtcaagtatgagtaatccttatcgtgcccaagtaggctctgcttcacttttcttatctagaacaccttccgtatacaatattttattttgtataagacttggaacatgatgggctctatcaagcctaacacaaaagtattaggtatgtcttatccgtaacactgataaatattgtagcattacttatgataaacaagtccatatattacccaggattgtatctaaaaattagagaagtagagaacctggtgcgaaatgtatttggaccctaaaatttgatagccaaatcccatgatcctgttatcataatcaatgtgatatgacttgtagaacgtgattatatctagttctagtcgatttaactttaggtattaggcatgttgtggccttttacttttagttctgaatcttagatcttagttctgacattctggttctggctttatcattctagttattatatcgctaactaagtatacttagtacttcatataattaaaatttgagtcccctaactttaggggccctaaacaattgtacactttgcacatgccactgtacgatcctgattttactaattactctcttttgatgtaaaaaagtttttagctacgaatttagacatatgctacatccaagcttataactaaaagtccttttcttatatagtgagtactaagggcatgcccaatgcaggatgcaccccaccatccacacgagcaaaagtgaccaagcacctagctagagatatgcctcacacagtgcaagctatactcctatggaatttttatgtttcagcacctgtcagtctgtcacattttgcatttaaacccttggattattattatttgcatatacatccaatatttgcagtataccccctaaaaatcacaaagatatatatacatcaacccctcctcaatcctctcatcaccatctcccctcccaatctctccccgcgtctcctccctctccgactctctcttcgccggcgccgcctctcccctccctggccatctctccccggcgctcccctccccggcgccgccgcctctcttcccgccgctagatcgaggcggaggtggcggatcgagcggcggaggaggcggatcgagcggcggtggcgccggatagaggcgcggcggcaacggatggagccggaggcggcggatcgagcggcgacgggtgcggattagggatggcaattgtgcccgtttgcccgtttacccgcgggtaaaaaccctattagggttgggtttgttctccattttatacccatgggtatcttattgggtcaaaagctatgcccgatgggtaaatgggcatgggtatgggtaatcactacccatgcccgctttgcccgtttacccgcaaaatctaacttacatgtaggttaggagcaaaatccactagaatacataagccacgttctttgttttctacggtttccttttatttcccttattatttctctcctcttactctattgccgccagaggagagacacaacaccgaggcggagaatatttgatgttttaagttcgattcgaacttagtagcttgtagactttttgttccactgcttttgttgtggcgggtaaacgggcacgcccgcgggcataaggtgcccgcgggcaatgggcatgggcaaccatccttacccgtcatgtagtaatgggtatacccgcgggcacaaataatctcaccggcatgggtatgggtaggcactacccgtgcccgtcgcgcccgattgccatccctagtgcggatgaagccgcggtggtggcggatcgaggcgcggaggcgccagatggaggcggaggcggcagatcgagcggcggcgggggcggatcgaggcggggcggcacggattgacgccgcggccacggatcgacgcagcggcggccgggatcgacgcatcttcttcccttctctccagtctaccccctctccatcttcttcccggcgtgggagcagcaacggtttgggggcaacgtctctcccccaacgcggctcctcgcctgttcctcgccgaaaagctaccgaaaccactcgacgctctgcagagggtcgcagcgctaggtgagggtgcggtcccgatcgacgtggcgtgaatattcccctcgggagcagtgagaccactctccagcgtggagcgttgaaaatagcctaaggaaaggaaaatgggcagataaagattagtgaaatacggagcaggcgaaatcggggcttttaactatttgccactcttacggatgttgcttaacgatttgccactaggcccacatgtcatagacacatgagggcccacatgtcattgacagggtgtggcaaatcgttaattgccatgtcacaagagtcgcaaatagttaaatttcccggcgaaatcggccagccgccagtcacaggagcgagaagtcaagaagcaaagctggcgcgaatattcgcgcgacatcaacgccaacatcttccccgtctctctcgctacccatcggctccaccgctaccctctccgccctgccacctggcacccgaatattccttccgcccgaactgttgcgtttacatggccccacatcgctccgcgtcattagatttagcactttatcttcttccacaaagattcgaattttcttttcggtttggatcatcgcaagcgatcttttcactttgagctactgtaccttttttttgtcggcatagttggactaacgatgatgctcgtgccaattgcaacgcagcgctcgtgctacgcatcagtaagctgtagtaaaagtatctagtctagtcgtctaaacaaagcacgtagaaatcaacacggtttgtgcgccgtgctcgtgccaattgggggagcatttttatccatctcgtgtacgtgccggcgccgccgtgttggtggcgagcgcgcggcggccacgcacgtacgtggccccgcgcggttggcgcgggcgtttagccgagagatgctctctggttggtttgttgggttcttttccttttttttgtttcttgcgccgttgcattgcaccccagctcaagcctccctagattccgcgcgcgcacacatggatgctttctccttcctccgcgccaccgtctccgcttccctcgcgtcctcttgtcctcacgcagagagtagacttgcactgctcttttatctctttctctggccaccaagctggttgttgtatattactagtagtaatccgtcgccgatagctgcttcgtgttgctcgatctttgaccagccagtggggttggaggagggagggagctagctatagttgctagcgtgtttacgtttttgccggcgaggcgatcgacggagatgtttgaggggtgctacggcggagtcgggtcggcggcggcggcggcggcgcgggacccgaagccgcggctgcggtggacgccggacctccacgagcgcttcgtcgacgccgtcaccaggctcggcggcccggacagtgagtcctctttgcccatcagtcagttcgtttcctgcttaattttctcttcgcggcacggtgacgacaacttcgtagtcctctagctctgtttcggttggcacttggcaaaggcaaatagtctgctgatttctctaaactgcaatgtttattgcattgttcatccaaatccttttcctctgcgtgactctgcagcttggcacataactatgtagagctgcatggttaattttgggcatgcaaactggttttcaatttcagtgtcaagaatttcattcgaagaatagtacgcaaacatcatttgtcatgctaaataaaaatatcacgcataatccagtttgaacctgcttcctttatcctttatcatagaataattgattgtctccattctgatcgtgcttcctgcaacagaagcaacacccaagtcggtgctcagattaatgggcatgaaaggcctcaccctgtaccatctaaaaagccacctccaggtttgaactcattttcatagataaaacattccatatagctgctcttttattttctgttttttttcgctcagttatattaacacagtgctacttgtattgtaactagaaatatagactgggaaggcaaagcaagaaatcagcaggcctggagctagcagtagcagatagtggtggtatgtgcctaccttgaaatattactgtcatgactcatgagcagaatcaaaagtatcatgccttaaagctaagatttgtccacacttcctacctttattttatcagaatttacagcggaaggcatcagtttttctatcggagcgcctccaaggaatcctgccggaggaaacaacacggggtaactagcaattgcccttctgcttgtcctcataatgcactacaatagaatcatcatagtctattacagctacaatggtatatttgtaatgggatgtaaatcctactgaatgccttttgttatgtgatctttggggatttttaatttccttcagtggaagttctatgagtgtctgactaaccatctttagaacatttctcttgtgaagcagagaaataccgcttgcagatgcgctaaagtatcaagtcgaagtccaaagaaaactgcaagaacaacttgaggttagaccatcgacagcttttgcatcaatccatgagcttctacttgccaatgttttcttccattattgctaaaagtgcttgtctacactcaggttcaaaagaagctgcagatgcgaatagaagcccaagggaggtatttaaaggaaatactagagaaagctcagaaaaacatttccctggatgcaaatgggtctgctaacctctcatcaaccagatcacagattacagacatcaacctagctctttcaggtttcatggacaatgcaacacaagttcaggaggaaaacaatgaactgatgaaacctatatctgatgacaacctaaaagttaataatttgggctttcagctctaccatttaggaagtcaggagagtaaggatgttaagtgcactccaaaaactgaagagttgcttctactagacttgaatattcaaggaggatatgaactctcttctagaggaatgcaagggtgtgagttggatctgaagatcaaccagcagagaagatagagagttgtttcacaaacctaacagttttggaaagttgaccgttcgctattagtttattctttttccatgtgccagtgttgagcatgcttgtgttcacaagtttgttttttctgtctgctaatgttaaatttcctgaaaggaacttctgaataaatatggtattatttagttatttgaagcttcaattgtatatacgagtgaagtgtgcaaaatgagggaacatccaacacagatgtgtatattctatccaagtatcctataaattgatgttttacttttgttcttattatcctataaactgatgttttgtttttgttcttatcaaagcaagcattattaactggtcaaacatgccatccataggtgtattgacttattgaactttgaccttttttttctgtgatcaaacctttggccacaccttatctattcaactattaattattgcaatatgtgcagtaccgggttagcatactaacgctattttttttttagttcagaacacaaatcagatccttagcatatccctcatgtagcttgaccagaactttatattcagccttagcaacaccacaaaaaaatactgataagctgctttcgcaaaactaactagaaacaaaacaaaactattgttacccaactgcataaatgggacaagtaacttttatatcttgtcaattaaccaactgaataatgtttagaaaactaacatcatcttaaagagcatgggaaacagaagattctaataaaactagactaacctagttggatccaatattcataccaatcatgcttgatggccaggattccaacaaatcactttccccatttcgagaggatcaagcatccaaaaattgtgaagcataccgcagccacggagccaaccacgagtgcaaaagcatacatctggcttggaaggttaagtttctcttgaatacccttcaaccctttgtcgatcgccggtgccaaagcagctgcaccagcaactcggaatggcctagtaacattgttaccggtccacattaggataactatctgccacatcagaaaacagatgaaggtcagtctgaggagcctggcagttttgcattttgttttagaattttctcgcaattttgccttgcaacaaagttgcagcactctaaagaactgcgagcaatgtgcagatgagcaatcatttttttttggggtaaatttaaagcaaagccatggaatccatacccccagcaaggccttgagattggccgccgggttcttgccggtgctcttctcgtagccgaggaaggccagcacgaagaacgtcgtgtaggtgacggcgtcgaacagcccgtaggccagcacggcggccaggccgagcttggccaccttggccctcatctccgcgctctccgcctacacgcatccacgcagccaaaaaagaagtccatcaaaatcaaccaaataacgctcaatcccattgattcgacgggtacaaactcaccatccacctggtccagaacccgcccttcggctgcggctccggctcatcctgcaaatcgagcagaaatttgacgagagcttaggtaaggatgggatcccagtcattcagaacctcacagagttcagagttcagagttcagatgtggttgggtaagtgatgagacggtgagagacacctgagggtcgggatgcgggtttgcggcggcggaggcgcgggggatataagcgagcctgctccctgcggtggccgcgctcacggggagcgggcacagtggtgagcggcaccagcggcgcggcggcggcggcgctgggtttccgagcgggtagagggtgaccgcgggacgctgcaggtgtagggtgtacatgtcggcgaaggagaaggcggcggattgggaccggtgagatcgatcgactccatctctgtacgccgtccgcgtcacaacaggcaatttggaagaagacaaacaagatagcatccagcatctaggcaagctgaaatgggaagttggagagaaaattgcatatctaccatcccataagaatggcttcgctagaataccattatgaaaacgggcttcgctggaataccatcctcaaccagagtgtcttcgccaaaatgccatcctggacggaaatgcccctggctcttcttcttcctccatcccgcgcgtgaagagctcgccggcggccatggccatctccaccgccgcgccgatgctgccttgccgacggcgattggggcgctgccctcccctgccatccccacctgcgcctgtgcagctgaggtcg

SEQ ID NO: 25796 - DNA, 58704 bp, Oryza sativa
gtgccagccgccaccgcgccgccctacgccggagcccgcgtctgacgccgtagaccgcgctagccgcaccacgccgccctccgccggagcccgtggccgccgccgtcgaccgcgcctgccgccaccgcgcagccctccgccggagcccgtggcgagctagccatggcaggagggagctagccatggccgccggcgagctcttcacgcgcgagatggaggaagaagaagagccaggggcatttctgtccgggatggcattttggcgaagacactctggttgaggaaggtattccagcgaagcccgttttcataatggtattctagcgaagccattcttatgggatggtagatatgcaattttctcgaagttggaacattaccaccagaattgtgacagacatcaaatggacaaaactatgctctgacctgctttaacaaaagaatggtatgtagtatatataactcagctgccaatagttcaacgaaagaaattcaggtgtcattacatccaagaatttagaaagacacttgccacacataagataggggatggaatatatgtacatgaagcagtgcggcgtacgaaaaacaggcccaattcagatagagttggttcaaaaaatctcctagatttgtacttcaaacaaggagactccttatttttcagtacttagtagttactagtagcaattaccaaatccgatacagctaaagagctctcatttgctttccctgaaaaacgaagtatactcatttgatttgattattagtgatgcaaatcctcggcagtagacaaacatcctcagtgatatccgatcggcgcaggggtctgcttcagctccatgccctggtaatggatgtcctgcacatcacaagccagaccagatcacacgtcagaaccaattcaacatacatccccaaaaggcgagatcaaagagcaagatcgctgatcatgcatgcgtaccgatgcgaagtgattgacgtcgcggtggtgagcctcgtcggcgcgcacgacggtgacgacgtccttgagcgtggcgttggcggggaggcgccagtagtcgatggcgatggccggggcagggacgttgtcgatcttgccggcctcgaggtccttgaggaactcggtgtacgagtggatggcctcctcctcgaggtagccgacgacgcggtgcgcgaacttgggggagaggaggtaacccaggaagtaggcgttgaagaagacgccctggacggtgatgacgagggcgcgctcgtaccactttgggttcgccacctccatgaaggtcatcaggtgcatgcgctcgttctcggcctcttccagcagcgtgcggatccagccgccgctctgctcgaagcgccggagggaccggaggtggagcagcatgccgcccaccatccccggcaccgccgccaccgtctccagcatcatcgcgcggcagccatacctcctctgcacccaacccaatttgcagtgttaaccattgacagttacagcaattagcgaccgactagagatcatttccacatactactagaaatggatatcatgtaatataattgttcttccaaattagtcataagacattagaatcatatatagattaatttgcactaggaaacaattggatcaccagtcattgtagtgcaaacagtaataagcctatgattgatttaatgggcaagagattaacaaatcaaagttgagtccttctcacaatgcgtgtccttttcttagccgttgttatcagatagtatagcggaaaataaaaggacagggattttctacacctaagtgctatgacacccatcatttgcatgcgactcaaatagttatagaaaaaattgaaaaaaaaattagtaacatcgattgtgatgatataagtctatacacaaacatgcatgactaaatttgatctataactagagaaacaaaaataataaaatcagacagtgaatagtacccgaagagcgcatataaaatttattatttttgtttcttcatatgttgatcgaatttagacttacatgtttgtataatgtttgtaaatttttttataacggtttaaattgcatgcatacacataggtgccatgttacctaggtgtagaaaatactttccgaaaataaaatcaatcacacaggtggatcaggtagaacccaggcgtcctaaatacaaatggcatcttcccggaagcaaggaaaccaaaattctcaagtgccctggttgcaatgctactttgcctcttatgacacgccaagagtcacgcggcctctcagtttttcccttcgaaaaaaacgttgaactaaacacacagcgctaatcacccggagaatcaaacggccgtcgggcggtgcatggtgatcgagtaagcacaattatacctggaagaagatatcagtggggaagcgcagcgacttgacggtccagtaggcgatcttgtcgagcagcgtcttgggcacgtggtgcttcgtcagatcgatcgaagtgtccgcggtgtaggtctcccatggctgcggagaaaatcaaaccaaaattacacacggcggcgcgacaagttaaggaccgagcctactatctcggagtatggatacatcgatctggcgatcaatctacgggacaaacagaatcgaaacaggaaaccgatcaggagcaaagcgaagcgcaagtaccctaaagcaagaccacttccactccgtgccgtcctcccgcaccagcttcttcgactgctcgatgccccagtagctgttgaccaccacctccttctccgcgtccgccttcttggcctccgccttggccgccgcctccgtcgacgccacggacgacgtggacatcagccgcaacccccacaccccggggacggcttctccgcctgcaaggaacggcctcgccgccgccgccgccgccgccgccggagaggtcgccgacgcggtgaagaggcggacgccgccgacgtgacggaggatcgccgatccggccatccgggagctcatcgccgccgttgatgtaccccgaaacgcacggcttgacaacaccaaaaagtttgggaggaattcttagaggcgcctttttgttgacgagatggttgcgatttgcaaatggagagggtttttttgggagggttttatatagggaggaagagcgaaaggagaggaaccggtggtggggccacaccgtcagtgacgggggagatgggctttcctcgggctttcccgactctgaggaaatcttttcttcttctccaagttgatcggttagtagtactgtagcagtactactaattcttgtgattttttttttcaaactgcctgtgactaataataaaaggttcacatgtgttttatcgccaaattaaagtatgtgatgtgtcgttggtacacgcatcacatgttgattgagttttttttttcttaggatggtactactgcctaatatcaaaagaggctaatataacaaagtgcacaaagtcaatgtaaaaaaatgcgtcacttgtacaggtggagtacaagtgtacgtactacaagtagaatattccgtttagaaccatttcacaccaaggatagtaatgcgcaagcaatttgcaagtgcccggtagtacaaggaaaacggaacgtacaacaaagccaaagccaaactggaaacgaatcctgattctgttgcttgtcttgtggaccaagaaagactccaaccatccaggatggcagtcaaattaggcaacttctattattagatccttaatctaaccactgacaattccagaacgtgactaaacagctctattgctaattgcgactagtatacgcagctagaaacatctgggatgttgcttttggaaagtgcctccatggcggtgtacgtacgtgcttgccacatgaaccacaatctgaataagcaaacgtgtcaatggtgttatcgctcatgacaactcagtaagtgtttatacgcccgtaatatataacgcacacaagggaaataacaatccagtgcttgtatgcgcataatggacacaaaaggaaatatcaagcgtagcgtgggcgtggattctaaggggacatcccctcgtcggtttaagttctaagtttaacacgggagctcaaatttatttttcagtgataggtgataacatttcacagcgaggtgcctatatggtatctatatggtatataccggtccagtcttcgtctgccaataataatgaatactaaaagaaaagggattaaatgtaacacaccaactttttattactgaagtggagagggaatattgggatgaataaaaaataatcgacatttaaaattatatcaacttatggcacctccttaattaaaaaatgtaaaatggcttaaagaaattatttttctacacttacttccataaaaaaaatcctgactgatttttcaagttaggagttgatttttctaagacagatggtgaattgcaggtgagccattgtgtttgtgcttctttggtgatttttttctgagggcatattgaaatcaagagtccagaaaaagaaaaaagtttagtgtgaatggtatttgaacttgtctaaaagagattccatttgcctttacacatttggactggatgtttggtcttggttgtgtgcacgggtcagccaacggccatgcttcctttgttagcagcagagcatcttgacaagtgttacctgctgcaattctgaacacgtggatacttctactccaaaaaaaatcttactatattgttattcacaatttgcataatctcagcatgcatataggtacaggcataaaacggagtgacaatagcttatttacatatatacacagaacaaagtttatcccaaataggatgtaaaatacgcatgtagtagcagtgatggtgatgaactgagcaggcatcgcccgttgatgaatgatgatcagtgatacccgataggcgcaggcgtatccttcagcttcatcccctgttgctggatgtcctgcacaagtgatgtaccaacacgagaaacgcgatcggttagctcaaacccgttcacacaaaaattaagcaggcgagattggttgttttcaggctggcatatgcgtaccgatgcgaaatggttgaggtcgcggtggtgcgcctcgtcggcgcggatgacggtgacgacgtccttgagcgtggcgtcggcggggaggcgccagtagtcgatggcgatggccggcgccggcgtgttctcgatcttgccggcctcgaggtccttgaggtactcggtgtacgagctcacggcctcctcctcgaggtagccgacgaagcggtgcgcgaacttgggggagacgaggtagccgacgaagtaggcgttgaagaagacgccctgcgcggcgagcacgagggcgcgctcccaccaccgtggctgcatcacctccaggaaggtcatcaggtgcatccgctcgttctcggcctcctccagcagcgcgcggatccagccgccgctctgctcgaagcggcggagggagcgcaggtggagcagcatgccgcccaccatcccgggcaccccggccaccgtctccagcagcagcgcgtggctcgcgtgccgccgctggaagaagaggtccctgggcaccgccagcgacctcaccgtccagtacgccagcttgtccgggaggcccttcggctcgtggtgcttcgtcacgtcgatcgacgtgtccgacgtgtacgtgtcccatggctgtgtcacaatgcaaaagaaacacacatcatgaacacgatcaaatcgagaattcaccgtgcaaaaaaacaaaaaaagaagcgcacacatcaatggttgatgagcgcttaccctaaaactgagccacttccattccgtgccgtcctccttcacgagcttcggcggctggatgccccagtagctcacgacggccttcttgttctgcgggtcggtcgccgccgccgccgccgttgccgccggctccggcagcttctcggctgcgccttctttgacgtccgcgccggcgctgctggtgctggccatccgcgcggggaaaatcctcgcggcggcgggcatgacgcccctggcgctcgcggcgagcccggagtacacaggctcggcggcgaacaggcgggggcccaggtggcgcagcagcgtcgctccggccattcgggagctcatctcggtgactaaactaaactaatcacgacaacaacaaaggcttgacttccgtgtgatgattctcagagcgccaaaaaggcttgagaaaagttaccggaaatgagaattctttgtggttggcttgtgttgctgtgataggtggtgtggcgggtcgatgtgattagcgggtgcgttttatagtggagcatcccgcgccggcgcgttgcttcctggacagagcagggcggctatagttcgatttgcgttgtagaagtaactggtcttcgtcgtcttcccggggagttcgcgagggatcgggagagcaggtcggcctcaggtgatgcactgatgccgtgatgaggattacggttgacctgacctttcaacgggatgtcgtttcttggtttgccgctgaaggattctgctgcgcgatggtggcacgggtgagtgacaacatggcaacgaaagaatcctgcacgtcggtttccttgaagtttggcgaccggtgctagtcaaccggcgaagatggactgacatttcgccgtggctggaaaggagaaaatgtgaacatctagtaaaccagaagatcacttgcatgcgcagcaccggtcctggaaagttcgacccgatatcaaaagggaaggaggatagcagggagaagctgcagcccgcaggcgttgagtccgtcagaaatcaaagagttcctgcggagactagtttccgctccaaaattatttttctataattttttcatgaacgcgaaaaagattatacgtcaatatattactcaatgtaattagctagaccaacttataccaaggagagaaaaaaaacaaccaaggaagaaaaatataactcgtacgacaggtaacgctactccaatcagcgggagagggcaaagccacgctacactttcaacaaatccctaaaggaagcaatgcctgctaacgaccacaaccgatcctccgaaaggatggattatttttcttctataaagaaagcccattctgaaaatagtacgtgtagtaagcgttgttttcctaagaaaaaatcatgataaacacaaaatactatataatttttagaaaccatctaaatgtccatgctcgctacagataaaataatgtattaatgtactttcactttttgctatagagaatattcatcctacttttattttttttaggagctacccatttagattcgatctttttaatattaaaaagttcaggagttaacttgcaaaaatttcaatgcagtaggtgaagtagcaaattcactattaccatcactactttatttctaatttcttttcttttaaagggatatagatttactaggccgtcaattcggcgtattaaactatgataaattttagctaaaaattgtattcttccatattttttcggtcgacggagtactattgcataaaaggtgttacaccatacttttaattgaagatagtcctaaatttcgagcaagtctagaagaacaaggtattataggtgcagttagttcaactattacctgtgcatcgataagagcaagattaatagtatagccaactactagctccaattcatctatagtcaatctaataactcatttatacaatagttacatactatactattaatacatggtcccacctgtcatatacacactgcgtcttagagtccgtactacagctgactacaaatatgtagcccgctgctcttctctccttatttatctccttaaaatatgtttacagctggcttatagcctgctattgtacctgctctaactaatttcaatgcagataattgttccatttaaactcaggattacatgatgatgattaacccagtaaagtgtggaaagtttttagaatattagctgaaaaaaatatctaagtggaacaatcaatcccgcttgtaaactaccagtatatgaactggatagaggttacaacttactagccattgcttctccacaaaaaggattcgacggctcaaaggacttttaagttttaagcccaaaaagggacctcatactccgcaacacgcggcatggttaaggcagcagcatttctggctgcacacatgtaaataaagaaaattttcttccctcaaggaccagaatcggctgatatcatatacagtgccgcaagcgtctatagtttacaagaatctctccatgatttcataatctaacagaagttctttcaatccaatcattttgctgtactgcaaagtaatccagccaacaacggatacatatgctacaagaaggcaggcacgcttaagccgacaggcaaacactctgatgctatgcttgcttacactggacccaacaactgcaaggactagtcctcggagacttctgagtaagatagtgatgagtaaggcactcaaaataccagccacaacccctgccattacgtatccaagcattccaatggaattgaaatcctccaacatataggacttcgataaccttcataatccgacatattggagatacaatgagcatcagaagaacaaaaacattgtaaataaataatgcagatatgcaagcaaattatgtgtctgaaaaggaagatatttagttccaacttccaagtattcaccattctgcagtctgcagattaagcagatctgggttatcatcatctgatggagctaatgttgataaaacaacatgcaatgttgatgcagtccatatatgggaatgaagcgaatatacgtacaatacaaatatcctcttgagcatctcaattgttgaaggttcttcgctggtgcaattgaacagcctatctgaataaatatcagccttgctacttcccaatgtgtatctgcaactatacgattcatttacctacatgaaaaaatggtgatgaaaaggaaatgtcgaaaaggaactagtgcctccaactaaacatgaaatgagtaaaaggcatgaatattcctaaagatccccaaaaccacgaggaaattttaactacaaaagcatcggtaaatattacatctagcagagaacaagatgctaagtagtacactaccttgaacttcaatgttgttgaccatgcaacaccaaagtcaggccggcaattcagcggaagagcctcctttggggcctctgccaccgcataagatgtctgaccagaaaaatattctgtgtattcaacctacagcaacataaaagcagaacaaattgaataaataaaaatatctattaaaatatgtaataaataattgaaaaggtgataaaaaaatattgatactaagctaaacgatggacagacagtaataagcaggctgtgcaacgctgcaagtcgatgcaaatctaaggaagttgtctttgcaaattaatttatgcataaactactaagaactagaaaaaagctataactgtttgtcaataactgggagttgagctattacctataatttgtaagcatcagttaaaaacatataaagttaaatctagaggcattgaacatgatatcagcctcattagtcatactagtaacagttaacgttagactctaaagcattgttgtgcaagcagagtggcagaaaagcagcaggcaaatgaaacatttcatcaatcaagtgcttatagatatgccaatgacaaagtaaattatatttttttaaaaaaaataacaccacaatttctcacctcaaagactgaagcccaatagtagtcatcatggcatcgaaattttctattactcgaggggtaaaatacatgcttagctctatagttcaacagtccgagctcacaaacttttgatgacctaagatcaacacctgaaatgtgccgacaatcacatcaaagctagatcagtccacacatattcaactcaagttggtctagacagaaaaaaagataatccataaacattagtattcaagaacactaactccagtatactagaaaccaatagccaatgaacactctacaatagtacaactaagtttctagaatagtaagtcagcaacatgtcacaataactattacatttgtaagaagcatgctaaaatgtacatcacagaacggaatggagcttagattcgcattaaactcttctctcatacagcctagatagcttatcctcgtcataattcaagaactgtgctgtccgtgcacaaatcagttagctctagaactgtaacgatagaactaaatcaggaaaggactgaagagacaggaacggccactgaccggtggaaaggatccggcaggtggaaggcatggagacggacgcggtggaggagagaccaccaaggacgagacccgcgagcccgacgacgaaggagaagaggaatgacgccgcgaagggggcggccaccccgagggcgccgcggaccgcggcccccggccgccgccgtctcggctccgccccttcggccgcggcgacctgtggcgcgggctcttcctgcgagggatccatcacgtggacggccgatccatcggtcgaggggccggcaagcggcggggtcgccggactccggcgatggggaaggtagtgcacgtggagtcgggtcggactcggagggtgggtgggtggaattgggcgcaagcggttgtggtttttcttgggctaagacaatttgggccgctcgtgtggccgtgtagagaccttcagcgcagtaaactagtacaaattttaccgacgtggcgtttattagtgtggcccatgtacggcccacaggaatttatttttgtgtggaggattgtacagcttgtttggcaacttggactaaggagatcgggaggttataggagagaattgttagtgagatttaatatgaaaatttgatttttaatcccgctattttgttggtagatgtagtggaaaatgataaggagtccaaatgaagatcagatttaaatgaaaacgaatgactgacattatgacatttgtttagacaacgtaaaagagaattcctctcagatttcatagctgagtataaaggaacggagggagaaatccggtaaaggatttgacaagcttacgaataaattgaaccaacgaatatgaagatttgcgttacaagaaaaatttaagcagcaaccaggtgagaacacatcaccacgttatatatgttgtctacacaaagagggacacagcatcaaagatacatttcactcctatccctaccaactttcactattttgttttaccttgcactgtaacaaggataaccgatcagcaactaacagcggtatcacctctccctaatctatctccctttttctcttgatctgctcgactcatgcatagatgcatgccttgttacagatactgtgcttgtattctgtctctgttgtgctcccaccaaaccttcgccctgtcctcaccaaacctctcgcggctgcagaagcagagaatcaattgagtacgattaagcatggatcaatcagaaagtagtccctaggcgagtatatacatgaaattctggttagatttgaaagatttgtgttggtgacatggtaaacctaagatgttttggctatccgtgcgtgattagtgtatacctgaaccggatgcggcggagctcgcgggtgccgtcgccgagctcgcggatagtgaggcagacgcccggctcgtcctgctcgatccactcggtcgcctccatgtcgctcgcgttgctgatggacacggaggcctcgtcgcgggacgaggtggtcccccgcgacgggtcgtacaacgatgggacgccgccgcccgccgcggacgggccggccgcagcggagttgagcatgttgaagtggtgcgcccacacgtggtcggacgggtcgggcactgccaccgatgggtagcacgccgctcttgtggaagccgccgccgcggcgtaattagacgccgaagccgccatcgccttgcacgacatgctccttgcgatcggctctttggccagcgacgacgacgtcgccggcgtcacgaccggactctcccgggtcgatccgcccctggagcagaacgatgattctctctgcattcatgcacggtccagatttttcagtgagttgcattattgatcatgcagatgaaaacaacgtgatgatttcgaagtagcatagaatgcccgtgaaatctttgaagggcgtagtaccgaccagaatagagtcgtcgacggaggacgtgggagtggacacgccttgctgccggccgctgaacgtctgcacgttgtacagctcgacgatgcggtcgtagttctcgccccaccaacgctgcgcctcccacttgttaaaaatctctcggctacacacaccaatacgcacgtgcgtgagagttaactctggacaaatcgctcgcacacaatacgtgcagagaatacaatcaaccgtggaaatggagcagatatgatcagtgtcagaacctgaaccggatgcgcttgaggtcgttgccaccgccggggagcgtgacgaaggtgatctggacgccgggctccacctgcgccgtccactccctcggcacggcatcctccacgacggtgacgtcgtcggcgccggcctcctcctcgatgctctgtatccacgtcgtgccgccggggctcctgccggcatcctgctgccaccctcggttgctcttgctcctggtcatgtcccatgtcgccatcgacgtcgacgcggcccggacgggcggcggcggcgccgctctcgtgtacatgtaggcctcacctccaggcctggtcgtcgtcatgaacgcggagtcatcgatgaagcccgggtacggacggcggtagctcctgctcctgaacgaagggctaccggccgtcgccgccttgtagtgctgatgcttgttggagccggagaacttgagcaccatgtccttgagctggagacaacacattgcatcgtaggagcctagttagctaccactcagtcacgcgagagtcacttcgcgagtgttatgtgcatcagctctcactggaattactggcataagtagctatcacatcgtataatatctgtgatacatttacatgtgtcaatacttagcttgcttggatcaaaagtaaatagttttttaatcatgaacatccataaacatgtgtatccatatgtgtgacctttaaattagggaagagtaccgagaatgatgcctgctgaccgatgacctcatatgacaaacaggtttaaatcaaaagtggccactggctgctagctaggtcacaaaaaaaaaaaaactagtagtaacacacaaatatacttggtacaaattaaggaccacactaactggctagtgacactgcacacgacacaggagggaaatctttacccttttgtctgaatcaaggaaccgtggcatgcatgcctcatggctgcatatctatcgcagcctaagctcaaagcaacatagtaaccggtgcgggcgataatgacagctcgtcgcgcgcaaaggcgcgcgcggcccggccgctcgctggctcgctcgatcgcagcacatgcagcatgacccctccaccgcatggatggcatgcatgcacgcatgatgcgttgcgtgcgccgtgcgcgctcgcttaaaaagacacgagacgcgagcccgcagatgcaagacgcgagccatacgcgagacgagccgcgcgcgcgtttgcgtggcccgcggccggcggccggcaggtgcaggggcccaggctgggcctaattaatccgtgagtgtatagctcgcgtcgcgtgccaatgcaccgtggcccgattcgtatccggctttattccatctccattgcagcaagcaaggcagatcctagttttagactttgtgttttgttcgtggctaactttggcatattcctaaccttaggtaaggcatatggtcaacagaatactgacgacaccaatgaccaaggtagataaggaatcaaatattttgatgttggactatgcggttggaaatataatctgacacaacgaacgaaccaaagaccacctaagaaactagggcggagataaatctaggacaattacggcctgaacctttggtttttgtctccttattaatcctttgtaaatccattcaaatatcatgagaattttgaagatcgaacagttatattggttaaaattcttggctccttctctgtaagaaacaacggcatgcttaagggcttgtttcatattgatgccatttcaaatcgtatcttttttctataaagctgtcaaatatatatatccatttagtttcttactaaactctgataaataaataagaaatcttgccaaaggcaatattgtcaacttgctaaaattttagcgatgctaaaatttagtaccacctccgttttttaatagatgacgccattaactttttcttacatgtttgaccattcgtcttattcaaaaaaattacgtaattataatttattttgttatgagttgttttatcactcatattactttaaatttgatttatatcttatatatttgcataaaatttttgaataagacgaatagtcaaacatgtgagaaaaaatcaacggcgtcatctattaaaaaacagaggtagtaagatttatttgattacaatctgaataggccttgagacgtgccaacccaagacatgtattcaaccaaacacccccttagaaacaccaccaaagcatgcctttctacaagggaaaaagggtggacaccagccaaccatcaggcaggcagccacaggggcactttgtatctaccttatgggcatctctttagggcaaagggaatgaacgaatgagaaaagaaggggaatgtgtgtgcatagcatgggaacaaaatcaagccacgatgtggttggcaaagtggcaaactgtccaaagtttaggagtggtggcgcccggccggccggctgggatggggatccaagcagcaaagacattaaagtggccttaattctttctcccaccacatctactcatcctcccttgaccagctttgtcgaggaatgtcgccagaatttatcgacgttgagtgctaaagggaggcgattgaaccactgtcattcacatcgtacttttgggcatggctcaacatcaacatttcctagctactgtagtcagcagttgtatcactgttgtaaagttggacgacgtaggtataggtttttcagagaaaacacatagtcttagctagggacatcatgctgatctctgctcgttgatttgtactacctctgacaacataccaaactagtttaattgcctatgatcagtactaaaaatggcttttcttaaaacgtaaaatgtcataaagttgcatacttgtatatgcagaaatgaacaatatcaatccattgtaacttgtgagaaggtacggctagaaattaaaagcattttggagtatgtttgcataggacgatcgagagttagatgacctgagtataggtactcaattgattgcgtctgtgtctgcattgcgtggggcggcggaactagtaatcctatgattccgtaaaggggctaagggccaaaataaatggcagtcatggctacagaaacttgctcgtttaatagtacctagtacgtacacggccaccgtaccaggaaatggcgacggacgctttgctagtagtttgtctctatcacacgcacattacttcgtcagttttcaaccaccgtgactttggactctttgccaacgtacaccggctgatcgatctgcgggtgacctaaccaatcggacgaacgaattcaattcagttgcaaggttgcaacacagcgcatacggtcccagatcggccatgcttgggcaattcctgggcattgctggtaagtagagtactgtactctctctctctctctctctctcttttttgtgacatgggtaagcagagacagagcactagtggtatactactgtacagtctcagtggtcgtccatcttggctgccacccctggtctccccctcgtctattaactgctgctactactatctcttcctcatacagacagagctagtagcatgtagtagtacactctatatactgcagtactgatggcaaagtagcaggtgtaaattcgatccaggagtagcatgtacgagaagaagtttagatcaagacgaagaagaagaagggacagacgggtacctgtgaggtgagggacttgacggcatctctgccgtgaggcgtggccgcgccacgggacccgtcctccccgccttccttggaggagcacgcgatgcatgccagcatcttctctgaccccctctccctatctgcctccctctcctcgatcgacgacgacgagacggatcaatcagtagtcaatcgctccccccacaatctcaccttgtgtatcgaactgcaaaagtgtgtgcattagcgttacatatatagtactaccacagtacggctatctatcagaattgaagccgctgtaacgaaagatcaagtttgatcagacatgccgtcatgtagacactacagcccacggctacagttgcatgcatgcatgtgatagaatgtctatccatgagatggtcaaactttgtcgttgttcgcatggcaatagtacacttagtacatgtatagtacacatttccatgataattaaacgagtgcgagatttcgtgtatccacgcacacgtatgtacgaccaaaataaatacacgccgaaagtacgtactcctatcaagtatcaacagtgacactatcagtctagtatcctctagccatagccacaatctacaatgtactgtaataacgtaaagcggtttccaagccggtgtgtgacgccattctagtaccacacaccatttggaccagacgtgccatgccatccttgcatctcacatgtaagcacgcgaacacgacatccggtacactatgcgagcacagagctatccggccggtccgtgaccacgcacacgtgcgcatgcgtgtgcgtcggaggagctgtccttccggctcgttgagcaacagagagcaatgcaagcatgcgtatgtacgagagatagctatagctagggactctggtctctggagcttcaattcgccaccggcgtcaaaacggggcaagctggctggctagctggtgcagtggagcactggagcctgcagcgacaaaaaagtatagcaccagcataacaaagcaagcaagacccatgccaatggcagcatcacagtcgttcacagctactcctgcatgcatggcatgcattcgcaggctgctctaacacagtggaagaaacgctacgcggggcaaagcagatcgatcgacgggcacaggcacagagattctttaatcgccatgccacatgacacacacacatatactactagtaaatcaaaactgaaaagcaggttgtagtagtaaaatacggtcagctacattgcggcagggaagcttctgatgtttacgcgcacatggaaatttattaaccaccagtgtgctatggctagctagctccgcccgtttgtgtatgtgttgtgcacagtgttcatgcagatgaggcgcagctacccacgcgaggtaggcaggggcgtatggggaagactccaaacgacaccaacagcagtagctcggtggacgaggcagggagccgctcagatgtgtatcagctacagtcactgcagctggggccccacgccctcccccagatcaacgtactgcctggactttattttttttttcctcctgctccatccctaccgagaaaaatatgggccccggctaaagcgaccggctatcgagtgactgcattgtggagcccggtagggtttttgctgattatcttttgcgcttttttaatagaaacacgacgtgataaccttaaacacggtattgtgtgtgttttcttttggccggtggtagtaatttcttttgtacagtagtagtatcagctagtaattaattaatgttgctgtagagggagagagaaatgagaggcacagtgagagtgatgagatgatgcttacaggtaactgacggcccccagatagctacgttagccacagctctctctctcctccgagtttgctcgccgtgtaaacagtgtgcgtacccaaaccacctacgcgcgcgctgaccgggttgctccgcctcctcttcctctctctccggcgcctgaaatgatgcagacaaaaatgtgccaaaataaatatgtatacgcctagaagcgagagcgggatgcaaggagaaacggccttttatttttgacaccaagataaacggactttgactttctggtgaacagaacagggtaagaaacggcatgcaagacgagaaaacaaaacatagaaaaagtgtaactcaacacacacacacacaaaaaaaaagcaaagcaaagataagacgaagcatcaagcaagctggttgcgtgcgtcgccgtcaccaccattaccttctcctccacgtcgccggtgagcgaacgagcgcaatttgcagcccgccggtcggcttcaccttcgccgccctttcggtttcgagctctgcctctgaatcgactcagaagcctttggagatagcacagagagaaaggcctcccttgtctggtcgaggagtggatgcggctgcgtcaatggcgccaaacacagcggcggcaaagatatcagaagctacgcagcgacgctgtcgccgcacagaaacaatctgggactgagtgggagattcctctcgcagtcgcaggagagaagagccacgaagcgagagagagagatcgaggtggggagggagagaacactgcgggcgtcgcgctgggccgtcggatccttcccccatatacgacgagagggcgccgagtgcacaggcagtgcaagccgtctcgtttccggcccatatatagtccctcccccacgggacacgcggcggtccccgcgagatcgcggccgtccgatcctgcgcggcgtgtggtcatctccctggtcctgggctgggccccacctacggtgattcgctgcggggcccgcgaaggcccgggccccggcacggaccgtggcgatgacgaacgtgctgccgtggcgcgatcaggaccgtgcgatgtgatgcatatgctgacggggctttgtcatgatcgaggaccgtccgatcttgatggcgcaaagtacgtcagcgtgtgcttgcaagcccaataggcgagtagcccatagcgactgacggagcgtggggctcctcaccgggagaccgcgctggtccccttttgccggttcggccggggaccctgggtgagactctaagctcccaatttgtggaaggttcgcgagacaggaaacacacaagacgccggcgatgtatacaggttcgggccgctgagaagcgtaataccctactcctgtgttttggaggatctgtgtatgaaggagctacaaagtatgagccagcctctctcttgttctgggttcccaatctggaaaagtccaatcatcccccctctaagtgggcaaggtcctccttttatatcttaaggggataccacatgcaccatctccccctctctttcttccaatttgacttctcttcattaacagacggagatttgcatcgccgccgtccgaatgaccttctgatgggacggcccatacctacctccacttccgccggaggcaggcgcgacgtgggaagatggctgtctgctgatgacttgaccattgtcagaccggtcacaaatcggtcattcttgtccaccacgtgtcagtttaacaatctgcatgttcgcccttcttcatacaatatcttgcctgtaatggttaggatgaagcctggcatatatctgaccggaaccaacgtgccatctccaggagctaacacgccggctccagctagggacgagtgcttggaggctctcgtcctgacgggatggggcgaggcgtgcgtcagaccgcctgtcgccacctaacccatgatctgaccggtctgtgactggtcacagaccggataaacgagcgtgctgtactgcgatacaggcggcgtgacgcgctcgtcaaaactgcaataaatgtggttaggtgagccccgccatgctcacctaccccatatacgtggcgcaaaacccacaaggggtcggggcgcttcggccctcggggccgagacgggagcggtccgaccccttggggagacaaagagaagggcagccgtatcaccctcgggcccgacccccccccccccccgagggagttaggccacgtgggtgatcgtgtctgcctcaagtctctaagtcatgatactcccggtaaagaggagggcgaacacatcaccctcgggcccgacgccccctgacggtgccaggtcacgtgggcgattgtgtctgcctcaagcctctagtcatgatactcccggtcccatgtcaccgacagcgacgatgagagagacaatcagagcgacaagtagacaatgccataggctattagtattaggttcacatcaattaataaaccgtacaaattactatagggattaagatcacgagcgtctaaaatgaacctctcaaatgacggattcttcgattaattgcggtggtggaaagccaacgacgattaataggagagcaaaaacatcgccgtccgagaggaaatatacaaatcaacatcacgaaatgtataggtaggtgggaggttggagcagtcaatttttgctggagacagtcacggacatgtgtcatgtgtggataaattttgagattcagacttgtacatttttagataagttcagtttgaattttattagctcctgtaaatatcatttgcaaatatttattatgcagattcatagactatagttgtacaaaaacatggcgacgtgaaaaggatatgagaatttctatattaaaaaacagtatagtagtatatcatacgagtactatacgatcaggttctgtaatcttttagtaggagtactagcactggcacgcatccgagctatgcgcaggcgcgcagccgactagtcctatctccgttcgaaaccattgtgcatctgatgaaaacagttactcagattcccggttaaatgcatgagcctattccatctatctaccgtcctgtacctacacatgcgcttcttctgaacaatttttaaaccagcctccgctgttcactgcttcacgaggcaaatactatagtatttggatgcttcttttctcagcttctgtacgtacggcggcacagaccaccctgcaatcatacatggctgtgcacagcagccaagcgcaccggctagtgtgcttgaccgaaccaaaagagagatcaaaggatatcgaaatgaaatcataaaatactccaaaaatggcgtttctgcctttttcccgttcaaagttcaaacaggagacggggagaaaacggtggcgtttctaccgattgatttgcggctcgttctgattctaatcttatctcgatctgacgatctgcatagtttcttgagaaagcatgaatacggaaagctagctagcagcatagttgctaacgttatgacagagcgaaagcgaaagaggaaaaagcggcaacgtgatcgagtgatcgatcggtacttaatttcttgagatcgatggcaaacgaactaaattaaaggagtttacattagtgtgtggattgattttgagactcgtagtacaactcatctgaagttgccctctctttcggttcgccaagcgtcgcgacggaaagcgtgcggagtgcaagatcgatggcgagggcgagagccccccctcccccccccccccaaaagccccaaccacgcacatctggcaatgtggttttgtgatcccaatgagcatcacatcgcgcagcggcgcaggcgaaagcagattccaccgccagaacgtcgtcgacgaggacgagtgcaactctctcgttctccccgcgccgcgagacggaacggaagcaacgcgcatttgcccgtcccgcattttgatgccgcgcgcattgctggcttgccggccgggcacccaccagcggcgcgcgtcccggcgtcagcgcggtggcgtcgcggtcaaagtggcaaatcaggcacgtcagtgccggtacggggcgcgcagccttagactgatcagcccggccagccagcctcgggcggatcggggaggccttttttttgttcccgtcgagttctctgattctttcgcgttttctcgatcgatctcgcctgcgacgacgacgacgacgggcaaggcgactttggcaatttggcatggatcgtgtcgggcgagcgaagccagccagccagccggccgcccggccaggttcgcagaacgcataggagtaagactacgacgatgatccagtcgggatcgagccagtgatccacctgctgcgccgctgcatgcgtgcatgcgcaaggtcgcaacttttcatggcttaggggcctatcgctagctcactgtgcccgcgactgtggctcgtttgtccccctcggccccaaacgttaattcaaattttttagtactaactgggagttttttggggcagtttgcgagaaacctagagatcattactgtggaagccacgcgttcgagctcgagacaaaagcctaaaccagagagtcatccagcgtccacacgtgtagagtttgccgttgtacaggacgggtactgtggtgtcgtactagctaggccactggtttttgttctctgttttcgcgctggatgcttggccaaagagaggcggaaggggtggaaaatgactagacgaccgatagagatgcgtgtttgtggagcggacaaatcgaggttttttggggtgggtaaagctagcagctggctagccagcgagcgagcaaatctttgatcaggaaaggaggtaaaggcgaggagccagccagcagcaacgcaccaagcctggcctggaggagggacgggtcatgtggtttcgcgttgccgaacgagcagcctttcggaaaaggccactcgagtccacccaaaacccatgcgacgacgagagtgactgattcgagtccaccgagcgcgcgacctggtactccccgtggcacggcccgccccgtcggagccacacgaactcctcgacgcacgacacgcgggcgcgtgaaagggatcgcgattcgccgacgtctcgtcgtcgcgccctcctcgaacgtttcgtgtctataccctcctttctctctagcttcgccgtacgcgagctcgcggcgccagtgcgcgtcacatcggtgtcgcgccattttgaggggctccggcatgaagggacgatcaatcgatcgatatcgagatagagggctagtttagttcccaaaaattttccccttcacctatcacatcgaatctttggacacatgcatggagcattaaatgtagacaaaaagaaaaaccaattgcacagtttagctataaatcgcgagacgaatcttttgagcctaattaggccatgattagccataagtgctacagtaacccacatgtgctaatgacggcttaagtagactcaaaagattcgtctcgcggtttccaggcgagttctgaaattagttttttcattcgtgtccaaaaactccttccgacatccggtcaaacgtctgatgtgacacccaaaaattttcttttccccaactaaacacagccagagatagcgagagcgatttgcgcagcattgaccgtgtcaggcaagcgaggcgcacggccccagcagcgctgcagcagcagcaaccaaaggcgttgtgcgcaccctgcgtctctcatcactccatcgcctgcgctgcgtgcttttgccatctcgctggcaaagcgaagtacgtgcgtacacacacgcgtgcgtcaaagcgagcggccaaagactcacaccgtcgcacgtaccaaaggacacgtacgtgttgcatgcatgcatgcatgcacgcgaccgtgcagcagccacacagcccgcagcatgctgcgtgcgcagcttgggcgtgtacggacgtactcgcgatcgatgggagcaatgttcaggtttgtctctgcggctcgcgatgccggcggccccgggcgtgtctcatgtgtggcaaagctgagcgcatcggccggtcggcactgccgcggcacgggcagcggcgcagcgcggggagacaggcgctagtgcggtccagagccaccacgtactccgtcctgagtccgagtactgtgctacgcgcgcggtgcccggcacgggctttggcggcgtgtttgtacgtacgctctgccaggcatgccgcagttggtgcgcagcgatggaatgcttcggttgtcatgcgcctctggtacaccgtacactggtacttgcttgatcgtctcgccgcggtttgacgggtctataagtggaaactggagacgccccatctttgaatcgtggcagaatccattacgtgcaaaagagatggccgtaagagaacaaattcaagtgctcccgtctttttgggcggtatttttcacaataagaaacaaccaatcgatagcacttgtatgcattgggagaaccggtctttgttttcgtgacttttggctagcagcaggaagcaggaggactccagtggtagcaagcagggacaaactcccacaaacgacagtccatctgcatttcagtctagaagtatgattattgaggcaagggattatgatgaataagacatcatcagtataacaaaattatccaagaaatcacttcaaagtactgcagaagaaacaaactgtcccaaaaaaaactaacatgtgacccctcctagtataacgatttggacaaaagattatccagattcattgtactagttttttttttatgatagagagagtacttttttttttttgatggagagagtactaacgaagagattgctgtcacatgaataatatctaccttttgaagttgggcaaatgttacactacacatgtagtagtaatagccaaaaaagaattgtgggagatacaccgacttcatatcatgctagcaacgctattctcaagctattttacatagtcaatacttcattcctaagaaaggacatcctcttgtcttcaaaaaacaattatcatgtggacacaacattacaaccggccccatttgcagttctgcatcatcacgatgcaaagcattcctaatgacttgcatatggagaaactgtttcaccatgattcaacgtcaggaaacatactccaaaacaaggagacaccttcaagttaactgatgtattatgttctgtaactgtatatggaagtccatggagaaacgacaacctttggaaactggtagaatgaatgggtcaacctgaacaaacaaacacaaatatatcagccaaagtcggatcattcaattagtgcaggaaaaaggagaggcacataccttggacaaagtggttaaaagaacactatgcacaaatggtacaaaagcatcaatcaattgggtgcttgtctgtttgccgggaggtgtattgggcagaaatcagaagcaaggacagaaatgcactagccacaaatatagcatcaaaccagcggtggtaaaagtcaaactggatatcaccacccaaaacatctgtaatgatcaccctgtgcaaacaggcatttaaaacatcaatgtcgacaatagaatgcttttgtgatataaattacaagtactaccaaacacaatgcacagaagattaagttgcatagctccattttcagtcaacagtcactattcattgttatcttcaaaaccttcacataaatatttgtgttttccaattcccaacagaggcagattctaaacaaaggagttatgttccataactttgtgtatacctcagcaactttaggatcatataaacgcaaatggagaataaaaaccatttatatgaacgaacatcagtttggatatagggaaagacaccctcaagcaatagagatatacctatactcatttgccaggcttttccttatgagaagaatagatgatatgaagtacattcccatgatctcagatagaaaaaggacaacattggttgttgaaccactcccaactctagaaacagcaaagaagaactgcatagaaagtgagacaccatagaattgcgttctaatgctctattaacaagggtacagtaacaactaacagctgtatgtatagataactgaaagaaataactcaccttcataacatttgccaagaaacctcgaacagatatgacaaccaacatcccgataaatatgagagatatatactgcaacaaaaagtgaacaggcaggacacatgtaagctatagaacatgaacaaagaagcaaaaaggaaaggaggtaaccaggttgcatgaaagtcaaaccaagccaattcaaagcacctcaaaattaatgtttaatctacatatggtactttatggaaagagccaaaacgcaaaggacatgccaaaaaatatctgtatacctattttatgggaattttgaaaattgcttacaacttacatagcggttccaattaacatcaaatgtacagagaactgcagttcagagtaataatgaatttattctcgattctggaattgttcaccttttaattttagcatgtgtacctgtgataaaagagtgacatcaataccaatgtcaaaatgcctcaagaagatggtaattgtcatggttactggatcaacagaacctgcctggaaaggggggaaatagtatgtaggttaacaatggaaatttccagaattaggaaaaaagaaacaagcaattggtttgagtttgacgaaggaaagaagtgattttacctctttaaagacaacactctgcaaggactgaagcaaaatcaagaaaaagaaatgtaagatactgtccacaaggttgattacaattgagtaaagaatagaacacaatctcacaaaacaaaactgtaacacttggcaaccagcatatggaagccacacaatctttttaatgacatgacgaatgaattgattaatcaactatttctgtagttctagctttgtggtcttgtcagggctacatataggtatgtggaattggtgaaatgcatggaccaaaaaaatatgccacatttagtaataccttgagcatcttataaacacaatacactgacaaagcatatcctagtagattctgagcatggcctctccaagttcgagaaaacgcagcagctatctggaaaaatgaaaagaacggtgtagaaaagtttagctcatatattcaaagaagcatcgagaaattgtgcatatagaaaactctaaagaaagaaaaaaaggagacccattactgcagtaaaatgatgtacaggatataagagtccgcataattaaaatgtatgtaaccaaaaagaaatgcaatcttattgaatgattctcccagaaattataagttctcagatatatgtcagtgccttaatgcgaaaatgaaatgaaaacatcagccaatacatcagaaatcaccataatggaaggaagttatgctaatctatagggagaaatattcacaatattcaattgtaaggtacaataaccaatgaactttagcaagtggtgtaacatttatgcggctgatccgatttgttgggatagagtaacagttctcttactatctaaccaaatcaatgttaagtagccaacaccacaataaagcaatgatggcaaccccatcacaatcatagaactaaacagcacaaggttaagaaagtagaggggtatgtcctgccaatcgttttcgttttcaatcttaacattgtgatgaaaggtgcaaaaagtatacctttgcttgacggagttcatatatctcaagaaatagttgtttggaaagttcttctagtgcctggacctctgcatccaagcttttgatatcttccaagaaacaaatagggcttcatgcatatgactgacaagtgaaatggtgtaccaaacaaaaacagaaagaaaataaatacaacataccctgctcagtttgatcttcttgcacagatcgaacaactgtcccaacgatacgctttagaaatgatctggcttttagcttctgcaagtattaaattttgtattcagtcaagccacaaagggtaaacatcaacataataatagaccattctacttccaagatgacattttgttgagttaatgtgatagtatattttgcattgcttattgatagaacagatccctatcccatcaatctcgccacatgcagacaattctgcatagtacaatcatatgcatttagtacttcttattaattgaacagtgtcttatctattcaatcctactagatgcaagtacaggcaacaaaatatgactgcatagctaaatatctgtacattttgcaatgagagcaaacttccatgcttgcaatccaacagttattttaattcacatccatttgaatagtaagcacacctcttctgatccttgaatcctctccatctccattttggacagaacaattttctttttcttagcgatgcatgtctccatggattgcatgagctgcctttccaatgttttgatgtccttttcatcaatttccctgtaagccaggattggcacgcatagcatagaattaaactgaaatcaaagcacactgtgtggaaatacaacttttgagagagatcagcttataggtatatcaaagttcaaacctgataaacagtgacagatagctgtaaggcagattgacggcaccaaaaccagaaagaacagccatgacacttactccaatcacgccaatcctactaaccaactggggcatcgtgaaaaaccctacaaaatgcgcaagccaatcgaacccaatcacaaggtagtccagtcgtgaagtcaatgagggcctctgaggccaatatcgtaagttactgcggctaagctcaatccgctagtattgagagtagcaaccgtcgccatgattgcaacaccatacctttttccggagaaggcatggggaaatgaatccccatgcgccagaagccatagaggaagaccagcaggaacagcgccgcgacgagcagagcccgctccctccgcacccctgcgaagccccccaaaacgatcagccgatcagaccaaccacggaacgcaaaaaaaaaaaccgatgagccaattgaggagacaggggattcgggatgggcaggcgggcacctgagttgcgcagcagcaggtagcagtggtagtaggggaggacgaagacgaggaggaggatgaggcagaagaggtcgaggtgccagttgaggaagcgggcgtgcttggagaggacggggaggatctcgaagaggacgagctggaagaggttgcaggagaaggcgaagacgaggccgaagaggatctgcaccagcgcccgccgctcctcgtactccttgtacagccgccggttgaggaaccacagccccgcccagccgagccccaccagcgacgcccccaccacgccggccttgtacaccaccgcgccccaacccattcccccctcccccaccccacctccacgcctcgcgcgcgcgccggcgccggagccggagatggatctcgcaaggggaaaaaccgtacgcgaggaggtcgccccttcgcgtgaatctgccgtgccgtctcccccgcaccgccgactcctctgccgcggtgacgcgcagcctcgtaggccgggctggatagcctcgtcgtgcagcccattacagttgggctcaaatggctgttagggcggacgtgcggcccgttttattcgggccgtcacgggattgtggtttatgtgtgggccgttttagttgggccaggaactggattgcggcgaacgtgcgggctgcggcgttgtggttcggcctatctgcagagtcgctctccgtcaggtctggggctatcgcgtttcacgtgcacgactaatcgcctggttcatcgggaccagccaccagaccacacgcaaagtccagaacgcacaaacggatggagagttacaatctgtgccggtgccacgaaacgcaacatgcctttctcctgtagcttcccttcttccgatccggtggtcggcaggaacgcacgcagcacgacgcgccagctagaagcattctagataggcacatatacagtacatggatagctataacacgcctcactcggggggagtcggggaccggccgaagcgcgcactatctatctattcaccaccaaccgaacccccgtacgtccgacgacctaacaactggtccacgactcgtcacgagcgcgcgcgacgctaaacttgcttggcccgcgcggcgcgatcccggccggacggccgcacatgccccgcttgcttctgccgggagatgcgagaccacgcgagccatctccaaaagcctaacgctaacggaatagcatagcatagcacagcacggggcacacacaaagacgagatgctgccgtgtgtgctccgtgcaaagcgtacccccgactacgcctgcttccgagacgggcaacaaagccaaagccagcgagtgcatacgcactttgctacggccccacgtacacagagttacagcctgttgctccaccaactccggaggctttgcggcagatccatcgcagcattattgcgcgcttttccttcctccctctccctctccctccaaaagtctaaacaaaacctctcccgtcttcttcgtgttcgatctcatcatcagtgctcgcccgtgaggcttcctatcgtgtccccttcggtctcaacacgccaaagcaaatcataaagaggcatggagaccggacatggagaaatggtgagcgcgcgcgcggggcaaaagatgtcaatttcgccatgccgcgtttgtgaatttgttagtagttcgaaggattgcacgggaagctgttttgcgagttagctcgcggatcaggggggctttgccgcctcgacaaagcaagggatcactactgtaatactgttccagccatgtgatgaacatcgcatttgcgtgtcgtcgtaaggcaatcaattgtacgattgatagggaaaatgtagaagtccgaaaatcaagtacaggtggttctttgaatctttgtcaacttgggttaacagtgaaaatgagcgagacacggattgatttgatactcaaaatgaggtttcgacatcaagtacaggggattctgatcgacttggacttcatacaattccccaataggataaaacataacaaaaacatagaagagcattgctcgaaaattacataaacatattaatgcggtattgttcttgctttgggaaaactaggcgcagtccaggactccgtacaattcagcaaacggtggtcagcgcttcattgacacgtagggatccagatgatattcactcatctgcaacgatttgaagatgttcagaataaaactgttcttcagaattgatgaatcaaaatggaaaattttcacgcgcatttaccgggagtatataccgttgtgtgatcgtgagctggtggtcgagaagtcagaggttgccattggaatggagatcgagagctgagtggcagagaaggtggcaaggctgttgtcatcagctagatcaggccaggagtcccttgcctttggccactcgtcgaaaaaggggcgcagcgtctggttctcctgcttcccggagtcgacggtcacatagtcgctcccgaagaatgacaatggctccctctccaccttcggcagcgagcagatggtgttctggtccagctcactcagatttccaagcatagggtagctcgaaactgaaaatgtggaggtctgagaaggcagcaagcaccacgaattgtcaatagaggtatccatagctccagtgatgagtgggctgtgctcatctgccaatggtctcactccataagcagaatacctgaatattggaaaggcagaaatcagtatatcagtaatccacagaccaatatgttccaccaacaaccaagcatttacaactgtcatttgaagatgctaaaacagcaatgtagaagaacagtttgtgcaaaatatgatgtgcaaaaatgtataagcaaattagcaagaacttaaaacaagttctgagtgcaacctatatatacacatgagcagtccgggaacatagttcacaagtaacaactgaaaaaggataaaaaaaaaatcaattgcaaacgtttctttgtcaaactcagagaaacaacagatcggttccacatcgatacatgataatataattgtaacaacccctacttgtgaataatcacatagggcatgcattaggcctcatgcctttacttaaagcatgacacgcgactctttgactgagaataacaagtcaagggagacgaaaattgttgcatcacattgcttcgtgacaaaagtgaaaaacaaaacaaaatgggaaactaaccatctaagcaaacatgattggcagcagcaccaatcatgtgccaactgccccgcaggtaaccctacagtgacagagcttcactaaagtggaattgcaaactcgcaaagtagtaggagtactgagggaaaaagattcagattaggtgggcaaaaggagatgggcttccggtatcatgttagcctttttcagatggtttcaggcatagggacgaagcgtttttggtcagaaagtcaggagaagttttacaggtgcagaactacccgtgtttctagttcagcaattcagcctgaaacgagaagcacaagaagaccaacagcagtcagcagaagaataaaagaagcagaataaatgccaggtctgagatcgagcaggtgcagagagcaccagacactagctctgagcatagaacccagacaagttgcaacttttagttgtactcctatgtttgcaatcacacaagaacacagcctgctctcctgctctacccttgtatgattccaccagagcaccaacgccatttccaggaactaatgctacgttcagatttttatcaggcaaaaatctggtcccagaaagcatcgccagagcccagagaaaaggaggagcctaaacacagttaacagcagttcttgtgccagagctgacgacaaacatttgaagtaaacagcgccccatgcacattttcagacgagcacttgaagtgctagtagtgatgctgcactagtagtattcagatttaccactagtgtctgcagatgcaatcaagcacaataatgagaaaacttcaaacactattaggaggcatccagctctgctgcatccatccatctgacatccatcatgcagtagacaacaataaacagtaaagaaagtttgcagaaattttaattgcaccctgtacctgaaatctttgtttccggcaccagcagcaacagtcgagtaagacgcagcattgtccatgtgcagctgagtattagaccccaaggcgaacgagccaggcgcgctgccgccaccgccaccaccaccaccgcctccgttggcgccgccgccattagcaatcgccgggtacagcgagtggttctggaaggcggtggaggtgacggcggcggccggcgccgtggcggggggctgcgagtggggggcgacgagctgcgcttccacaggctttcttgaacggttgcggccgcggtgcatgtgtcgctcacagtacttggagtccggcgcggcctccttggagcaccgccacttcttgccgtccgtacgccggcaccgtccgggctccgggtccagcttcttgccgaagtaggaaccgtatccaactgcagaccaaccaagcacgcaaaaaagaagaagaaaaaaaatcacaagtcaatgatgtgacgtgcgcatctcgaaggcatccaaatccaccaacgaacgcatgtgtcggtgcgcatttggattggagggagcaatcctggaatggaacgctttacagccagatgcaagaatcgaatggcgatgcgatgctaggcgtctgttcattgaaatcaatctggcggcgcggcggccggaccggatggcggccgccgccgtgctccgtagatctactctactcaatcattcacgcccgcaacaatgtacactgcgattaaaaaaaactaggaaaagatagggacttagtactcgtttcttttggttgtttaatcttggggtccatttgatgcagtacagcttgcttaatcgcagcagtaatgaatgcgtgggtaaggctcccaacaaccagacaggaataacccctacgaaaaggaccaataaactaaccacctcttttgcctggggtcaagtcctgtgtgcatccaatcaaccggactcgaataaaaaaaactgcactaacacaggaggctaagctatctctattcctaggagcaaatcttgaacttgagcacaagttagctaatctggaatataaaaacgcaagcttttagggggctaaatccagcagaggattaacaaatgaccagaccaaattaacaaaccggggccaagtacacctgaatccctcgatccgaataaacaagcgagacaatcatgtggatgcatgagtagtactactactagaggagagtgagacggaggcgaagggcggcggggcacgtacggacagggtggtggtagaagcgcgaggcgagtgagtcgaggccacggcggatggggaggaggagatccgccgggacgggcacgccggcgacgaggtacttgtatatgagcgcctgctgctccagctcctcgtactgcgccgccgtgaagggcggcggcctggccaccgccgccgcccacctcgcgcccatcatgtgctgctgcgcctcctccccgaccctgcaaccgcatgacgccaccacccacattagtccaccaccacggcagcaagaacgaagagagagcgaaggcgagagcgaaggcttacgcggagagaggggaggagcggcagaaggggaagatgaaggagggccggtggtcggctgccggcgacagggaggcaaagggcatcgccatatatgctgccgctatctctctctccctcacacacacacacactctctctgtgcgcctctctctctctctctctcctctctgccgcttgcttgcgccctctctcttttaatgtgctgtgcttttgccttttacttggctggtctgtgtctccttccctctgtcccgcctcgctggtggtggcgccgtgggctgtgtgcaagctgatgcgagcgaggctgcaggccggctctgcctgatgaagggagggaggagggggggagacggggacgaataacgatggggctatatagccggccgggtagctaggagcggtgcgcgggggtgggcgaggaggccgacacgggagggttccagctaagggacaagcacctgcgtcttgatcggtttcttacctttgggttcgcgtgctgctcgctttcagtattcggttttgtgggagtggattataaacacttaagaatgtcctctagtatcttatatctcatctgaatagttgttaaaaattttaatatttttaataagataaagtactctagaaagatagaagtctaaatatgatagaagtctaaatatgacttctacatgttgtcgcaaaaagataaattaaactttgattactatgcatatattaatatacaccacatatttgtttttttttcttacaacatagagagttgtattgatcattgcggagtaatacattacatgtcttgttagctttttaacagccggcggtttaagattttattaaaaaaaatgagaagaaaatcaaacaaaaaaattactgaatcaaagacacatcacataatgtacacctatgtataagttttcgatggtgcacttagcatcatcccctaagtcgacgatatagagcctaaggttgcgttcgtttgtgtgatatagggtgagaaagcacctcgttttccgcgcgcacgcttcccaaactagtaaacggtgtgtttttttaaaaaatattctataagaaaattactttaaaaagtcatattaatccatttttgaaatttaaaatatttaatactcaattaatcatgcgctaatggctcacctcgttttacgtatcttcccaacctctccaatctcctcctcaaacacaccctaagttgtgtttcttgtcaccatcaacatacaacccatcggtgtcatatttcgttagcataggattccctgcaaggattgatataaggtgagtcaatgaatcatccaacgattcagataaggccgattttcaacggggacataagcattatgtagattgatgatttcaaactctatgttatcttaagatagaacctaccgtgccgatcgctatgccacggtttatgatatttatgggacatatttggatcagatatggagttaaagatttgaccatacatgtacatgaaactagggtggaggtcatgtttaacacaatattctttgatgagcgtgtgaaatgcttttaacaagttgttcttttattagtcaccaatcttgaaataaaatcatgaaaatctctactcccttggcttcatgtttattagtaggtgatagtgcatgtctgtattggggtggagacttaaatggcctaagttccacacacttagctcgccaatgtccacgcaaaaccctaaccaccaacaaacttattgaaattagaaaaggatctgtgaggatgacaagtaggaccaagggacattaccacatgagtcggtgttgtgttttcgttttcagggcccccacttaatcgttggagtggaaaaacgaaaaaacatgaacaaactaataactctgacggaatgcaagtgcaaaatagatgattacaaaatacataaataacatagaaataaccgtttctttggaacataggaaaaaaacaaatgaattagatgagagtgataaactaaaaaatttcaagaggttgaaactcttactaaatttattcaaaatccatatatgattgttcgttatgtaagaactttaaatgataggatataattctatcattttaaatctttattgaaattctctaaatatttctattttttctataaataaaaaaggtcccgtcagtgagcgtcatattaacacatcagagtaaactgtgtcgttctttttttaaactcttgtgtcgtgggctcgtggctagctgtgttgggttcaagaaggcttgacgttacgttacctgaacatgcatggcgcacgcctattcttcacctgtaaaaggacgttgtcgatgttttcatcaacggttgggcggaactcctcctattattttatctgttcaccgctcggtctttaattttacagacctgtcgagaaagccaaatcggcgcgcgtacgggcttcacgtgcagcggcagcccactcaccgtcaatccggcagtgatcacaagcgcacgactcctaccgttgtttctttcacacacaagctgctgctgctgctgctgctgcgcttgtgcgcgcaggcaacgcaggcggacggtcaggtcatcccagcgacaaaacacccgcaggcgaaggcatgcgagatatcgaccaagcagaggcaggcaggcgagcatgcattgtaactttccgttgccttacggcttatgcaacggctaaagctaagcccttgctttttggtggttccatgctttgcatgctgggaatgaacatgtgcaagaacaggatgctcaccgatcgatacgccaagttctgtcctgccctgtttgatcacattagtacacacggcgccgttggttgaaatacacaggattttctcccgttgtttgatgtacaacaagtgggtagctgtgtctatagtccagtatgtaaagcactgttcatcgcagcatcaaccagacctgaagtacacccgaccagattgaccagactcgattcgcggagctcagctgaggcggtgcagccgaaggggacgaagaaaaaaagaggaataaagccgggaacgaactgcctgccctgcacgcatggcagcgatgggctctttctttctttttccgcagaaattgcgaagaaatatctgcaatgcaagtggataagagaactggactccggcaaatggcttggtagccagctttgggttgggatgaggaggatggtccagtggaggtccacggccacctcgccgcgggaaggaaaggataatactagagatggcaacgggtatggaaccaacaagttttcactccccgtacccacacccgttaaaactaaatctgcccactaaaaacccacacccgctcgcggatgagaaattccctcctacccgcacccgcacccgcacgggtgatgggtacccatttgatacccacacccgttgcaacaatttcaattatgcacaacaataactcaataaggttataggctgcagacaaaattaaaaaactaaggcttaaacaaaccatacatgatacatacagcctgtcacattgcaaaatcaacagcaagccatctctactcatggtcacggccccagccagatccagtgacctacctcattgcacctgtggcagcgctctgaccggcgcgctgcgtccctgcccccaagcagcgaccgacgcggtggctatcccgcccccaggaagcggcgtccctggctccctggaccttgccccaggcagcaactgacacggtggatgtccgcccccacgctggtggctgcccgcacggcggcgccctactccatcggcgcgaccgagaccggctggcggctggtgctgcggccgtgcgcgcctgcgcggtggcgtgccggcgtgtggcgtgcgcccgtgcggtgcggccgtggcttgggcacttgggggatggggggcggcggagaaacggagacatgagggagaggataggaggagaaggggaatagggtttagaggagtgaggaaaagaggatttatacctagggttttgatggttgtgggccttaggccatctgcatattgggctaggcctacgggtattttcaacccacggttaatgggttcgggtgacaggagaacgtacccacacccgcgtacccgatgtgtgaaggttttgcccgttaacgtactcatgggtatgatgtttggaacgtttatacatcctaaaagagtaaaaacccaacggttttcgggtcgcggggcccgttgccatctctagataatactagtagcacatcatgcacgggatcagggcacctgtacgctacgggcccgtgcatgcaccgtgtcgcgcgtacgtctcggctgcccgcgcgtaggtgtccggctacggttggtctttgctggacagctggtgcacgtgatggcccgggagggggcatgcctcctccccatcagtccgtcaccccatagctatagctgtagacattcctttgtctctcaaaaaaataagaatggaaaaagaaaagcgttactcgtatcatccatcatctttttcttcatttttcacgacataaaggatcgagtttgccgtataatttgttttccacgccaagcatgatacgtctcggtgtgcgactataggtgtatatatggacacgttgcatcttgccatgtgtgaggactcgatcccaggtctaacaagtcacaggtccttgtacagtgctcaaacacctccccgtctctcgtacacctaccgcaccatttttccctgattccgtcgacgcgcgccgcggtgttgctttctcgcaactatatttgcatcactagtacatgagctcgaaaagcgaaagtagatagtttgtggcatttgagccgcgcgctctcattttgtggacttgtaggggacacgagaaattacgcagaggcacaagtttccacggacagttggctcgttaaatccggcactgttggagggtagccggaataatctggcctttagcaattgagggctcttgcttgatgtccagctgttctcctccaacgtgggaccgatgcccacaccttgcgcactgtagtcaatatagtccatgggacccatcttgtggtatgccttcttgagacgcgtcttcgatctcttctaggctgcacttggttcaaccgatcggtgcctcggtggccagtgcacacgtcgagtccacgagcaccggcgcatggaatggttagtggcatatgcacgtcttcttcgaccttttcctcggcatctagtagctaggggtagctctcggctggcagtgggcgagcagccggtgaacgccgcgcggccgccgtcaatgccgtgcgtcacgtgccgcacatcgttcgctcgcccagtcagcgtccgcaaaactgtgccgggccagcgatggtgcactgtacgtctacacataatacggcacgcacgccagcggcggcggcggcgttgctgctgttgcatagcagtggcggttgtttgcggcgaggcaagggggaggacgctgtagtgctgcatcagtgcgtcgtggtgcccggccccccatccaaaatcgtcaataatgcagagggggtaaaccaaaccttacccaacccggccgcgcgcgcgcgacgctgcatgccggtgggtgctagcgggcgcggggccaccgcgtcacgtgacgcggatagcgattcgagtgtgtgtttggggttggttgcgttggttggatggggcaccccgggggactcggcgttgtgcctgttggtgcgaggtttacctcgtttggtatgggaggggacgaggctggcgatcggatggaggcgggtgcgtttgtccccgccggccggcccgcgtcgtaccgtgatgagttgcccatgcgccgacgaagagttgtctccacgactccacggtctcggcgggtcagctgattttccagctgatgttatgcgtgtcgtgttaggagtgttttcacttggatccccgggcccctcttaattctaacgtccgagtgaaggtagcacccgagaaaagtatacggaaaaggcatagagagggaaggacgattcgctgcccctttgattcgtagggtaggaaaaacacatgaattaaagtagtatgtttgttaaatcctacaagaataagtaaatacataataggagtcatttaataatgctatgagaaaaacaaaggaaattcacaaagagatcatatcccttgctatttttcctatgaaatgtgaagcataggaatacaatctataggattttgaatcctataaaaatcctttgccaatcctataaatcaaaggggtcttaaggccttattcgatttagattattgatgattgaattgttgtcatgaattactacttaattatatggataaattataaattaaatattttttaaaactaagattaataaatagttcgaaacaagtgccctaaacaattcgatagaagacttctattttggagaacattaaccttttcatttcattaagaaatgggagagtttctcagggaaaaaaaagtgaatcagcaaaaaaaaaaagagggtgcgttctatactacgcatttccagtttgtacacctccttatttttcacgcacatgtttctcaaaatgctaaatgtatgtttttagaatatctgtagaaaaatttatttaagtaattatataaatatattttaaagttttttagttaatatctaattaattattatgtgctaattttatcgctctgttgtgcgtgtcaagaggtaaggtttccaataaaaaaaccaacacaagcatgtacgtctaagatctaaataaagaggaggccagcagcgggaggggatagggatcagctctttggatggtaaagacccagttacctcatgcgtttgcgtcgcgtggtgagaaagctgtccgtctcgagtcgcaactccagtcttgaccggacgccccacgctgcagatctctgcaatggtccaggctccaagtgcaggacaacgtctcgttggcacggcaggcgcccccaatgtcccatggcacacgagcgcgagtcgagccgactgcgaactccccagaccaaactgacgaacagtacgacgcctacgcgcgcagagatctcgtcaaactcgtgcacgagtctagccaaaagcacaaaggctgcacgcgcaaaacgtcacccggccatatgtacgaacgcacgcacgtacaactgtagtaccacgccggtacacgcctgtgatttatctggttcgcgcgactgcgcgtgcagcggaaacacctgaaaaatcccactacacatccgggcgcggtctgcggcatgcatgcaccagcagtccagcaccgcccatgcaatcagcgctgcgacaccctgcatgcctgcctccctgcggcaactgatgacatgaatgaatcgattggttttctttcccgagtcaactaccaaagcggagccaccactgcccatggaggcgtacgtagaagggcaggcaatgatactagtactctctcaatctctgtactcccgtacatacgtgttaagtaatgtagcgtccaagcaagcgccccctttgcgccgtagtacgcacactcaaacgccggtcacatgcagagttcgtggtggaggagatcgatcaatctgaaattttgagctcaggacaagcgaggagcgtccaaagttttcacagtggacactgacccatttttatggaggtgtgtccaaagatctcgagtggtaatagccgctacgtgttcacggggacccgggcagtgatgagacccaaaacgattttgctaaatatttgtcgggtgatttttttcataggatttgacgtttttctagccgcacgatgttttccaagatttgcgcaaaagcagggtcagttgagtccatgaccgagtcaacctgactttgtattgatggatttctgtacatcacgcatatcaatagccatttatttcttcgctctatttctttctttaccaaaatttacagtgcactttgtgcacggtttctcaagcaatgtatttgtactaaaacgacaaatattctagttaacaaaatctacagtgcacttgtactaaaattacagtgtacttacatgtcatatctactgtttttacaaatgtaattttagttataaaacactgtaattttagttataaatgtaacatttgtgttaatctttactaaatactactgtactaacatgcacaatcacaggctatctggacggtttatctgtactgttttttttttaccgttggatgcagatgcgaggggagaaaaaatttggatgatttttttcttaaaaatcacaagacagatgtctagacagtcccgaggcaaaaaacgccgaggagatagcgctgcgagaagcccaggccccaacgagctgactgaccagctcggcccagtccgggaggcccacgcgccccggctttaccagacagcacatgcacgtgacggcacggaggaggcaagcgcttcacggccgctctggccggaggaccagccttgctcgtcacctcttgcactgaccccccgggacccacctgtcagtgggcgtgcccatgaagaatctagctgtagcagcacatcagttggtgattttggtgaacttctcctctattttcctcacttatttgagattcagtttcctagagatgtacatgtagggactaggggaagcagttcgagaggactcaaagaaggcggcgacccaagatggccagctgaaaacggacccaaacaagtcagagagatctgcacccccatactgaggggctgtttagtctgtgaaacaaaaagtttttagtgtcatataggacgtttaaccggatgtcgaaagaggtttcggacacaaatgaaaaaactaatttcataactcgtttagaaaaagcgagacgaatctttgaacctaattaattcatcattagcacatgtaaattactgtaacacttatggctaattatggcttaattatgctcaaaagattcatatcgcgatttacatgtaaactgtacaattagtttttctttttatctatatttaatactctatatacgtatccaacgatttaatgttatgtttttgagaaaagttttttttttaactaaacagaccctgaggaagaaaaactgagtagtagtagtagttcatacataggtttgtccgcctgccgggcacagagagacttgcacccacaaatacagcataaatgctgctagtgccactgtgcgtacaatagagatgtaaacatacaaatgacacagtactacagtacgtgtttaaagtagagtagagtcgtagtggtagtaactgatcgatcagcctctacctgcataagctttgctcatcagtgctactcaaaggcgtacagtcctttgtcacatggtgcattattattctcttgatgcgacttgggaaaccatccatcagcatcgcagcaccaacaggcaacagtaatggttcccaacgacttattgttatccctttcttacgcgcgcccagctacagctagcaagttccctccagatctcccctctcggtggcaaggcgtgtatcgacacctatcacaccctatgccgcttggcccatgcttccgttccatcagctgccacagcacctgagcctcgttgataaagctattagcacatcttctagtagtagtacattactagtggctggtagtgttatcaacaacctttctttcccttttttcacatcaagaacttggacaagaactaaagcaacatgataccctacttgggcaataaacgaagtggcacagcacacacaatgacaggttggagactaatggcaagtccaatcaaatcatcaagctacggcaacatgggctgggcgctccaacgggggccacccacgtggtgcaaagcgagcacacactgcaacgcccggggaggcgtacgcgacgcgagcgcgaaaaggaggcaaaagttagttggaatcgctcgctcgcctcctcggctcggagcggcaggtacgcgtgccgccgatgcgccgacaggcttggcctgtttgcacttggctcccgatcgatcggtttttgatgaactattgagctgtactatctgtgtgtacccaccaggcccggccgggtgttagctaggtctacatgcttaggaattaagatactcctgctgaaactgttgattggtgtaaatggtccacgcatcatccatgtacatccacagaggtaatgtgccacgcctcacgcgtcatgatccaatgtagcgtgccttttacattccgtgttttgaaaaggaaaaaaaagttttatgcatggagagctaatgaaatattttcactaaaatatggcaccatatttacgtactccaattaacatggtactatatttagtaggatttggcaccgtaaacagtgtcatgttacgaatatatagctccgaatgtaaatggcgccttataaattaagggccaatctctgtaagaacgtacattagtgatttatcttgtggaaaatgcttcagaacgtggaaagcttctgtatagcacagctagcagatcttatttgacggaccactaattcgtgtggactgcggagattactcttgtttgagatgtgcaagacaaaatgatgtggatgaacagtttcgtacactgtgtcgcatttacgtgtaccccacagtcccatacgcgtacggtatgtccatcgcgtattttctgttttcatcagttggtcatgttctattttgtttctccaactgcaaacatataaaatgggcttttccccaggccccatttgggtctctcttgattaagttagcaggccttggctagctaggcttagatagaagtaaaacaactaatgaaaagtctatatcatctaagcccttatacctccaagtctccaactataacctgagtctaaattatacacctcaaccccaacatggcaccttttatcaactgttgctagtaagtatgttacctagatatggggatacggatacggatacgcgatatgtggatacgggcatacgtcattttttgaaaactaaggatacggggatacgttaatatatgtatatataaaataaaaatatagaaattaaagaacttttgtagtaagaaattgtaagtcgattccattaccatatatcaatgttttcaagttctcttattctctctcctagataattcaagttggcgaagcaattaagcttgcctactgccaggccagtagtttagagaaaaatcaccacatacaagtttattatcatgttggttataaactgataaatcaactacacaagtagcagcacgccagcactaagccaccaaccaaccaccggatttcacttatggtagttcaaccgacacccaaacacaaacatgcagtgatttactcacagcctcacaggggaacaaaggaaaaactgcttagtggtcttgtgcctgctgctctgcttggtgagttggtggtcttgtgcctgctcctcggaggtggaggcgctactctgttgctggccgcggaccgcatagacggctgcgcgcggaggcgttgttctggggacggcggccagcagcccctagcccctgacgtcggcggcggaggaggatatgcgccggttgcaccgcgggacggtggggctggaggcgcagtgcccgccggcgaaggaggcgctgcggctgcgcagacggcggtgctgcacccgacgatggcgacggcaaagacgatgtggggagaccgggagtgagtcgtgggaaagtatgggcgtatcaatacgtatcagcaaagtatccgtaattctttcatttgtttgaaaatcgagaaaatgtcagatacgtatgggatatgtatcggagcgtatccgtatccgtcggcgtatccgatacggatacgcgagctcagcgacgtatcggggtaacgtacttgttaccatttcttttactcacttaagaccgcattaggcagcaacgcgaagagaggaaaactgtagcgcccgttccgtcgtggcgcatagcgggaaaattatctcttaaaaaccctaattgcgaaatttgtttctttgattgttgtctagtgtccgtgccatctcaagatctcaatccccgatctatcgtcgagttcaactccgaatccaattccttccaaatcgaatccctccgcaaaagtctagtttgcctccccaggttcgatgggccgaatctcgctcggcccatcttcccctcttccccggcccatctctccctctccccccgggcgctctcccgctctctctctctctctctctctcgcgcgctctcccatctctcccccccgctcggcctcgcccgtacgctgctcgcgcgtgcgagagccgtcccgagcgcctctctacccgctcccccgctcagcctcgcccgcacgccgcgcgcgcgtgcgcgtaagccggcgcgccgagcgcccccttcctttcccctcgctctgccgcgcctgcagccgcgcagccgctcgtcctcgcgagccagcgtgtgcgcgcccgcgcggacgccgcccgttgcttcccgcgcgcgcgtgccgtggtggccgaccgcccggtcgccgccgtccgtcagccctctgcacgcgcctgtcgccagtgtcgccggtccgctccaaaccgccccgccgtcatcgccgtcgtcatcgcccggcccccgcccctccgcgcgcaagccgccaagggacggagccgcgcccctcctccctctgccgcgatgctcccgttcccctccacctttttcccgaatcggcaaaggggcaagccccctttcttcccctccttttcccctttttcctcctcgccggcgtcatcctccctgtcgccgctttggccgcgaccgccgagcgccagctcgcgcccttgaccgccctaagtcggttcccaaaccgacattgccatcctataaacccaagcctccccctttcccttcctctcccattcgcctcctcaccgttgccgccgcccccgtgctctgtctcgcctctgccgtccttcgccaagcgccgggagagccggtgcgttcgaggacgcggaaggggacttcggccgcgccctctccttcctcttccccggcccgaggccggagagattactcccgcgccgccggcctctcgtcacagcgcccctcctcttctcggtgatgtctctctccgttcttcctcctcgctccatctcctccccctagctttcggtagtagcttaagtagactccccgtagttagccggcgccgccccgaccgttgccgtcgctcgccgtgtgctcgccgccgtcgccgcccgagctccgtagcacccgctcgtcgccggcctcgctcggcgtagttccgcccaatccgacgctagcgtcgagctcccgaagccgcatagatgctctcaccgccgggaatcgacctctcgtgacctcgtcgccgtttccctcttcttccgccgccggttgccgccgccgcaatccgccgccgtcgagcaacctccggcgaatccgagccgatggctcgccttcccttgtcacgtgcaaccgcccggtgtgcacgcttttgcccgtatcaccgtggttcgctctgccgctcgccgccgccgcccgccgtccattcgcggccgggtcgtcgtctacctcccgccagcccacgtggccgccacgtaggcgccacgtcggcgccagctcagcctagaccggatcgagccaaccccggtcagtccctccccgtgcgcgcgttccaccgcgagccgtgaggctgcgcgtgggcccgccgcacctgcgtccaccgcggaccgcgcgcatgcaccgcgtctcgtccccgcccgcgcgcgtgcgtcgcatgctccctccgcacggtgagccgagccgctgacaagcgggtcccacccgggaccgcgcgtggtgagcccggtccaccggactctctctccttcctccgcgcgcgcgcttcttgggccactctgggccgccttcttgggccagccggcccatttagctcggccggaccgctccatttctcttgggccgcgccctagccgcccgagaaaagtctataatccctccctcttttcttttctttatcttttccaaaaaaggatttaattaaatccttttcctttagatcaaaaattcaataatcttagaaattcaatatcttcccaaccgtaaatccgtttgactccattcaacttccaaaattcctcaaatctcgagatctatctaatggcacgcttagaggtcgttaatagggctttattttcgccgtttgttgagttgtcccgtttcgcgtgtagtttcagagcccgaagacccgcagtgcgaggattttgaggatcaagctccagatctcgagcaaggcaagccacctttgaacatcttgagcctatatttgaaatttaattatgttgcttgcaaaatattatgcattgataggatcgcacttaatctgtttgtcccgtctgcaaggcagattggcggacctacctaatttgtcgcatttgatccttcctttgttaattgctataccatgttgacggagctcgtggctcctcatcgggagaccgcgcaggcccccctttgccagttcggccgggggcttagggtgagatctcaagctctctctgtgtgtggaaagatcacgtgcccagaagaaacgcgagacacggacgatgtatacaggttcgggccgctgggaagcgtaataccctactcctgtgtttttggtggatctgtgtaagagcaagttacaaaatatcaactagccctctcctcttcccggaaaaaatccagcccccttctctgtgggcatggtcctccttttatatcttaaggggataccacatgtacccttccctttccaaactggacttttcttctctttatggacggagattggtatggttgccgtccgaatgacacttcgataggacagcccacacctacctccactcccggcggagacaggcgcaacgtgggatcgtggctgtctgttgctgacgcgaccagtgtcagaccggtcacagatcggtcattcttgtcctctatgcgtcagttcagcgatctgcatgatcacccttctttttgtagcatcttgcctgtaatggttgggatgaagcctggtattcatctaaccagggctaacgtgccatctctaagaggtaacacgctagctccggctggagacgtgtgcctagaggctctcgtcttgacgggacggggcgaggcgtgcgtcagaccaccagtcgccacctaaccgttgatccgaccggtctgtgactggtcacagaccggataaaagagcgcgctgcattgcgctgcatgcaacgtgacacgcttgaccagacgcaataaatgcggttaggtgagccctatcgtgttcacccaacctatgtacatagtgcaaaccccacagggggtcggggcacctcggccctcggggtcggggcaggagcaacccgaccccccctcggggaaatcaggaggagggcggacacctcaccctcgggcccgacgtccccgaaggtgccaggccacgtgggcgattccatctgcctcaagcctccgggcgcaatactcccggtcccatatcaccgacagtagcccccggcgttatgtcagggcaatcatccttctcaagggaagcggtcgggcataacgccactcataaagcctggtgacaggtgggaccggtctccgtgattgggcagaaacccaacggtctcaaaccacgcatatcggtaacggtgtcttggccgtcagtcatgggcggtctcttcaagactgccacatcacttgagcagcgctcgaatctgggcgtgtagattcgtttcgtctggagatatggtaacgtcgcttcggttggcgagcataattaacgcacacacgatacgatctatctcgactaccacaaccgcatatccacctcatgcgccgcaagcgggcgaatggaattagtggaagcgtgggcgcgagaaacgagggagcgagatagcgagtaacgagggagcgagatagtgggcacgagaaacgaggagccgggctcagcgatggcaagggtataaagctatcgaggaaaggacttgctcccttcctttcgccactattcccctttccttcgccgtttgcgccctaaactctctctttgctgcgcctcaccttcgccacacacactcgttctcaaccctctctttctccggcgacatggcacggggctccgctctgctcgacggtagcgtactaccgccttcccgcattgtgagcgagaggcaggctgggctgccgcgccgcttcatgccggaatccgccaccggccgggagatagtgatgctgggcgaggcacgcccagcaccagattacccggggcggtccatcttcttcctccccttcgcaatggccgggttggttcctcccttttcttctttctttatggatgttctggagttctacgatctccagatggcgcacctcactcccaacgcagtgatgactttggccatcttcgcgcacctgtgcgagatgttcattggggtgcgcccatctcttcggcttgttccggtggttcttcaccgtgcagtcggtgtcgccgccgtcggtggtcggcggctgctatttcctgccgcgggggccggtgttgaaccgctacatcccctgcgccctccgcaaaaagtgggatgactggaagagcgactggttctacacccccctcgccgacgaagcgcatctccgacttccgagccagcccccggtgcaggcttccagctggcgggcgccggtagatctgggggatggctatgacgccgtcctcgaccgcctcgcgggcctgcgatcccaggggctcaccggggccatggtgtacggcgactacctccgtcgtcggattgcgccgctccagcggcgcgctcgggccgcctgggagtacatcgggcccgaagactatatacggacccaccagggggtcagatgggattgggcccccgaggacttcaagatactgatccaacgggtgctaaatctcaactccgtggaggcgtccctcatcccccacggtatcctccccctctgcagcgacccggatcgcgtctccatcttgaccattatgacgacggtcggggcctcagaggagcaggctcctaagggccatggcggcgcaggtgggagccgccggggggatcaatctacccccggagggggtcgtgcttctgggccccgcgtcgggggctcggggagcaaccgccctaccgacgcccgggggaagaggaaactgggaggaacacctcccccatctcctccccgagggggcggggcggcgcgtgccagcagcaggcgcccggagggggccgcgccaacatcgcagcccgagggggagcgcaagaagaaacggctgcgcaagatgggggggacagaaccatcccagggaaacctaatttcccctccaaggtggtcatttaaccgaccccctcgcaggttcgtcccgctctctttgcgaccgtcttttcttccatcccaaaagcaagttttaccttacccattttgtttgccttctggttttttcttctgcttcagcgatgtcccgtcgcgtccctcccgccatcccaagtccggccaatccgaggccgaagatccggcggccgcagaggaacggaggcgagaatctgaccggcgagaggccgcagatcgccttcgggaagctgaagaggccgcccgggaggccgctcgggctcggcaggcggaggataccgctcgggaggaggccgcccgggcccgccaagccgaggaagccgctcgggaggaggccgcccgggcccgccaagccgaggaagccgctcgggaggaggccgcccgggcccgccaaactgaggcgatggcgtctttcgaggcagcccacgacaaagctgctggcgcgtcgcttgggcctactccctcgggcgacgctcaggcgacagcctccggggcggctcgcgacgaggccgcgggcggatcgcctgggcccgctccctcgggcgacgcccaggaccaaacgggtccgggggacatccccgagctcagtgcgtcttctggcgggccgagccgcgtcgcattttctccaaggcggctcttctcctcatcttctgccgccccgctgagtgccgagccccttctgcaagccttggccgccgcaaacaccgcggtgctagatggattcagcgcccaggtggaggccttgcgagcggaacgagcggagctcgaggccgcatgggcgcgtgttgaggaggggcggcgctcggtggacgccatggtggaggtgggccgtaaggctcaccgccgccacatctcggagcttgaagcccgcaaggcggcgttggcggagatcgcccgagaggtggaggaggagcgagaggccgccctcatcgccaccaccgcgatgattgaggcgcaggactccctccgccttcaacacggacgctgggaggcggagctaaagaaaaagctcgacgccgcccagggggtccttgacgccgccgctgcccgagagcagcgagtgtcacgcccagaaatttagcccaaatttccagactattttgtgtattaaatccctgtccaggaccagccagggtacacaaaacgacaagtaataaacagttccaaacgtaaataaagcgtaaaatacttacagaagaggcacttagtcctcacaccgaaacaaaagcagcagcaacggaaaaaggcgatcctagcggggcttcagctccactccacaggcaaaactcaactggggtctgagccttggtcctctaactccatcttcagctcagaagcactacacttctgaaaagggggaataatagcaaggctgagtacaaccaccgtactcagcaagccacaccaacgatgcagacgtgcaaggggaacacaaggacggtttgtggctatttgcataaaggcggttgtaaaacattttattgagcaaaacagtaaaactgttgagtaattaaagtaacattgaatctccactgatcaacgctacaccacgttgaacaggcccaaccaacccacctgggctacggtgcattgggtcgatttattagggtgggactaatcacggtgaatctggtcgatcgcccataaccgcgggcacggctattcgaatagttttactctggccagaggtgcacaactgtacccacaagacacaacccaccgacatgtcaccgcgtcatcatgtgcccatgatgcacacgtcaccatgtcgagtgattgtgacgagacccttcgcataaccctcccctaaccatccacaccacgctaaggtttcacccccacccctcaaaaggcagtgggcggtcccctcttgcgccgcggtgaatccggcagctggacaaccggacaccccggccgacccaactccatcacgcccaccctcgccaccggtgcctaggaaagggtcgagctatacttcagatcaagcagttacccattcccgcttgtggcaagcgctgtaagtcttccagggtttcccgtgaaccggtccttaattgccatgggtgcgactcacaaaaccatgcacccacagcccaccattcagtcgcattttagttggataattacgaccataaaacatggccagatgtctcgagcacgcggctcaacaagatactagaatgtctaatactgcaattatcccatcgactgagctagtggtaattaagcatggctaagcatatagttctagctaggtcacataagtaacacaagctagtcgattcattacccaaggttgacaaagattagatatcaagtaaacatggcacaagcgagcagataggtaatacctggatcccatgtaattagcaaaacatgcatatttatttgtaaacggtaaaacatttataaattgagatcaacatgctcaaggggaatgtgtgacttgccttgcttcttcacttggatcttctgaactcttatccttgcgaacgcgatcttccgaaacgacgggaactacacgctggcacgcaaaacgaggaaaaactctaataaaaaccaaggaaacagtacataaaaagtaaacaaacatgtagagctcaattttagatgaattttgcaagttgaacggctcaattcggagttcgaatgaattagatatgaattttagaagttttgagccatttaaatgaatttctatagttaaactcgatttattgcgcaattattatttatttttacaaaggaaatggcatttgctgacgtcagcaaggggaaccagcgccgacaggcgggccccgcacgtcagcggcacaaaggggcggcgcatggtggaccaagtccacacgtggcctcgggtgcgcgtccaccacatggacggcccagatcggcccgaagccgatcggacggccacgaggcggcgcggctagggcacgggcacggcacaaggccggcctggctgagccatggcgcggcggcggcgcacgagagaaagcggcgacgcggcgcggcaagggggggggggggtccgggcggcccaggcgagcggagcggcggcaagccggccggccgacctaacagtggcggcgcacggcccggtggtcgcaggcggcggccaccggcgcggcagcgcgcacgggagacagaggagggaggcaaggtgggagaggaggagctcaccaaggacgcggcgacgagggatggggaaaggcggggaagctcggcgtcggcgctcctcggggcgaaggcggaacggcggcccggcggcgttccgcgagcgagaaccggcggacggcggccggagggaccggcgcgaggggaaccgtgttccggcgggatcccggccgtgaaaagcggcggccgaggtgctcctcggcgctgcgaagcgagcggcggcgacggcgcgaattggggtgattaggagcggcgccaagcggcggctggaagtggtaaaggcggtggagagaggtggtgcgcgtggcgacggtgcctcggaagcggggaggggaaaaggagcggatgccggggtagagcttggcatggcgttgccgacgacgcaaacggcgaggtgcggcgacgactaacgcggcagcagcggccggctgaaggcggcggcagcggggaagagaggtggtgctcgaggcggcagtgttccagaggcggagaggggaaatggagtggaggccgggctgcggcacggcgccgcgaagccgacagaggtggcggattggcgcggcggtgggtggagcggctgaatcgaccggccggagctcgccggaaagcggcggtgcgcgggagcagcgtggggagggcggtagggtggcgcggggagctcgggaaaacgggaaaaaaggaagaggagtccacggggattgattttatagctcaagggggcgaggagagggccggggaacggcggatttcgaggggaagtggggcggcgtcgtgggggagagagagacgcgggaggcggcgacgtggccggattttgcggggagagtggggggaaacggcgcggacgtgggcggcgaggtcccacggacaaacgcgcgcgcgcggggtggaggaggtgggcggaaacggcggcgacgttggacggctcgggcggccatggcggttgctggcccgggctggaggttgggggtgaccccgacaggtggggcccacctgtcggcggctcgggggaaaggagagaggaggagaaggttgggggggacgatgacaggtggggcctcgggtcccacctgtcggagagagagggagggagaggccggctggggaggcaaagcagacttgagggagagagagagccgagcggcgagctgggccgagggagagagagagcccgagagggggagggggaggaatttgggccgagcccgaaagcaaggaaggggaaaattattttcttttctttttattctaattggttaaatgaactttgtgctattaaattttcttcttgagctccgaaaattcacgaaaaattccggagagtattttagggcacaaagaatattgcaaaatattcccggccaatgatttttttaagggaaaattttaattctcccattacttcacttgattaaattgatttaacttttatttaatttctagaaaatgcattatttaatgatttttaatcccgaacgaaaatcggggcgttacaaatctaccccccttacaggaatctcgtcccgagattctgggatggctagaaagaaagctggtgctggtgggcggtttgactgatctgcacattgaactgccacattctgcttcaaactgattgattgactggttgatcaaacctgcacgattgaactggctggattcgacctttctgttcctttgctttgcgaaaactagaccggctagttctgcttgaactgacccagaccagaactgtggctgctcacgaaacttacttatcttgatctgaactgttgacactggcagtttgataacctgacaattcaccaagctggctagagaagggtgaagctgttcctaagacttgcatctggcatttgtaactcattgatcctacgtccgcttgaacgggtcctggctcgaatgacaagtaattccaggaaaacctgcttaacctatctttcgtctgaactgcaaccatctgcttgacctgtctaagctaagcggttgaactggcctcatgggtgtaccttagaattcaatcggttgctcggggatcggcttaattcttctgataccttgcaacttgcttcttcaagtgctaccctgattgcggcactggttgaaccttcaactgaaacggcaacgaggttagccaaaactcatatgtgagacctaccccccttacagtgggtagtctttctttcgcctgactgagaacctttgaactgttgtccttgaaaaataaccaacatttctcggatttacagatgccttgactttgaatactgaaacttcatcggtccatcaaattgaagcaatggcgatgcaccttcatcccgacaagatttggaacttaacccttagttgatgataggaaattccacataaaagtgactctcatttagctcatgaacacactgactcttgactaactttcccataagtaataactactggcatgactgtccttcttctgacctgacttcggtgtcgtccacctaaatgggttgtgtagttgatatctcaaaactaaactgaccgactcgcattggaattgacacaacttgaggaactggggtgctgcgaatagagctgttgtcttgatgacgctaacgccttgccgttgaacaaccttgcaagaactgaccttgtaaaccataaccactataggtagcacttgttgcctctgggattggtggtgacttagctgtgctggtctgctgaagacttggtggcgtactgtctgaggttgcaggtgcttgctcttggaaaacaaactgactttcgctctgatcctgattccggcttgcatctgagcttgtacttgttgtcggagacattgtcgttgcatctgctgctttggactctacggttgcggtatcaacatctgacacatccatcattagatcttggctagccaggatctgaccggagcgaggtgctccgactcagctggtagcttgttgtcttgaactgatccactgactctgactgcaacacactactgctagagttgcttccgctacattcgaccttgcatcgagctttgcatctcctgcatcaatacacccatcttctgatcctggataccaaatgttgatcacgagcagggattcttctagcattgggagtaccttgtagctttcgactgatccattgttctgtgactttcatacaccgttgttgttgctcttctctctgatactgaccatctgttaccagaacggaagagaggtggaagagaggggttgctaaagataaggtactaaccacttgcctactgatatgttgtgagtacacttttattgttcaagttgcttaagcaaacaacctagtatggtcgcatccccaccaatgatgcaaaccatacccctgcacacaagcaaacaacacacgatctagaaagctaacggaactactcttctcggaaggattgggtttgggtcagcttcggggaaactt

SEQ ID NO: 25797 - DNA, 28766 bp, Oryza sativa
ctttgtgctattaaattttcttcttgagctccgaaaattcacgaaaaattccggagagtattttagggcacaaagaatattgcaaaatattcccggccaatgatttttttaagggaaaattttaattctcccattacttcacttgattaaattgatttaacttttatttaatttctagaaaatgcattatttaatgatttttaatcccgaacgaaaatcggggcgttacagcgagcaacggaggctgaagcggcgtcccggcggcgcgaagaggcccttgaagcccgtgccatggcgctggaagatcatgccggcgccgtggagaccagcttggcggaccgcgaggccgcccccgctatccgggaggcgacgctggcggcgcacgaggccgcctgcgccgaagaggagtccgcgctccggctccgcgaggacgcgcttgctgagcgggagcgagctcttgaggagtccgaggccgcgacacaacggctggcggacagcctgtccctccgcgaggcagcgcaggaggagcaggcgcaccgcaatctggaatgcgtccgcgccgagagagccgcgctggagcagcgggctgcctacctcgaggcccgagaaaaggagctggacgcgagggagcgcaacggcggggcggctacgggcgaaagcgacttagtcgcccgcctcgcagctgccgaacacaccgttgcggacatgcagtgcgccctggactcatccaccggggaagccgaagccctccgcttgtcgggtgagatagggcccggcatgctttgggatgcagtcttccggctggatcgcgccggtcgggaagcgggcctctggaaaagccagacaatttcgcgctccaccaatctggaaggcctcgccccgcaccttaggaggatggcctgggctgtccaacaactccccgaggagctcgagaagaccatcaagtcatcctcgagggacctcgcccaaggagcggtggaactcgtgctagcgagttaccaggccagggaccccggcttctccccatggatggcgctggaggagttccctcccgggaccgaggacgatgcacgcgcgcgggtccgggatgccgccaaccacgtcgtccaaagcttcgaggggtcggcccctcggctcgcgttcgcccccagctccgacgaggagggcgacgccagcggcgaggacgacggtggcgacgaggccagcgacccgggcgcattggaatgagcccccaggcccccgccaatctccaattttttctttttctttcttctttttgtatagatcaacttaatctgcaatcaaaaatgatgaaaaatttctatgttaactttgttttgttatgcatatgagttgaggatgatttgtgccgtggtccttttgcattttagcttgatttaagggctcgtgttcaagtcccgatcctcaaatggctcgggtcggggctagtgcctggggagatccacatgtcgagactggccaggccgggaacatggtgaccgagggttatgggtgacccgattgtgggtttttgccgattcccccccggagttcaccacgccccggggcacggctcggttctgggccccgcttggcgattttagctgaccgaaccgagcccccgagggcaaggttgagcacgagtgaccttatttcaagttaagattctttagaaggaaaaacggcacagacacaacctctaggaaattgaaactgcttttactgaaatgctgaaataagaaaagtaaggctgtgcatgtgtggtagcccccggctaaccctgcacacccgaggggggtgcggggttagcccgagcccgaaacctgacacccgacccccccctcaggggtagaagcgacgaaggtgttcgatgttccacgggtttggcagctcagtgccgtcgcccgtggccagccgtacggagcccggccgggggacaccgatcactcgatacggaccctcccacattggtgagagcttgctcagtccagcacgcgtttggacgcggcgtaggacgagatcgtcgacgcagagtgatcgggcccggacgtggcgctgatggtagcgccgcaggctctgctggtagcgcgcggctcggagggccgcgcgccgccttcgctcttccaagtagtcgaggtcatctctacgaagctgatcttgatcagcctcgcagtacatggtggcccgaggagacctcagggtgagctcggatgggagaaccgcttctgcgccgtagacgaggaagaaaggcgtttccccggtcgctcggcttggtgtggttcggtttgcccagagcaccgctggtaactcctcgatccatgaatcgccgtgcttcttgagaatattgaaggtcttggttttaaggcctttgaggatttctgcattggcgcgctccacttggccattgcttctggggtgggcaggtgaggcgaagcagagcttgatgcccatgtcttcgcagtagtcgccgaagagttcactagtgaattgggtgccattatccgtaataatacggttaggcactccaaaacgggccgtgatgcccttaatgaatttaagagcagagtgcttatcgatcttgacaaccggataagcctcgggccacttagtgaacttgtcgatcgcaacatacagatactcaaacccgcccggggcccgtttgaacggtcccaggatatcaagcccccagacagcaaatggccatgacaatggtatgatctgcagggcctgggccggttgatggatttgcttggcgtggaactgacacgctctgcatcgccggaccagatcgactgcatcattgagagctgtcggccaataaaatccttgacgaaaggccttgccaaccagggtgcgcgaggcggaatgggctccgcactcgccctcatggatgtcagcaagaagctcaacgccttgttcctgaggaatgcagttcaggaggattccgttagccgcgcgccgatagagggtcccttctaccagcacatagcgtttggaaatgcgttgtacgcgttcactcccttcgcggtcttcaggtagagtcttatctgtgaggtatgtttggatctcagagatccaagcgatcaatctaagggagcttggagcgctcccttcgggtcccgaggcctggactccgacgggcctcgggggtcggtcaggcgcatccgtctcccctaaggggtcgggtcgcgccgacggccgggtaaggctttcttcaaaggcgcccggtggggtctgggctcgcgaggacgcgagccgtgagagttcgtcggctatcatgttatcccgtctgggcacatgccgaagctctatcccgtcaaaatggcgctccatacgccgcacttggcgtacataggcgtccatttgcgggtcagagcaccggtactccttacagacctggttaacgaccagctgggaatcacctaacaccaggagacggcggatccccagtccggctgccaccctgagtccggcaaggagtccctcgtactctgccatattattggtcgctcgaaagtcgaggcggaccagatatctaaggacgtctctggtcggggaggtcaacgtgacccccgcaccggcaccctggagggacagagaaccatcgaactgcatcacccagtgggtggtgtgaggcagctgcgaggggttcgtgctggcctcggggattgagacggtctctggagccggggtccactctgccacaaaatcggcgagggcctggctcttgatagcgtggcgtggttcaaagtgcagatcgaattcagaaagctcgattgcccattttaccacccgtcctgtaccctctcgattatgcaagatttgaccgagggggtaagacgtaaccactgtgaccctatgtgcctgaaaataatggcgcagtttcctcgaggccatcagaatagcgtaaagcatcttctgggcctgagggtatcgggtcttagcgtcccggagggcctcactaacaaagtagacaggccgctgcacccttcggtggggccgatcctctctgctaggggccgtatccccggggcgttcttcgttcaagtggcctttcggggcgcacttgtcttctgtgccgatgacctcggggtcggaggatgaaaggggcggccttcccttagtggcctcggggccgtcctgggggtcgggggctcctggcatcgtcggacaagcgggcaaagggccaactccggtcgtcaggggcctctggcctccgttcggctcgggggcctcttctccctgctctttcccgggtcgagtcagcgcagggttagcctcggggtcagagggcgttaagtgcggccttcccgcagtggccttggggccctcctgagggtcgggggcacctagcaccgtctgacaagcgggcagagggccgactccggtcgtcaggggccgtaggccaccgtccgactcgggggcttctcctccccgctcgctcccgggccaagttagcacagaatgggggtgcacgaaatgaggattgtcttcatcgcgctccacaaccaacgctgcactaactacttggggggtcgccgctaagtaaagtagcaggggctcatttggctccggggcgactagaaccgggggagagctgagatatgcctttaactgagtgagggcatgttcagcttcctccgtccaagtaaacggccccgagcgcttgaggagcttaaacaagggtagcgccttctctcccagccttgatatgaaacgacttagggcggccatgcaaccggtgacgcattgcacatccctaagtttgctgggggggcgcatccgctcgatagctcgaatcttctcggggttggcctcaatgcctcgggcagagaccaagaacccgagaagcttgcccgcaggtacaccaaacacacacttatcggggttcagctttatgcgggcggagcggaggttctcaaaagtttccgctagatctgaaagtaaagtttcttggttgcgcgtttttacaaccaagtcatcaacataagcctcaacattacgtcctatttggctacccaaagaaattcgagtagttcgttgaaaagtaggacctgcattctttaacccgaagggcattgatgtataacaataggttcctacgggggtaatgaacgcagttttctcctcatcctccctagccatgcgaatctgatggtaaccagagtatgcatctagaaaacacaaaaggtcgcaccccgcagtggagtcgacgatctgatctatgcgaggcagggggtaaggatccttaggacatgccttgttaaggtcggtgtagtcgatgcacatccgaagcttgccgttcgccttgggaacgaccaccgggttcgccagccactccggatggatgacttcacggatgaatccagcctccagaagtctcgccacttcctcgcggatgaaggcttgacgttccggggcctgccgccgcactttctgccggaccggccttgcgcccggccgcacggcgagacggtgctcaatcacctccctggggaccccgggcatgtccgctggtctccatgcgaagacgtcagcgtttgcccgcaggaaggagacgagcgcgtcttcctatttgccatccagaagaccaccgatccgtgtggtcttggatgggccgtcgcccaaggcaacctccttgaccgggacctcgtcgcatgtggcaatccgctgcctcggggcggtgggggcggaggtgccaagcctctcgtcaccaccctcgggcttggtcgcagcagcgaggtggtccgcgcgctgctccatgcaagcgagcgcgactttaaggtcgccacggacagagatggggccaccagggcccggcatcttcatcaggaggtaggcgtagtggaccgccgccataaacttcaccaacgcgggcctccccaggaccgcgttgtagggcagactgaggtccgccacatcgaagttcacccgctccgtgcggaagttggctgatccaccaaaggtgaccggtaggtcgatgtgacctaacggccatgtgtgccccggcgtcacaccaatgatcggttgagacggctggagcaccatccccggggccttgatagcatcaaaggccgcgggggaaaggatgttgagagccgctcctccatctatgaggacacgccccaacttcacattgcagatggtgggggaaaccaccatcgcaatctgccctccccgggcaacgcacggtgggtggtcggtctggtcaaaggtgagggccacctccgaccaccgcgcccgacgcgtcgcctcatgagtaggggccgcggcgagaagctctcgcctcatggccttgaaactccggcgagaaacgtgagcacacgctcccccgtcgacagtggcaatggtggccccaggttcttggaaacctaggtcatcatcaccgtcatcgatgtcaacggcgggggccttctgtctggcctcacttcgccgtttaccggagggaactgccgcggacttgccctcacggcgttcctgcctcctgtcctcctcccacttcctcgttcgctcagccaagtttttgactgcgcgacagtccgcgagatcgtggagggaggtgttgtggacggagcaccacttgctggctgggcgctccctgctgggagtaccagcctctttctttttgtcgctcgcaggcctcccctttcgggtggcccgcggagcgccctcgacggcgaggacgtgaccctcgtcgccggaatggaccgaccttttcttcctcctcctgtcacgccgccctgtctgagcggcggatccgggggcggccgaagctgccacaccggaaccggaggggttccaggtccaggcctcctccttacgagccactcggtccgcgagctgaaaaagctctgcggtagtctggggctctttggaggcaatcttttcgagcatgcggttgtgccgcacaccccccctgaacgcgtagatcaccgcgtgtgcagggatgcaaggtatagtattgcggacttggcagaaacgctgaatgtacgagcgaagggactcatcatcccctcgttgtactgcgtgcaagtccgcttcttcacctgggcgtggataggtgccttgaaagttcatggtgaactgctggcacagatcctcccaggagtggaccgacgcgggtggcaggttcattagccaaccccgcgcctgccccttcagggccatgggaaagaaattcgccatgaccctgtcgtctcccccagcggcctcgatcccggtcgtatagacctggagaaactcggtggggttgacgctcccatcatacttctcggtgatggtgggccggaaccttgggggccaacggacattccgaagactcgccacaaaggctctacagccaacaccaccaaccgggggcacggagggctgatcctcacgtccatgtcgaggtgacgccctggacgaagaggcaccctccgttgcgcggggagcacgccgatcactacgtcggcgctcgatgtcgaggcgggcatccggctcttcatgctgatcctcccgagtcggaggcgccgacgagggagtggtagccgaatggcgtgcagcagccgccgctcgccgcgccctccgccttgatgacacagagccggtggtggcggcgccggaggtcctggtagcggcggaccgtccaccagcacccaggcgctgctgtgccgtcatgaccaagttggccacgtcgtccagccatcgctgggctggagactccgggtcagggacgacgggcgggtgacgtaggagcgcgccagcagcctgaagcactccctggggcgtgctgccgtcgccgtagacgaggaggcgtcgctccccatctcgccgttctcctgcaccacccgcgactggcgatgctgcggatttttcgactctctcgagcgcctccccccgcttgggactttggcgcggaggaggtgggggagtacgagctcgatggcgcgggtttggctccccgtcgtcgccgctcgcactcggagagaggtcgtgcgcctttgcttgctcggccattaggctgaacaagggaaacttgacccacacggaagagtatgagagctcagaaaacacacgctgagccccctacctggcgcgccagatgacggagctcgtggctcctcaccgggagaccgcgcaggccccccttttgccagttcggccgggggcttagggtgagatctcaagctctctctgtgtgtggaaagatcacgtgcccagaagaaacgcgagacacggacgatgtatacaggttcgggccgctgggaagcgtaataccctactcctgtgtttttggtggatctgtgtaagagcaagttacaaaatatcaactagccctctcctcttcccggaaaaaatccagcccccttctctgtgggcatggtcctccttttatatcttaaggggataccacatgtacccttccctttccaaactggacttttcttctctttatggacggagattggtatggttgccgtccgaatgacacttcgataggacagcccacacctacctccactcccggcggagacaggcgcaacgtgggatcgtggctgtctgttgctgacgcgaccagtgtcagaccggtcacagatcggtcattcttgtcctctatgcgtcagttcagcgatctgcatgatcacccttctttttgtagcatcttgcctgtaatggttgggatgaagcctggtattcatctaaccagggctaacgtgccatctctaagaggtaacacgctagctccggctggagacgtgtgcctagaggctctcgtcttgacgggacggggcgaggcgtgcgtcagaccaccagtcgccacctaaccgttgatccgaccggtctgtgactggtcacagaccggataaaagagcgcgctgcattgcgctgcatgcaacgtgacacgcttgaccagacgcaataaatgcggttaggtgagccctatcgtgttcacccaacctatgtacatagtgcaaaccccacagggggtcggggcacctcggccctcggggtcggggcaggagcaacccgaccccccctcggggaaatcaggaggagggcggacacctcaccctcgggcccgacgtccccgaaggtgccaggccacgtgggcgattccatctgcctcaagcctccgggcgcaatactcccggtcccatatcaccgacacatgtccccttgtaaccacccagttgcgcctcgatactcgtgcactctgtgcatgtatcgacggtcgccttcaaacttaaaatctgagtaacaacttgggtaaaactggagttttacaaaagacttggaaaacccgacacctgggtcggtgcttgcgaactaaatggattttccaaaaccgcggaccggggaacgtaccgggtgtacggtttcccgctcttgcacctaaggaccgtttccttggaatttcatccgaacataagacaagtacgaccacacgggtggaatgggacacccctggctgagtaactagcttatcaggggagccttgatgccgagagacatgtggattcgccggggtggtgttggggatgacccctgggcttcctggcacagtatggtctgggacctaacctgttgttggtctgggacccctctcgtcggcatatggtaaacctgtatcggctttcgaaatgccttgtcatgaaagcttggaggtctcccgacgtggctgatccccacgggctgggtgatccgggttagtaatgtcgtgtgggtaaagtgtaccccctctgcagaggttaacaaactgttcgaacagccgtgcccacggtcatgggcggatgtgaggtgattcctagcgtagttttgtttgactactgcttgtgaaattgctgttgtgaaactgggttcgatgtttgaaaaatcagcagctgacgggatcagctaggcccgggtggccgtttgaaatgttgttggcccgggtggccgtttgaaaagctgttggccgggtgccaaccctgtttcaagatctaaagactgatacattgcacatactccgaccggacgagacgcactgtcccatctgtgtcgtttgagaagcactcacctagtcgttttagaaaaagagttcaaataaaaccaattgaaaaaacaacagcctttccttgaagcctgcattaaacacttatttcccctggcttgctgagtactcccgtactcacccttgctctatataaataatccccccccagttgctgaagaagatgaagtggatcctgctgacgaggagttcttccaggagcaagtcggctacgatgagttttagggtttcggcctagttcccaagtcgcgcctgtgatgaatggtccaagtcctggcttccgctttccttttgtaatgcagttgtgagctcgggatctgtccgcagcccaacatgactgtacatctactctataataaagagacctctgttgctgtgatattctgtctccctgtgatactagtactgtttcctgggactggtatcgattaacaggttaatttggagcgtcacgggctagttccggtcgggactagttcggggcgtgacaaaaactcacatatttttcgcgcacatatttcttaaactattaaatggtacttttttaaaaaagaattatagaaaagttgtttcaaaaatcatattaatttatttttcaagtttaaaataatcaatacttaattaatcatatactaatggctcacctcattttatgcacatcttctaaatttttactttccacctctcaaacacacccttagaaaagttcactgggtttaatctaacgtaacacttattggcatctaatcggcgaaacaacttaaaaaaaataattatggagcccaggtgagctgacatgccattctatctccttttcttcttcctcctgactttcccatatctttctccaccattctgttaactagtgctcagtgggtggtagccaccagcctcattgcgtgcaattggtgagctccatttctcctatcccatgtagtacgtcgtggagcttgagctggagtagcattggcaatgggtgcggagcttgaactcaatgacgtagcagagagccgacacaatggtgcaaccccatatatcacccaccgcctagctattggattgccgctagctcttctttactttgggacactagctatttttgagcaaaatctactcttatactcttgatcaataatagaaattattggtgggctaaattccctcctcatagacctttattctcaacccattacaatctactcttgatttaatcatgatcaatggtgcagattgcatcatccttttgtgttgggaagaaaagcctagccttcattaagaaggagagagagtgagtatcatcagccattggagagaataagcaacaggcgaaacataagagggagaggagagtggaaaataacagttgcagtttgttcagtttggtggctcttacccgattttcattaaattagtgattagaggtttaaacatggttggattggcatcaaaattggtgagttcattcctcgcttagagcacttcaatatggtcagtttgtgtgaggattggttgagtggagcaccggatttgagcagtggtttgtcagctcgagtgactacaatttcagcttgtgcaatatttggtagaatgttggtttgaggggtcacacaatgtctaattaggctgtttttttggacagcttgctcatagaccatcacttctgccaagttttgtgcaatttgcttctgtagtttgggatatctcagctgagaaccaaaggggacataatccgctatttgttatattgttgttgttataactcttgttagttgttacggttgataccgataatgccaagtatgtaacttgatgatatagctgttgtttgtaatgtgtctttaaatgttctagaaaagactccatttgtacccatttttattgtaatggaagtttggagtggaccgttcgttccagggttttttactcctcacaccgagaagttttttttacgtaaatcaccgtcttttgtgtgtatgcgtttattgttatttcattgctgatttgctagttaactatccttaaaaaatcactcgcttgtgcgagatatatttactagttggtgaattgttgcttgcacattgaagtagatttggtttagcccaaacaattatgttgcaagaacaagtttttccatcacttgttatgtcacaagaatatacactagctacttttctattaccggctctaaaatacgagatttggaggatgagatgtccctccaaaaggaaaaaattataagcgtgttggagattgaacacgagacatcccaattgaaaccacacaaccctttactactgcactaagtgcatccctctattactggctctgttgaaagaaagaaaataaatctatgtttcggaaaacatcggcatggtaaatatacaggagctccctataccaacattgataatgctgttctctcaactgcaatggttgggaacattctatttgtcatggtagactttactgtattgtaatgggcttcatacaggtaagacagactttttaatcttttcagcctacatgggccggcatgaagaaaatgtgttaaggggaagccggcatgaagaaaatgtgttaaggggaagctcgatcaagaagaggaatcatatcaacggcccaaataaagaactttcgggaagaaagcaaagtgatgataagagaaggtctgatcatccatcttttttctccttttgaaaacttcgaattgcaagaaagcaacgaggacgcgacgactttattggcccccgatttgctattgatggcagcacgaatgcaaagcacaggctagtagcaccaagaacgaccagagagattactgccaaaaaaaaagcgagagattacatgcgaaaattttaaaacaattttaaaacaactcccattaaagcgtcaaacaaaatagtaacaaatcaaagcagcagcagcagcatctatccctgctgcctagtgcagcatttacacgttacgatcatacgacgtcgtcggttcgatcgagctcgcgagctctgaatctcgcaggctcgaatcggatggccgtctactcgacgccctcggtggatttctgggccatgacgacgccgagggtgatgacggaggcgtagatggagttgggcaccttgcgcaccaccctgccgacgccgggcacgccctccgtcgccctcttggtcgccagcgccagcgccggcgccgccaccagcgtcaccagcagcttgaagctgatcgcgcacagcgactccgccgtcagcttccggatgaactccgcgaactcctcccggtccaggagcccgtccaggttgatgtcgtactcctgttgcatcactgtatcatcagccgtgacaaatccttgggacaatcggacaaaggctaccaacctaccactatcagaattagagtcccaaagaaacgaggaacgcaacgaggaaaaaagtctgatttgattgtactcctttacctcactgagcaggagaattatgttagtactacttttagagtgtaaccttcgtcttaaaataagttccagaaatacaaatgaaaaaaaatatcaaattatcataatactctcatttctcagatcctaatgtaattatttctttttatctatacctaatgtatttattctctaattttacaaactttgagataattattacttaaataaacttattttagaataaatgggaaaaagttaaaaatgaactaattctagtatatgctatctccaacttcagagtttatagacaaagtgattccactgtaaataaggtgaaatagaatcattcacacctaccgagaaacagagagcagaaaccgagattactttgcttttcgtacaaggaaaagctgcaatatggaagaacgccaaagggaactactcctatctaattgaccaaactgattaaaaaaattaaacgaatgggatgtgaggtactagtggtttacattcatcatggccttgagcttctccttggagggcggatcatagtgcggccctggtaagtacttgttgatgtcgctgccacaacagccaccaagaatcaatcagggaaaacagatacggataacaagaactcatcaggaatttggaatggatttggttgctcctacttgtagacgcagaggacggcgatgtagacctcctcgaaggtgagggcctcctgctcgcgcttcttggtgtcctcggtgaggcggtcgaacaccttgtccgtgatcttcctcacctgcttctccttccattgcctccctgcaccaaccaattcgatccatatttcattcaccgcacaaacccgctactttcggatcgagcgatgcaggacaggaggacgcgagtcgattggtgatgggaggcaaggttttaccttggagtttatcctggagagacgcccaggcttgccccatggcgacgtcggcggaggagacgccggagtgggatgagatgggggttttggaagggaagaagataggagatggaagtatctccctctgtggtttgtgattctgatttactttagcctaatctaatcatgtgaacaatctctctctctctctctctctctctctctctctctctctctctctctctctctccaccgttgattttgggggtttgttggaggcctatgctaggggtactcgtgaagtgtacccagagatattcctctcctcacaacacgggtagaaatgcaaaaagtcgatctataatgattttttttaaaaaataaatctatagtgatattcatttgtatgaaaagctagtgatgcacactaatttcttttccatcctctagttagctttcttcttctgatggaacttgccatccatatttaagttatacacttacacatatactcgtatttacatcgaattattgtttcggtagtagttaatgtattttaaaaatagtgactttgttaatcttaagaatgtgttggaagaatgtacgtgcatgcttttatatcagtaagtacatgcgcgtttgcataagcatatgcatcgggaacttaatctatatacacaagtcttcccgtgtacataccgtacataccaacttaaaaacatatcataaaatattctatacagaattgtacaggtacttttagtagtattatatctatgagcaaagtttcattttcaaattcattgtatatagggagcaacaaaatagataaaattcagggaatttatattcttaaattgtcaaaaaaaattatactttttaagactaaaatataatgaatttgatgttaagattttatacataagtataattgacggagctggtggctcctcaccgggagaccgcacaggcccccctttgccggttcggccgggggctcagggtgaaatccccagctctctctgtatgtaaaaagatcgcgacctatcgaaagagcaagagacacaggcgatgtatacaggttcgggccgctgggaagcgtaataccctactcctgtgttttggtggatctgtgtatgaacaagttacaaagtatgaaccaacccccaatcgttctgggatcggatccccccctccaaaaaatcctcctctctaagtgggcaaggtcctccttttatatctcaaggggataccacatgcccctctctccttccaaactggacttttcctctcttcataaatggacggaaatcggtatggttgctgtcctagtgcgccagatgacgggacggcccatacctaccccctcttccgccggaagcaggtgcgacgtgggattatggctgtccgttgctgacgcgaccagtgtcagaccggtcacagatcggtcattcttgtcctccacgcgtcagtttagcaatctgcatgttcgtccttcttcatgtaacatcttgcctgtaatggttgggatgaagcctggtatatatctgaccggggctaacgtgccatctctaagaggcaacacgctagctccggttagagacgagtgcctagaggctctcgtcttgacgggatggggcgaggtgtgcgtcagaccgccaatcgccacctaacccgtgatctgaccggtctgtgaccggtcacagaccggataaaggaacgcgctgcactgcgctgcatgcagcgtgacacgcttgaccagacctcaataaacgcggttaggtgagccctgccgtgttcacctaacccatacatgtgacgaaaaaacccacaaggggccggggcgcctcggccctcggggccggggcaggagtaacccgacccccctcggggaaatcaggaggagggcggacacctcaccctcgggcccgacgtccccgaaggtgccaggccacgtgggcgattgtgtctgcctcaagcctctggtcacgatactcccggtcccatatcaccgacaataatattattggaagtacttataccttttttttagatttttaaggtgaaatttgttatttggtgtacatagttaccttggagtttatcctggagagatatgttcccacaaaatatatgcaaaacatatactactattgtaaacatattacttagcggtcctccaagcatgcaagtccgacccagttgcatccttaaaaagtagcgtaggataggcagatcatggtgtatgctgttccttcttgttgtggcatcagaccaatttttttctctctcgtcagccgtgagtgaatttcttgtgtatcatgcaacgaaatatcctgagagcccaaagaaagtttttagtagagttaagttattgatcgccagttgccttggtaacgctactgattcaattttctcgctataatgccagcatttcaattgcagatcaggcctgcgaaactactctcttgcgttactttacaaatagttccttctgatttagcatttttcatgcctgaaattcaaaggcctctctaacttgataatacactgtcatatgtactacatcagttaacgtgagtattatagagcgttaactgatgcaagtctgcaacccaaatgatggattaagctggtgtgtgtttttactcagtcactgcttgcccgcccggatgtcctgcaggaacatgaggccgacggagaagacggtgaagagcagcggcgtgggcaccttctccacggcgggcccgaccctcggcacctgcctgccggcgctcttggtcgtgacggcgagcagcggcgccgccatgatcgccaccgccgccttgttcgccaggacgagccgcaggtccttgcggacccactccatgatcagcctccggaactcttccagtgttatcccctcgggagtttccttcttgtattgctacaacgtgttgcagagccaaaacgaaaagttatataagccgtaacatttattagtgataaaaaaatctgtatatataatttttatatgtatattcttagcgacttaaaaatcaaatgatgaaaaaacagtaaaatcaaattaagttctaaaattcaaattatggttacgtagcaagctagagagcaaataatgtagctgaaaagatgtcaccgttacaacattatttaaacagcaagaaattgaggttgctggtactttgaacattgaggagcctcttccatttttcttttcagaaaagaggaggtaaagtaagttcgatccgtacctccatctgcttggcgacaacattcatgcatggaggatccttatgtggaccagctaactgcttgttaatcgagctgtaagaaattttcgacgaaaatggagaacaattagagaacatttcaggaatgacagagtgatcgatacctacgagtgatttgatcgatctcacttgtaaaccatgagggtggcaacatggagggagctgatgtccaggagctgcgtgttcttgtcggacagctcggtgaacaccttgtcgcaaatcctcaccacatacagcttgcctataatcaaagacaagtaggtaacacgaaacaaaacattaacatttgttactagttgtaaccactgcatgcatggacaagaagaaaaagaagaacgagatcgattaccttgtgctctgtcccacatacggcagaagaactgagccatcatcctcctctcttcgtcggagatgaactcaagaactcgtaaagtggagtctacatctaggatggcatatttatgcgaggaaatctgtttttggttctggatagatgccccagagtcgcttgcagggaaggcacttctttccttgcccctacagcaatctgaaaagggaaaaaaagaagtaagaaaagtcttcgttgtgtgggcctccggattggcggcccaagtggcccagtgtccactctactcgtgtcggattagcaaaaactgacacatcaatttacagccgtaatgatgaatagacgccagttaactgcctggcaaccgctcatcaggggacaaatcctcattcatcacaccataaatcactatttaaccatctactgcatctcattatcgcattcgctcaatcctagttccaagtcacaactcatttctgtttccactttccaaacgccgccagttgctccgccgaggcaagcgcccagagcacgaaccggcgatgatgccgctgaagaagaagatggatccatcggcgtcgaattcgatctccggtatgttcctttttatggcacattttccaattttccttattgattcaattgtggaaaacagcatcttttcttcatggcaatctgataatctgaggatgactgtaacctctatcatctcttcttcagcacctccctctgaagaaatgggagagccagagaaaatggatgagatggagcaagtttcgtctgatctaaagtcgttgaagacgctatatgggctgcttcacaggggtccgacggatgaaactgtgagtttttctaagaaccagactgaacatgtcgtattattatctatcttaatcttaatcttaactcttaactaattaaaagattagtatttttcctttcatcacaatccgtttcttccgtccgttcgtccgtccgcgcgatttttcttcgcccaagcgttcgtccgtccgcgcgatttgagattaaaatcgaaaccgatacaaaatccaatcggataatcctacttagagaacccaaatagaaggggaaaaaaggaaaaaagaaaattttacgcttcacagagaatgaaacaaaaaaaggggcgaaaattcctaacctccccacagccggttgtcgcagacaccacgcgggagtccgccgccgccgccggccgtcgctgacgcgcgcgggaagatctaccgccgccgcaggcacccgccgacgcgcgcgggagtccaccgccgtcgccgacgagcgcgggagtccatcgccgccgccggccgtcgccgacgcacgcgggaatatctactgccgccgccgacgcgagcgggcagtactctgccgccgccggccgtagccgatgccgctgaggggagacaacgggggaggggcgccgaggcaagggcactcgacgggggcgcactccccctcgggcgagtgcgcgcaccggcaagggggcatgcgccggcgccgccgatgagcgccacagctccgccgtgagagagggaagggaggagaaaacctatgcaatgttcggctaattggaaatgaaaatgatttcccacccaacaaaagacatctttaaatcctaaccattcattctccctctttcatttaatcctaactcttcattcatttcccaatcccaatcacaatccccatttcccattatccaaacacccctagggttttcgtcagcggccggggtgggggggggggggggttgtccctccgatctcaatgtccggccgtccgatcgaagccctagagatcagacgaccggtgttggctgggccgaattcggcccaagagggtggcgcgcggcacccactttcccggcccaggcccaagttgaggcgtgggaaagggggaggtggtgcgcccgcgcgcacttagaggctgtgggccggccgaaggaagtccagtttagatccctcggggggggccgaagaaaataagtttatttctaacaaaatgtccgtgcttcgctacggtgtatcaaaactaaaaatatttgtttttaaccaagttattttcacactgttttgttacttttgctatcggagagagggtgtcgtcgttgccgccgtcgcagggacgccggtccgccgctggctcccctcccgctggatccggcggaggggaggccgtgccgccatcgcctccctcccctcccgctaggtcgccgccccctcccctcccactagatctggcagaggggagggcaccgccgccgctgggcggccaggccgccaccgcctcccctcctctcccactagatccggtggaggggagggcatcgcccctacatgccacctcccgccgctggtcgttgctgacaggcaggggtagtccaccgccgccgccgtctccgacgccatgcggaagacgaggtcacgagggggagacgatggggaggggcgccggggcaaggccacttgacggcgccacactcacccacggacgagtatgcacaccggcgagagggcatgcgtcggcgtcgtcggtttccgcttttccagcgatgtggcgagggggtgagaaggctagggtcccgatcgtccgatcgaaaccctaagatcggacggccggcattggctggactgaatccaacccaagtggaggcgcgcgtggggctgcttccccggcccaggcccaggttgcagcctggggaggtgggaagcgctcgcacgtgtacataaaaggccgtgggccgaccggctaggccgggaaaaagtttgttctaggtccctcagcaacacttttttggtactgtacacactccgtaatcatcaggtgcaacgtaagggcacttttccttgttatattattaaaggaatagaaaaaggagcctccgcgttcactctcatggcctagaaattctcacattaatcggagaaaaggaaaaaagcagagcccatatagaaatacaatttagaaatagttaaaattcggaattaaaaaaataaggaatattagaagaggagactagagtccatatagaaatacaatttagaaatagttgaaattcagaattaaaaaataaggaatattagaagaggagactagagtccatatagaaatacaattaggaaaaaactgaaatttggaattaaaaaataaggaatattagaagtagagtatagagtccgtatagaaatacaattaggaaataatagaaattcagaattaaaaataaggaatattagaagtagagtatagagtccatatagaaacataattaagaaaaaaaatagaaatccagaattagaaaataaggaatattagaagtagagtatagagtccatataggaatttaaaactaactaaaattcggaataaacataataaaattaaaagtagagtttagagtccgtataaagacacaatttacaaataactaaaattcaaaattaataaaaacatgggaagaagagtttaaagtcaatataggaatacaatttagaagtaactgaaatttgaaattaaaaattaaagaatattgaaagatgaatttagagtccatatagaaatacaattagaaataataaaaattcagaattaaaaaaaaagaaatattaaaagacgatactagagtccatataggaatatatataatttacaaataactaaaatttgatattaaaaataattaataactaacacgtatataaaatacaatatgaatattacacattagtagtttcgtaaagttattgcaaaatttaaaattatgttgtcattgtaatatattttaataatactagaaaaaatgccagtgcgttgcgacgggtaaagtctattttaatcttattattgttatatgctttagttaagatgaaattcactgtgggagtttgcttgcatatataatttttttagaaaatcatgagatgcagttaggagttcgatcgtttcaagttagcatgtaagtttttttaaatagatttcttatatgattccttctatattaccaaaagtgaacgatcttaaaaaccgactcaaatacagatatgtatttccaaaagcaaaggaacttaaaaaccgactcatgcatagatgacgtaccaaaatactagcaaaaacacggatgaccgaccgcggaaacatcttcaatttttataaccgactcaaacacggatgatcgaccacggaaacatctataatttttataatattagagaagagatatagattaaaatcaaatcataaaattaaaaccgacttaaacacggatgacggaccgtggaaacgttttcattttttataatagtagagataatgagaaaacatatatgctattatatgagagaaaatataatgatgctaaccgcgcaatatgcgcgggccaccatgctagtttttctgaagtgaacaagaataggagaaagcataaatatgtttccatttttctaaaccgttttggtcaggcgtttctgaatagcagagcagggatttatttttcagtacctgctagatgctcgtgtttagtgcatattcttattctccttggggaaaatctgaagaaagaaaatgcacgtttagagttgctagtatcaattcatgctcatattatctcgacgttttacagttggatgaaacatcaagagccttcatgacgaagatgttagatgacattactcgtcagacactcctcaggcaggcaaaggtgatacattttcggaccatctggtcatatttcatttagacattgtttgcaagattgcatcactccaccttcatctccgttttaaattttcccggcaaatgctgatccaaaagaaacaccgcacgtttgcagatgctgtctcctgtgctggagaggaagctatctatccagtccgatcatcgccggacgcgcgacgacgccgtgccggtgccggtgccggtgccggtcgtgaagccgatagcctcgttcagccccagcctccatgccagtgagaaatcaagccggctgaggacgcaaggcgcgacgagaaggcgagacggtcgccatggccaggacaactaccgtctccttgctcgcgtcgcctcgaaccgctcggcaagaaccacagtgccgccgccggcgccgcgccaccgtcagagtccggagcgacgccttgaccgcctcgcctcgcgccgttcgtccagagccgtgacgccgcggcgcggcacggtggacggtgggaatccgctctccgacatgaggtgtccgcgccgtggcgacgactcgtcgatggagcgcggcggcggcagcagcagcagcagccgctccctctcccgcgaaccgtcgtcagctgtgcaggagcggggacgggggctgcatcgcggcgcctcgccggcggcggcaccgcgcgtgggagcggagggcggctcctcgacgcgccgtctcgggaggctggactccggattgtccgtaaacttggtgccgccgccactggcgcggcgacatggctctcagcgaggcggacgcggcgcggcaacaacgacgaagctgtcctcgtcgacggacgtggctgccacgatacgcagcagcatcaggccgagctcccgagaattcatggagcgctccccgcgtcgagctggtgaagctgaaaacgataggaaggaaggtgccgatgctgccagcgtcagcaaagggcggccaagccgtggcgaactctcatcgatgaagcgcggaagcagcagtggccgatcactctcccgcgaaccgtcgtcagctgtgcaggagcgtggacgggggctgcatcgcggcgcctcgccgccggccgcagtgcgcgtgggagcggagggctcctcgacgcgccgcctcgagaggctggactccgggttgtctgcgagcatggtgtcgcgccgtggcactccgcgagccggacgcggcgcgtcaacgccgaagctatcctcgtcgaccgacgcggctgccatgacacgcagccgcatcaggccgaaccgtgacctcacggagcgctcgctacgccgagctggtgaagctgatgaagacgagagcctgcggcggtgccgggggaaggggaaggggaaggagaagggcgatgatgatgctgccagcgtcagcatgggccggccaagccggccgccgcggcgagctctgaaccggatcaactccagtagcacgtacagtagcagcagctgcccaccagagccgacttcgagcacttcaggttccacttcgtcgtgggtgccaccgcgagacaatgcatcgtcgtgggcgccaccgccaccgcgaggcaatccgccgtcttgggtgccactgccaccgccaccggggggcaatgcgccgtcgtgggtgccaccgccaccgcaaccgcggggcattgcgccgccggagtacgggtttcaagtgtcaggcgcgtcgagggtcagtcgccaccttcgccggcaggagcgcctggagaggagagtggagcggatgaggaggttcaaggagaagctcggcacggtgttccaccaccaccacttcggtccctcgggcagcaacgagggggcgcccccgctgttcagccgtgacgtccacgacaacggttatcaccgcccgtcgccgtggaaggttctcggcggtgtcctccaccgcacgacacgccgtggggagaagaacaacgagggggcgcccccgctgttcagccgtgacgtccacggcaacggacatcaccgcccgtcgccgtggaaggctctcggcggtgtcctccatcgtgcgacacgccgtggggagaagaagaccaggagcgtgccggcagatcatcgtggcggcgtcggcggcggcggtggcgtcgggcacgcgctgttacacatgtggaacaaacggcgggcgatggcgaagcaacgtggcggcgtcgggcgcgcgctgttccaaatgtggggcaagcggcgggcggcggcgaaacagcgtggcggcggcgtcaggcgcgcgcttttccaaatgtgggtccaacggcgggcgacgacggcgaagcggcgtggtggcggcggcgtcgcgcacgcgctgttccacatgtgggggaaacggcgggctaccgcaagcgctgggatgtgcggtacgggaagccggtggaaggccaagaagttgcactggtggcagcgggtgaggccgcggcaccgttctggacatggaaaggcatttcggtaactggtagcagcttatctgtgtctctattactactagtagcttctttgtgtggagatgtggctatactattttgaaacaaattttgaattgtagaagttgctataatttaagacgaatggagtagcttatttgtaatttgtttcacagcttattgctctaagtaacaatgcattatcttttcattagaagcaaatattcctctctcaatagagggtgcaaagttagtccattctcatcgtgtggaacctaaaagaaattcattatcatcactagacgaaggggtacagcataatcatcaaagctaaccatcctagtatggaaatttcagctgccgcataaataagaaaaaaaaattgccgatagtaaaggcaaaatttaaagacaagggagattttgagaataaacaaaaagaatctcccattattttattcaaatgatacatgaaaggataatatttaccagacaggaaccgaggttttcaaagtacgaaacatggctgctgatgaacagaagcagtttattccgttattcggaacacggaattacagctagaagagacgaagttattcttaccaccctctcaaaaaataaacagtacaagtttgccatcagatgtatggcaaatcgcctagcagcaagccatcaacccttagttcttcacagtggtgacatgcctcagaagcatctgaatcacttcaggggagatacttgcagcctgctgcttgagttgtgcgattttttccgctgtctcctgctcaagacgcttgacatttgcaccagagtcaccgctactctggaaataacaaataggaccattagatgaatatgggaattgggaatgtatcctatacacacaagccttctacacaaatatgttcccgatgaacatacctctgcaaccttcctctgaaattcagcctccatctgggcacggtattcagctatttccctctcagcctcctcttttgcttgcctaagccttgccgattttgctgccaaacaaataaaaaatctcttacatcgcaggttatattgaaagggagaaagtttactctttttttttagatcaagatagtatcaaaaatctatagaagctcaaggtcatatttctatggttttatatccaatttttgctatgggataaaacatgttttgctaactaaaaaaaaaagcactttcacccttatcattttgtggctaagcctgatatctgcaatttcatacgatattcaaaattaatattcaagtgcaaagagttcagagtagattaagattcttcctactaaaattgatgtgtatatgaaaaaaaattatcattgcattcaatagagcagacatgttcacctagtacatctacatactactctctctctaatgttatgcttattcataacatttacggagagggacagagagttaccagccctagcagcatttactatttgctgagcctcttgctctgcagccaacaattgctggattccactttggcgtctgtttgcgtccatctttgtgctgctgaaggaagaatcagaatcaattaaaaagaactcagaaaaaaagaacttgatcagaaggccaggtaaaaccatcaaaagtccaaaaatatatggcacatctcaatactaacagtaaacaaacaggaagcaaatatgatcatactacattcaacaagaaagatctgatgctactgttgtttacaacacaaaaatataatggtccacacataaagctggaaatctaccatggacctaacctttgttcatatatattctgtttcaacctgctgaactacaacagtaatagcgcgtattgcctgttcctcagttctaattactttggattaatgaattaactatggactctcgtgtatagtatgaatagacctacccagctatcttataaaaaacaataatatcatgtaaagatccaccaacagaagttagcaggggcgatcacaagctggggcatagaggtcaagttaaaccccaaaatacaaactgctattagcaccctactgcacattaaaaaaatgtacaacaagctggatagatcatactattacacgcatagagataaagatttggattatatcaaccaggggcggaactaacgtggggaattgctaccgatcttttcttggaatcaaattgctataagtactaaggttaaggttaagggaaagagaaaagcttccagatctagaagacaagctgaaggctaaggcgaagagataaggcgtcggtggagaagagaatgagaatgtcagtacgggtgctcaccggcgaggatgcggtggaagcagaaagacgccggcgccgctgctagccggaggcggcgggcgaactctctacgatgaggaaatcgaggccgatggaacagccagatcgactagggaacaaggaatcggaggccaattaagctatggccgggaacggtgaaatcgaccagggagcaaggatcgagcaagatccagcaacagaggctagcgaatcaacaaatttactcaatctgctactatcacccaatcggatcaaacgagcaggatcaaaatcgagaaaacgtattagggtcagcaccgaacgcagtcgattcctaccagatccggtcaaattgatagcaacacgaacacaaatcgagagagagagatcgcggggagagggatcgagttcaccatacctgcgagagagaagactcgaatcgaacccgggggaagcgacgagatttcgatggggaaaatctatcttccttcgtgctgctcgcccatgggttccaagcttatttattcatgacgatgattaattaatcccgtttcgtcatatcgttggcgggccgtaatgggaagcccaagtgtaatcggattaggaagcccgctagtatcaaagcccaagcccaacacgacagcaaatatctctctcatctcatctcttctccaaacccaatcaaaaccccatccgattcctctccatttcaccaccaccaccaccaccacctccgcctcctctcctccccttctcttcgccggcagccatggccaccgccgcagcagcagcgcgcgccgtcgcggccgccgggcgcccggcgcagggggttccgttgtcgcggcgcctcacgacggcgtcgtcctcctccgctcgcccgctgcggcctcgcggcggccgcgctgccgggtccgtccgctgcatggcgcggcggccggagtcgtcgtactcgccgctgcggtcggggcagggaggggaccgcgcgcccacggagatggcgccgctcttccccgggtgcgactacgagcactggctcatcgtcatggacaagcccggcggcgagggcgccaccaagcagcagatgatcgactgctacatccagaccctcgccaaggtcgtgggaaggtaattgcaacaccgtgtaactcaattgaaccacccaatgcatttgtgcatcatagaacgatgctaattttggatgactggtgggtggtggcatgtagtgaggaggaggcgaagaagaagatatacaacgtgtcatgcgaacggtactttgggttcggttgcgagattgacgaggaaacatccaacaagctggaaggtacaccgtgatg

SEQ ID NO: 25798 - DNA, 10654 bp, Oryza sativa
tgtgtaaccagcttctcagcacaagatgtacagccagtgctgtaagataaataaaagtatcatggctttgccgttgcacttgctactacatgctttgcctgcttagcattatggttgagtttactctttcttcatagaaatcgaaatgtgctgcctgcctgtcaagctcaccagccgttcaatggaccactgaacaaacatgtttacaaaaatcattatcttaagctgaaacaggtaatagtactgtactaatcttctgcagaaattgcagtagatcagtgccttaatgaacatcaggagcagcgtgagagccgtacggtacagatgcccaaaggacggggaccgtatgcacggccacctatcctgtcccaaaatcgagttcaaagtacgggagagaattttgtatgggtggtcccatccggccagatcaaggtgggtcccggtgctcagcggcacaaaagagtgccgcgtgggcccagcagcgagctcttcgaatattttgtgctgggctgggctcaaagctccaaaagatacagtagattggatcttgaggacggatgccaaggtggccggtgtggcggcgccgtggccgccaggctggctggacgcctccggctccgggccgacgaagcttcctcgcggcttcgagactcgctgtgcgtcacctgccatatgctctacctgatggaatctggatgtgtgggcggtgttatggcaaaccacagcaaatcagcctcactgccgatggcgttttttttttattaagataatgaattgtttagttaagaaacaaagttaagtacatcaagtctttacacctatcaaaatgcaagtacctaaaagaaagaaggaaaagaaaaggtcatacgatatcttagacataacatgctctctatgacctatttcccagtactacaaatctggacgggtggctattatattcataatactatggacagtcctccgtttatattccgaccactagaatatgtcacattatattctagatttgttatttatgagactgatggagtaacaataacgcaacattagggcacccacaatggttatctataggctctctacaagagatctatgtcagcatattttcctacttggaaggtattaaatgaagagagagagcaaagctatctactaacgtagagatagtctatagagaaaaacgaggcaatgcatgagagagctatagataccaatgtagacatactattaaggtattttactattaatcgagtctattgctgagatgtacatgtttttatagagaacaccttactttatcattgcgggtgctcttatgtattctttgaaaagcattcaataaaaagtagtactccctcttatcccaatttgatcattacataaggtatttaagatcttctcaaaatgaccatcatctaacaagtaaatctttttttgcgccaaaagtaaatgagcatcattgaatgcactgcatgcaaccaaccatgagtaatttatattggtccaactatatgcaatatttaaaacttgatgctccacgaaacacgaagcgacgtagcaccttaactgatgagaattaattacagaatgatgaatgttttattgttcttggtatatgtgctctttacttaggtgatgattgaaatgggatggaaggagtatttccttgttgaaggcttttcaaagaataataacatttattacgtcatttcaactttgaatctcagcagtagaagaattgattgatcgtttgatggcacttgatctagtataggagtaaataagtaaattgcactgataatatatgacacatatatacacaaaattgtaagccgctcatcctagtacacaaacatgtgtggtgtgtgtgaatcaggactaaaattataaaccatagctaatctttctgacttagagatttatgacgccagcatacacacgagaatgacaccatgtagatatgtatagaatctagaaataatgcatgctgactgtatataaaaagatgtataaaaagaagggagttatagtgataaaaacagaggtaaggtaaactataagggtaattttcaattataacatttctcatgccctcacgcgtgatatcctaattagagttcaacttaacaagtttagctatagtgctttatttgaccttggttcgtatgcggtgcatactagctagttcatctatctaaacgagcgtttcgcaagttcgtgtattgtcaatacaaattactcgttcatgcgtggtgcttttggtacatattttcatttttaagttagagttagtcttttcgtcccacaaaaaaccaatctagcattggatgagatgttttctagtacaatgaatttggacaagagtatatccagatacgttgtactaggaaacgtttaatccaatactagtttaaattttttttggacggagggagtatataactatattagccaccgtacacactagtgaggcttaacaaaattgcatcagttttaagctatcctagatcaaatcccatcaaacgatttgctcaaataattaaccctcgcctaatccaagcaaacaaaccagccggagtgacaaatcactacctgcctctttttggggcagcaacatgcaaaaatcaccgcgagacgtctcggaggcgcagtactctagagtctagatcgccgtcgatttgctgacgctctactctgcgcacgtctctaccaccgttgtgcgtacagcagcagtagtgctgtacaggggcctccgccctccagaaaaaaaaaaaccgcactcacttggtacggtactgtccgtgtgccactcgtacagccgcagccgacccccgacaaccgcaacggcatgcgccccctgcacctgcaaccgcccgtcgtcgcaggctggctcgctcgctcgcagcgtccggcacgaggccgcgcgtgagacctcccgggggcgcacggccaccttttcccacccggagcccggtgcggctgcgcccaaaagcgctcgcacgccacagttccccttgcccgcttgcccccctcgcgcgcgcacctgtgcctccccaagtggccgccgcccgcgcgcacagactagtagcgaaccagctagtactagtctctagccgcgagcgtgacgtgggttgcacgctcgtgtcacgcacgcgtttgatacgcccgtgctgcttgcgatttgcgggcggctgatgggtgggcgggggcggtgcgggcgtacaatggcgtgcgcgtcaacgataattctgcgtggattttcgagggattctcggcggtttggcggccggggagggacgtgcccaggttggcactcggcacttggcagaattggcagcaggcaagctttcccggtacagtactggtgtgtcgccccgcaggcaggcagcttcgtggcccaacctttttgacgacgttactattggacccgtctgcctttttagcctgttctctgtggcttgacgtgacatggagacatatgatgcctgctttcaacctggattaagttagaccgtgtttagatgggactaaaacttttaagtttctatcacattagatgttttgacattaattatcgggactggctatatcttatgtgacagattttttagcctcctatcatgcatatttcttatcctttagataaacatctaacggatgacattaatatacacaaacaaaatacaaaaaacaaacaaacggaccacatgaacaatctgaagctcacgtgggctcaagtagatttcagacttacatcgtaaataccctaaaactacatatgtaattatagtgtaagtacgatgtaattagtacgcgtgggatcatacaatatcggatattctgtgaggaacctcacgttaaataacggtaaaaagagtaacagaagggtcttatggtgtgaacacgttaatgatcagacattggagtccaattccatgcagccataggacatacaaaaccgaatcttagcgtcaaatcgaacggatagaaaagtgacagatttttgggaaaaaaactgtcgacaaagatatagcaattccgttaattataaatattaaacataaactattaataaaatctatttataatcttgaactaattcgcgcgacgaatctattgagcttaattaatccatgattagcttatatgatgctatagtaaacattctctaattatggattaattaggcttaaaaattttgactcgcaaattagctttcatttatgtaattagttttgtaagtagtctatatttaatactctaaattagtatctaaatacagagactaaagttaagtccctggatccaaacaccaccttaaacattggagtatggatttgctgcctcctcttcatttactctcatcatctaaattatctaaggctgtgtttagttcagcgcaaagtttggattttggttgaaattggagatgatgtgattgaaaagttgtgtgtgtatgacaggttgatgtgatggaaaaggactgaagtttggatccaaactttggatcagaacacagcctaaattaggcctggtttagttcccaactttttcttcaaactttcaacttttccatcacatcaaaactttcctacatacacaaacttccaacttttctatcatatcattctaatttcaatcaaatttccaattttggcgtgaactaaacacacccttagttcgtttttcatatcttcatttatcaaattttaatataattagttctctcttccaatgcatttatcatatttcttcataaacgaccgatacaatgattacttaaaagtaaactttttttagattaataagagaagcttaaaataaacttattttggaacgggtggaataataaattcctcttttaagtaacaatatgggtttgctgcctcctcttgatagagattcctctatcttttctggaaccaattaatcttgcttggggaaaaagatgttaggaatgatgaagacgaaatagcaacgttttgcgcacgtttttaaacggatcaacaggaattccaaactggtttgccaacatgccgtccgtcaaggttcatcatcatcaaggtggaacgtcaataaagttcatgtggcaacattctttcttctcgcgagtaagctgggaggaatgttctgcccgagaatcatatcgtaacagcctaagagctgatcagctcaagtttgttttctccctgatatagttttgtgtgtaccgcgagagtttcctagcagcttcctgcacgaaatgaggggtgttatctgacccactaatcaagcacttggttgccgtcttggcctctgaatctcggggtaaaaatagtgagagataccaaaggcatctcagaaagggggagaagagacagatggacagtggagcaggggtactaaacaaaaagggtttaccgaagcctgcaagtccaacggaacatgatgcaccgtgcccctttttgtcttgcctctgctagatatggttgaggacaaaaatgtcttggtttcaacacgatggcaaattggcaatgctacgtgcactcacaagcaagggcgtgggcaacctcaacgttgcaactttgcagaggaaggttatttcaaagggagatttattttgctctttttggttgattccaaatttccaatcgactgattttatgcagcagaacagcacaacattttagttttctagaagtagtacacctccaacgcaaatcaagaataatgatataagtaactccagtacatatcaaacggcgctagtttgcacttacagtcaatcatgacatcagataaatatgtaatgcagatgaaaaaaagaaataaaaataatcaatgccgtctttgcaaaataatgcaaaggtagtaattacttaatgttgatcaacttaccataatttctctaaagttgctcaatgtttatttttaactagatagtaacttgattattgccttaacgaatactgcttgcttcttgggtggagcgttaaaaacgtaaatgcatatcgattgaccaaaacatccttttttaagagcaagtttaataatatcacccgctgttagctgaaatttctttccatgacatctgtaaccaacatacatactaatatatacaatagggtcagctctgtatttatcctccttttactgtagcaaatgatatttaattgcgctgcgccaagcatctcctctcccgcgcaaaacggacgcacttttttcttggagtacacgtatcggcgggcgactatttagtcgccggctcgtactctctctcatctgcgctcccggccaagtcatcaacagaatttacgtggcttgcttatcgctagcttttctacccctattgaacctgctctaagtagcttctgacagttatatcttctctaagaatcttcaatacttccaaatagtaagtttttttcacctagtttctaggaattcggaagctatagaactatgtctgagaaaaaaaaagaagctatataattcagaaaatggaaaaaccccctagcttttctggatttcaccaactgctttcagaatctccatctcctctaaacatggcctaaatttatctataaatagctatatactcattgcgtatactactaacatgttaacgtgacactttgctagaaaacttccgcaagtttttttcccctaaaatttcagatttgtaaccatcgaatcgtctcgagatttgtgcatgaagaaaaaaaattgctagaaagaaattttcacacttgtcacgcataggattctagcactaactaactaaatcatagttgaatgcaaatttatataagttacatcataattatagtatagttacattgcaattatgaatgtaattacgctttaattatattatagttacatctgaaagttttggactcagaaaaacttgcggcagttttttttagatactacccttatcggagacattgtacgtggtgggtcgactggtcgtgtgcccattgcataatgcaatgctactcacttgagcgcaccatgcaccaaaatagaagcaacaccctcgaaaatagctctatatatacactgcccgtgccaccctcatcatagcttcactcagccacggtctcctcctcctccttccatctgatccacctgtacgtacgcagctcagccgccggccggcgagaaggagaagaagctagccagccagccatggggaacagcctgcgctgctgcctggcctgcatgctcccctgcggcgccctcgacgtcgtccgcgtcgtgcacctcagcggccgcgtcgacgagttcaccagctgcccgctcaccgcggccgacgtcctcgccgcgcaccccaaccacgcgctcaccgccgcctggtcgccgggcggcgccggcgccggcggcgcgccctgcaggaagatcgtcatcgtgtccccggactccgagctcaagcgcggccgcatctacttcctcatcccctccgcgtgctccgcgcccgccgccgacaagatgatgacccgccggaagaagaagaagcgctgccacggcaacggcaatggcaagggcggctccgccgccgcggcgagcaccgcggagcaggacaactacctgatggagctgctgtccgagaagcgggggacgagccaccgccggcggcgcagcggcgcccgcgccggtgtgtggcggccgcagctggagagcatagcggaggagccatcagactagctaggcagctagctagtgaaccaccttttgaccattttttttccttctttttttttctcttcgtttcttctcctctcgatcttccgctgtgaatatgaacggtggatgatgaggacccttccaattttggggtctctctcgtgcgttcgatcccctgacgagctgtaaaaatcttcagggttcgaacgctgtgtgtgtgtctcggaagtcgagggaaaatttggagaaaaaaaaaagtaagatccaagatgtacaaacagaattttagatggagtgcagtgcattgatttgtttatttccaagttgctgctgtaaattgttctgctcatttttgtttgctggtattgtgactctgagcgatgaattataccaaattcaaaccatttgccatgcaaaatttacgagggtttactgttcagaaacgactttaattagtttttttttctttacttgatccaggtaacagttggcgtcggacagctggaatgcataatccgatgaagattctgcggctgagacggtgtacgttcactgcaccggattaatttgccggtcaagtcatagataccgccagtagtgtaacagagtgctccaggcgcgcgacgtgtcgacgacggcagcgccggatccgaaatcggcgaccaccttgtctcccggctgcccgaccgggtttgtgcccggccagttgtcaagaatcgcctgctcggtgttaacttgcgcaaactcactacgtcaagacgtcaacaactcagctctaactctggagatgaagcctaaccaaacagttttactttattaaaaatgggagcagaacttagtagagtgctcttcaaaataaactagaaataaattagagatgtggagctgggtttaggctgctactgaactccacttcagactgaactcctagagctaaatttaggaattggagctctaccaagcagggcataacgctaaaaagtcaaatagtaaataaaaggcgccatgtatccaagtcttaaaaacattttctacttaaaatctaaaataaggctctcctaacatatatatttttagaaataaatggtcatggtctcgtgagtggcacaagagcataatttttaatagcatgtcaagttattatcattcaaccatattttttttttactcgggacaatagtgaggatagtttggataaaaggttcatatccaaaaatgatactatgatagggcttactaattaacataataagaaaggtttgaaagtaaagaagttattttggatggttatgattgcttcaaacgtctttctctagaggcgccatcggcaaaccctcactcacctatgtgatctattaacattgacttactaagatatatcggcctagctaccacatctatggtacatagtaaacatacatgttttctcttcttactactcttcatcatcattacgcctctcttatcttcaatgtctacgccattttcttagcactagcacctcccacgccaactagcttatagctttcctgcccatatcacattcatagttgatctcccccccccctcccccagtcccccctttccctttagagcatatgggatttacatcacaagaggtgaattagaatcaatttatgaacctatgatttgatataatttagcatttccttatatttggagattggctcgtattcttcttattcttctatatccccccctcccttgcccaaattccccaccttttatcttctcccctcacacacttgtttggagctcgaagaacactaccaaatattggtttattaagattgaagaagatcctattatatgtaccaatcagttctgatactatattgagttatactatatgacaacaatttatcaaaaatttaagagtgaataaccaacatggtccttgaacttgtgcttaaggatcaatttagtccctggcatttagtattgtccaaacaagtccctaaagtttattgtgtgatttaatatagttcttggaccctctaaaaatgtcatgtgtacatgccacatcatctatgcatgcaaattcaatatttaaatgcccattctacccttacactttcataggaaataaggaaaaactattgagaaaaaacaaaaaaaaaagttttggccattggcattttcctttgttttattgcttattcttgtttttccctttgtttttcttttctttttttaataaaaaatgtaaggttaaaatggacatttaaatgttaactttactacatgcacaaatgacatggcattttaattgggcccaatgacttatattaaaccacatgataatcttcagggacttatttggacattataaaacattaaggactaattcgacctctgagcaaaagttaaaggactgaactggctattcacccaagatttaaattgacgagaaagagccaacaattcaccattcattgtacttcaacaaattaacgcctgacaattcatacatagcaaagccatagaacgaaatgttaaatctaccacaatggggacatatgaataatttaatacaatatatccaaattgtgtttacagtttacatttgcatactacaacaaatttttcatttgaaaaaaaaaagttaagcagctaaaaactgatcttaattattttctcgttctccctatacgccctctgtgcaattgcaacgcgttaaaacgaaggtcaccctgctttctgcagacatcagctgcatggcccgggcctccgaaacaaatgaaacaaagtcacaaaccttaccggagctaagctaactcactccacatacacatgtacacaacatccatggatcatgcatgctgatcaaattgacggcccgattagatgatcaaaacagcagcggctgctcaaagaacgacatgatgccgtcgtctctcggctcatccttggctctcgacgcgtagtacaccgcgtcgttcggctgctgctgctgctggct

SEQ ID NO: 25799 - DNA, 5173 bp, Oryza sativa
agagcacagatgcatgtcagcccacacgtacacgcgtcgaacacctacgtgacagatcgatatatgtttacgcacgcatgcaacgtaccttgggtttgggttgcccttgaccaccttctgcccgtacttgcgccaccggtagccgtcgtcgaggatgtcgatgtcgctcatcgtctgcacaaccaccctcggctcacgcaccgtccggttgccggccaccagcgagacgccctcgccgtcgccgccgtctctcctccacctcttggaatcaggctcgtcgtcgtcgagatcctcgccgccgccgacgctagaggcgacccgcagcgacgagctgacgccgttgaccgcctcgtcgtccccgaacgacgccgacgagttctcgggcgtcgccaccggcgtgccggagagcgcgtcggcggaggagtatgcgtcgctggcggcgccgccatgcagcgcgtagccggagccgccgcggccgcggccgttctgcggcggcttggggtggctgtgcgcgcccttgtagacgatctcggtgacctggccgtccggcgactgctccaccttcttcttggtcgggcagccagggaaggtgcacttgtagtagctgcgcgggttctcgctccccttcatctgcttctgcccgtacttgcgccagttgtagccgtcgtccgacgaccgccggctctgctgacggaagccgccggccgccgccggcgccgccacctggctgtagctgccgttcccggccacgtcacccgccgccgccgacgaggtgaattccgctggcctagtgtcagcgtccatggtcggttcttggtagctccatggctgctgctgctcgccattgtacgggtcccctccctacaatattgcaaacacaacaatatcaatgatacatgcatcttttttttggagtgcatcacatgcagggtaattattttttccaagggagttttgactaattgatctagtttagaactgtagcaagcttgactaatggtatgtgcttaggttttcatggagaacgtgaaaatgaagtttgcttttgcaaatctagcctgagtgtcccttatcattaaaaaaacatgttgattaagatatcttggccgcgagatattaatgcatttcatcatatatgtatgctttggcataaaagtcaaaagagaacctccaatccacaagaaattcgtaataatgcaaggacgtcgttgatccggataagcttatcattacttttttttagtaaaaaagtttgtgataaatcactcactaccatgcgactactggcccacatgtcagtccctgttcgtaatttcttagctctgcactaataatttaaaagttgagcttgatgttcgtcttaccaatggagccattagcatggagtcctgcatgaaggagttggacgtcgtcgcggtggctccggccatcgtcgtcgccggcgccgtggacgccgtcggcaggaacgtgaagtccgagtactgttgctgctcgtccttgacccctccttgcacctggctctccggcgctatcgccgccgtcgccgtcgccgtcgtaatccagctgaacaatgcgcccgtcgtcgtcggcgatgggaataactgaaacaaacacgatggagctcaataatcagccacacatgccggtgcaatttggcaaaggaaatgggatgctcgatcggctacggcggccgtgcttgcttacactgggcgtgaggaggatcggcgagtcgagaaacccggaggacgagacgccgccgaagtaggacgacggcgacgacggcgggagagaagacggcggcgtcatgaggttcaacgacgagccggcgccgccactgagcaggctggagaaggacgacctgctcgccgccaaggagagggagacgggcctcgagttcaccagcgggaggctccccggcgcggcggtcatcggagacggaggagaagaagaagaagaagaaagctagcgattcgatcgagcagagtaggatgccaggatcgatcgggtgtgcgtgtgggtgtggctactgcttcttccaacgacgacgcctccggtgatcattatatagacctttgaacgtttgaccgttgactggtcaaagctccctcgaggtttgactggcgggctgcgaccccgcatgctgctgtggactattcgcacccaccaatgggagagcgctgagcaggtgacgtggactatggtggggcccggtgcgggagaaggcgggtacggtttctggtcgcgggggttcggagcgtgcggagtgacggtcgcgaatcgtttgtctgactagttccgggcgtaccgtatacccgtatactattacaggcaaaaaaccaaaaaaagaaacacaatgttctcgtttcatttgattaattaaatgcaaattctgttgcggtacatctagacttcgtgggtttaactacaaaacacaacatagagtaatttttaggagaatatactctgagttatttaccaatggacattgcatacattaatttagtgtttctaggatacaagataggacctgctcttataacattggtgtgccccaaattgctccttggtattctttatggtaacaactaaacgataattgtacatctagtaaataatcatatttttagagtattttttttcttaaaatttacttcgtgtggtgtcttacatatagaaccacgaagtagcgtagcaaaatttgctataattaaattactagtggtttttttaatgaattggggacctgccttctgaagtattaaaccatgtcagatggttgggtagcttatttagtagagtatagttatttgggttttgtatcgctttttacctgtttaatttcttgcccctgtttatatttaatcagcttgactgtttctactgttgtattttgcatttcaggtgtctgctcggactgtatgtcagtgacagttgtagtcccaagacattgttctacgtggatttctttttgttgttaagtgcagcatggtgccatggtggtgaactggtgatcatcaaattagcagattgaccgcttcttagattataaattatcgaagatgagatagtactacctcaattttcaaaagggtaatgttttggacatcgacataccttccattgcatatgttttatcattactttctcaaactatatatttattataaaaatataaaaaaataactatatgcaagagtttttattgacaaaactactaatataatttccatattttaaatagtgatatttttatccattaataatttaatattttgagatttgactgtaaccattgcaggacgtcatgcatccttttgagagaacggagatagtacatttctttttttttttagagaatggtattttttacccggcctctacatctaactagatatatatggccatttaaattaggaacctagccccacaaacaatccaatttgaaattcactttctatggaggcttgaactcaggatcttggggtacatttaaattagaaatttagccccgcaaacaacccaatatgaaatctactcctatgaagatttgaactcagaaccttggggtactactcaggtcactgcaaccactatgctacagagaaatagtaaaagaagagctcaaacagtttacacataggaattgtgattctcatataggtttttatcaggggcaaaattaattcgcttaagtttatcaggttatgaaactttgcagtttgttttcgttcttcaaaaagaaattgcagattgaacttgtacagacatatttcaggtctatatatccacagagaagctaataaggttatgagcaaatcaccatatatagaagtacacttgtgtgaagtatagagacgaggtgagacttgtataacaagcaacgtgtgcatccatacgattggcgtgttgtacatgcatggtcgatctcgagtagcgtgtgtacgtgtaccttttggatgcagaagtcacttggtcacgtggagaaatggaaagtttttccttgttctatagacaggcctcctcgaatatcttacccgtgccaaacatgtgcgttcactctaatgaggattatagcgtgtatacgcactagcgcactgtttagtccatatagtccctacgaattgaaggaactactaggaggatatcatcacttttttaaaccacaaaatcttgtactacttctgttctgaaatataaatagcaacttgtattcaacttttattatttagacgtaacctcatttagatacagagccagaaactattatattttgggacggatcgatgtaataaattttattgtacatccattgataagtggtgaagagttttaaccataggtaatcattcaaccatcccatgaaataagtgaattcattaagatctcgatagttttaaattataggatgcaggttatgtgcggattatttatgccacacttctaaaagtataatatctcaaaacaaaatatccataatccatccaattgtacatttcaaacactcctaatttatgaaacctagccataatatgttatgtgtttcgaataccaataaaaagaagtaagtcgatcattcaatggtatcttatatctaaaaaatgccaaataaaacacatcccaagcagaaatatcacaggtatcgctacgacctgggccattgcaagaatatttgtcactaaatatacttataatttggacttgagaaaacgttaataaaaaattacaaagtttgatttgttttttcaaaatattatatgcactataatttctttttacgaagggagtacctcttgctggctttaagatcactctattccttgaggggcatctcaattgttctagatttacagataacatccaagatttacaggggtattttttaaataagttgtaagggtcagctgcccacaacttgtaactgagttgccccccgctggattgaagcctgaaggcgcaagcatacgtggcctaagttaactccagttactagtagtggtaatgtcctttatttctaaagatggtgctacttgctagctacagaagcaagcatttaaacagtgcatgacactagctaatttggggggaaaaacagtgcatgacaattgactggtcagcgtggaaaagtcattgcctcgtagtgcaaaagctgcgagtactggatactgctcatgta

SEQ ID NO: 25800 - DNA, 2949 bp, Oryza sativa
ttttcatatgcgcatgaatatgctcccgtttatgccagctaatgtttaaggagtggtcagaagtaagaacattctcagaaattgcctcccagatagaagcagatatttataaatatgaaattgtctattgcttcacaaagtgaacaaaggggcaaaaataaaaagaatgacatatgttttcttgttagaagggttgaaccaagaaccagtcctcagggagccttcgtctgcacgtaccgctgctcgcgataacgcatgttatatacagaagctgtgccattcattgacctagcaggttacagagatagtagagtttttagttgtatcaacgtatcacatcagatgatttcagatgatggaacggactgacggcgctgaagctgtcaaacataggttcagtaccaataatgaaaaggttgatgtcgaatcctgaagcaaaatgtccattgcgtcacggttttgtgattgatgaagtaaacaggctggtcaggggagaactgaatgatctacagatggcatgagagcatattaaaaaattcacggacatcttcttgttagccatgaatttcccagcacaaaattggatagtaaattgacaactctcgcttaccattcacttcacctcaaaaagaaatcttacagagtagtacagaactgaactgaaatgatggtctagtctatacatttcataagcaatggcagttgcatggaagctgcagatgaaaaaaaaaaggtgtatggtagttttctttacatcaaatatacaaaatagactcaggataactaatgcttcattgcatttcccggtactacaattcgggctcaccgtctctgtggagaacagatggagtaggcgccttcattgtcctgtcgcccattgtcggcgaaccccccagagggctaggtccaggtgatctccgtggagctgatggactctccataatgaagatcgatggactagcagtgctgctcctgtatggcgaacctggatttgacctaaaaagaggcaaaccatcttcgcgcgacaatggggtcattacatgctggcttctcgcagtaatctgctctgtatatgacctatcttcagcaatatcataataatcagcagttctcacctcctgggcaagggagcatgaggagcagcacaaccactggaagcaatctgtggcttctgcactgcggcagcagaagttgttcgcaggtaggttaaatctcttcctcatctgtattctccaaaagccaccatacagtaagccgaaaaagcaaagtgcgagaccggtaagccctaatgcttctcgaaggttttcattgttaatattgacagcagccaggttgaagatgaaaaacggagcaaggcaaaagagcataaatgtagcaatatggacatacatgttaccaaatccaagcctctgcatattccatccaaacacacagcaactgcagaaaattgacaggtaggcaagagatatattgtcccagaaatccattagtccaccaacccactcaggcctactctccacaaaacggcgctcttcactttgaatgaaagagtatctcttttcaagtgatgttcgtgaggttgctggcctggtgagttcagtttgtgcttcttggtcaacttcagtcagttctgtgtcataatccttcccaagaggactgataatgttatacaatccagcaaatgccgctgccccgatagcaacggaaatggtcaggccaacaccgataggaggtcgttcagatctgcggtatcctaggttgagaccacataaggcatactgagcaaagcagttcaaattaaggaggaccacaaccaccatcatgtgcatccattcattgggcttgtatgttccatttttgcaatatgtttttctaaggaccaaaacatccttttgctcccatcgacacaacagcacaaagtaatatatccgctttgggtgttgataaaggcacatgagtgtgaataatgcattcaaaatctggttgtttacttcaaaccaggcatctctttgtgatttgctaggcaatgcacgattgagcattccagtcatgacaaggaatagtattgcaccagatacagtaacacaagcaatccaagcaaaaagggccatattaagaggctcttttatccaatccttgcacattacccacagatggccccaattaattttcctgataaactggaagtgctcatgattatcatggctgtcagagtggatggaacgtgagaactcatctcgctcaagtgcaagctgtcgaaacttgaatgaaggcgaaggacccaacttcttaaacctgtcaccactggaaaagcgattacagaaattcagaaacccattccgctgcttcccttgtcgtggaacaccttgagtaggaagagtactggcacctggggctccagtatcattgtccactgttgtcgactctactagttcaacatccgctttaagatcttcattaccattggagaccattctgtcgagccagagtctcagatagtatacgcaagctaaacccctttccaatctatttctagactgatgcaatgttccacagaaaggatcgctgtactataggtttgcaaggacaagcatatgtattattgtccgccaagctctgcgccaaacagaaagagacccataattaagcaaagcgcgccatattggtatcaattttttggacggataactggaatgtaatgcgtaattttacatgctaatgtttgttgctaaattagctgccaatggagaatagccagcagaaagagcaaaatttatcatccatgcaagcattagctactgtgcacgcctcattcgtactaagattatccattgtatgtctggcgcctgaaggttgaaataccaccaaattgggcaccgaaacgtttgtaatttgagccaataaagtgaataaacccccatctatcccaacacacagccatgaccgatt

SEQ ID NO: 25801 - DNA, 8277 bp, Oryza sativa
gccttttggttttaattttttgacagtggtctcggagaatagaccagagtaattctcttttgaagacacattttccctgaccgtgatgcacacggttaatttggaccgtgtcttctccgatcattccttggctagtcttcgttgtctcaggattgctttggaccgtacattgaatcttacttaacctgcgcaacactgcagtgacatatacagacaggtaagttgatcgcttatgaggaaatccagaaaagcgacatgtgtgttcagcaatcagcacacaataatataaagttataaacatatgttgatatatgtcatttgaccacatactaaccctgttgtgatgatatctctctgtctagacagtgtatatattgtcttcagcctccagccagacatattcagtctcacagacgaagtgatggagatagaggacctagaggagagagaactcattggcgatgatgggtcatgatgaatcatgacaactttaggtgattagggagaggactgattaagtgatttgactagtgcacgcatcgtgaagaattttggccgttcgaaaataacgggatttatgacaggcaaatgggggtaatatatatgcccatatctgttgtctaaagtattattgcctcttatgatattagatttttttttcttggttacacagaacgattgaagacatgtacacactatgatcatgttcggataatgagttatgatcatgttttcgcgcagtcattgatcgatgtgagctgcatgagatccccctgcaaaacaggaagttcacttggagtaatgagcgtcgaaaggcaacccttgtcaagcttgaccgttgcttttgcaatgaggaatgggatcttgctttcccccaccatgttctccatgcctttcctacagggccatccgaccattgccctcttgtactgtccaacccgcaaggcccacatcgtccgaggaccttcaagtttgaaaacttttggacacgggtcccggggttcaaggacaaagtcaaggacatctggagccaaccttcttcgcacactgagcctatgcaccacctgaatcaaaagctgcaacgtacggcggtcggccttagagattggacaaaaggcatctgctcagaggctaaattgcaattccatatggcactcaatgtcatccaaagactcgacgtggcacaagagcacagagaactctcccccccggaaacgcgactgagggcggctctcaagcggaaagtcctaggactcgcttctatagaaagggcaaggaaaaagcaagcctccagggtaactcacatccgtgaaggagatgcgaacacgaagttcttccacctcagggttaatgcgcgaaggagaaggaatacaatccaaagattgaaaaaggacagtggttgggcggtgacgcacggtgaaaaggaattgacgatccatgatcacttcgcaagcttcatggggaggccggggccgaggccaaacgagctaaactgggagacgttggacatcacaccgattgatctagccacgctgggggaacccttcactgaggaggaggtgcatagggcaattaaggaaatgccagccgacaaagcaccgggaccagacggcttcactggggccttcttcaaagtttgctgggaaatcatcaaggatgacattctgctagtcttcagctccatctataacctgagatgtgcgcacctgaatttgctcaactcagcaaacatcgtcctaatcccaaaaaaggatggggctgaaagcgtttcggactataggccaattagtctaattcatagcatcgccaagatcttcgctaagatgctagcgctgcggttaaggccccacatgcatgagttgatctcggtcaatcaaagcgctttcataaaggggagaagtattcatgacaactacctcttcgtaagaaacatgatcagaagataccaccgcctaagacgggcaatgttgctcttcaagttggatataacaaaagccttcgactccgtgcgatgggattacctactggccttgctgcagcgcaagggcttcccgacaagatggatagactggctaggggctttactgtcgtcttcgacatcccaagtcctccttaatggctcgccagggcaacggatcaaacatggaagaggactacggcaaggggaccccctctcgccgcttctcttcatcttggcgattgatcctctacagcgtatcctttccaaggcaacagagttgggtgcaatttcaaaattacgaggaagaacaactcggctgcggatctcaatgtatgcggatgatgctgtgatcttcattaatcccacccagaacgatgttgcgacttccgcgaacatcctacatcgttttggcacagccacaggactcgtcaccaaccttcagaaatcccaggttgcggccataagatgcggcaatatagacctggaagaggtcctccaggcgttccggcgaagcgagcaaatttcccactaaaatacttgggcctcccgcttgttctcggaaggctgcgaaaaacggacttgcaaccggtcttcgacaaaatatcagggagagttgcaagttggagggggaaaaacatggcagcagccgggagaaccacgcttgtaaagtctgtgctttcagcacagccaatttatctcctcactgccttgaaggtgatgaaggaatccctggagcagcttgacaagcagagacgtcgcttcctttgggctggtacgggggatatcaccggggggaaatgcaaggtcaactgggcaaagacatgcttgccgaccagccaagggggccttggtgtcctaagcttggacaaatttacaagagctctgagattgcgatggttgtggaacgaatggagagatccaagcaagccttgggtgggtttggaaacgccttgtgatggtgtggatagggacctcttcgccgcctcaacaaagataactgtgggcgatgggaatacgacgcgcttctgggactccgcatggattaacggccgaagaccaaaagacctaatgccgttggtctatgagatctccaaaaataggaagaaatccctacggcaagggaaagaagacgactcctgggtgcatgacctgaccctcgatgcgggttcatctatcacaatcaacctcctcgatcagctagtccgcctatgggaggcggtacggaatgtgcacttagacagcgaggagccggatcagattgtttggaaattcacaagcagcggccactatacagcttcctcggcttatcatgcccaatgtttgggggcgccaaacacaaacttcaactccctaatctggaaagtttgggcgccagggaaatgtaaatttcatgcctggctcatcattcaaaatagagtctggacgtcggaccgactcgcgacaaggggctggcggaataacggacattgccccctatgtcgttgtgacaccgagacagccttgcacctcgtcgccatgtgtagatacacgaagagaatctggcgcctcgttgctacatgggcgggatatcagcagttggaaccggcccaatgggaggaagcccggtcagtccatcagtggtgggagagcctagctaatacacccggcattccaaagaagggccttcggtcccttatcctgctagtagtttgggaaatttggaaggagcgaaaccggcgaatctttgatcacaaagagatggcaacaggtgttctcctagcaaaaatcaaagaggaggccagcttgtgggctttagctggggctaaaagattgcgcgagctcatcccgcactctgtatagtgtatagtctaaagatctttttgttttacccctaggggttgtattttctccttctatattcaatgaaaaagcactactgtgctgttttttccgttcaaaaaaaaagagttatgatggattgaattagaaaatggaaatgaacgaatgggtaagatgaaatgacgtgagatgaatggatggctaggagttaaaaatatcctaaccatcaataagtgatggatgtcggcgatagttccatagcatcagtaataccatgacattcttattttctttttagagctccttcaaggttccccatagaaaataatacttcttccttcaaaattgtaacgcctatatttttacatgatttttaatagcataatttgttcaataagttattcgttattatattcctaacgaatataaaattagtatcatatgaagtatttaaaaatacaaatataatgatataacatatataatacttagcatagatatagctagtatgatcattagtcaaaagctaccaaatttatttttttttaaaaaatagaagcgtcctgtaatttgagtgagacggatggagtatgttggatttttttcttccataaaacaatcccacaaactgtctcaaaatccattggccacaagaaaaacaattcatagatacattctatacatttgatcttaaatacacccgaaaagggacaatattatcctatactgagtagaaaagttttccctaccaactttccctaaaatggtcagcctgtaagttgcctttcttggtggtacatccactaaaagtttgctggatatattaaaaccgtccatgtaaaaaaaaaaaaagctttgtccagtcacagtgatttgcagcgcatctagtaataaagtgagctgtgtattatcctttcctttttggccatatacgtatatacgtacacacaagttgagcttctcaatccaccatgggattactcaaaaagattagaaaaagaaactaatgaaacaaaatatttttcccagaggaaaaaaaaaggcaaatcatcaaatcctactccacatcactagctgtagatttttttctccacttaattaattacgtggcacctaattaatttgttaaactgctgtactagaaacttctggttctggtcccttgttatcatctcctaagttagtcgctggccgctggccggcgcatggcatcgtcgtcgacctcgccggcggcggtagcctcccggcgaagccgcgcgacctcgcgtacagcacggtgcagagcgccgtcccgacggcgcacgtggcgccccagacgaggaaggtgccccggtagcaggcggcgccggcgcagcggctggcgccgcgggcctcccgctggtagaggaacgcggcgaggtagccgaagcagagcgagccgacggggatgttggcgacgagcacgttgtggttcaccccgaagttcttcctcccgaacagctcccccgtcgccgacaccgccaccgacgtgatggcgccggtgcaggtcccgaccaccgccgtgctggtgtacaggaacatgtccctcgggtccagcagcaggaagaacgcccccgccatcggcgccatcagcgccgccatggacgccgtccttgacagcgagtagccactcctgcgcatagtcaaaacccaaaccaaaaattcatcccctgtcaggacatgcataaacaaagactccaacatttaaacaagttgtaaaaaacacgagtgatttgatttgatcggcacatgcatgcatgcatgcagcttggttgcttactttgcggtgtagtaatccaagaaggcgggaaggaggcggccgaagaatccgaaggaggacgacagggagacgagagtggacgggtcgctgagcccgcgggactcggcgatctgccccaggttgttgaggaagaccaaccccagcgtgccactgaacatgtagctcaggaagtagagccagaagtcgagccgccgcagcagccggatgccgccgacctcgtcttggccgccgctctcgccggcggcggcgtcgtcctcctccttgttctccgccgcctcggccacctcgagcaccgacacggccgtctccggcacgtcggtggcggcggcgacgtcgtgcactctgttctcccgcttcgcctcccgtagcttgtccatgctctcccgcaccttgagcgccgccgggatgagcaccgggagggcgagcaggatgtagaggctgatcatgtgctcgctggtcgagagcccgatggacttggagccgatgctgccgacgacggcgcaggctccggtggcgagggtaatcgcgaacatggcgaggaacgccgggtcggtccggcggtggctggtgagctccaccacccggagcgacggcgccgccacgagggtgacgagcatcggcacgacggcattgaggaggaggtacaccttctccttggagtacctcgccgtggcgccccggggcatcttctcggccatggtggtgtagagcttggcgctcaggccgaggtagctcgtcgcgaggctcaccgcgacgcggctgtccgacgggaagttcttgatgcagaggaggtagcacaccgtgttgatccagcagatgccgttgccggcgagggaggtgagcaggaacaggtgccagtacgcgagcccgggcctctccaagaagaggaactggacgccatacccgacaagcccgaacgacgcgccgacgacggcgacgagccacaggggcaggtacagggcggcgacgccggcgaaccagccgaagagcttcccggcgtcggaggcgaaggcgaggaagttgagctgcacctgggagatgcccttcacctccttgagctgcgacgagtacaccgggaagtcggcgttcgggccgttgatggtctggagccagacgcttccgaccaagctcagccaatgagctgaggaaggagaaggcatagctagcgtggatttttcctctctagctacctacagcctctgcctccctctcaccggcgccgctgtacttatgcgagatctcggtggcccggcgataaatgcaggggacgacggcgacggcgacggcgatggctgtggctgcctccgagcaatacgctctattatgtgtggtttcttgttggccattatggctcatggcgagcagcttatatagtgcgagctccgctatggtgttctgaccaaaggagtgtacgtgacaggcacctgacctaacagcagtggtcggtcagggttggcagcgaagaggagatgcaaactttcttgaacatctctgcaattaatctcaggaggggctcgaaactgcaattcagccgttgtcaatcggaagcagctgctgggtgctgtatctttcgtcagaaactggatcgaagagagatgccaggtttctggtacagtaacgtgcagcgtgtgctgctaacctgtagacgctcgtgcagttcatggccgagaaattcagatccgtcagagagaagcggctctgcaagccacgaggttcagacgccggcctagctgagatcgtaaaactacgattttactacgtgttggccgtcggaaatctgatcaaggaacgtgttaggctgcaaggtcgcaacgtagcttgtcatgtcacattgtcaaaacaggcctcatgtcttgaagagaccagcaagaggcggcggcaaaatcttcagtaaatgcagggcacatcataccaaggatattttttttcagtaaataccaggttaatcctcgtgcgtggcagatttttcatggtctctgaagtactgcgtctgaagatttttcagtttgtaccggacggcttaccatttgatgcttctgatgcgaaaggttggacacaatgcgagcatatatacaggttcagatttttggtgcagatttttatcagcctgcgtgtttacatacgtaggccgatcgaactcatctaattctccaatcttcgtatgcaagttctacagataaaactcagttgctgatgatctggataagagatcttttacggggcttgaaaggtaccccaggtacctccttaacgaattgttatccaccgttaatcttcaaagggtaatttaggaacacaaatttttattaacaagggtagcttagtaattgctcaaatcccacccgtcacccaatcaaccaagccgtcgcaccgttgattcaagattaaccctaatcaaccgagccagcgcgtgcgatggcggcgaccggctggcgcgacgggcttgtcggcggtgacggcgaccttctgctgcgtacgtcagctgcgaccggcgggcgctacgggcgcgtgcgtcggcggaggcgacggtgtccagctgctgctttcgtaggcgcgtatggcggcagcgagcggcgggcgtgtgaggcctcggcaagcggcggcgtttacggcagcgacaaccagcagatcatgtaggttcctctcgcacgcgagcgttctaattcttcctctcgtttttttcttcctcctgctgaaaatg

SEQ ID NO: 25802 - DNA, 5594 bp, Oryza sativa
ccacgcgtggggagacggcggcggacaaaaggccccgcgcacgccggaggaggaaggcggcgggcgcagagcggcggccacgcgtggggagacggcggcggacaaaaggccccgcgcacgcccccagatctggtaaggctcgctccacaaatcgctgaaaaaaaagcaaaaaaaggggcacggggaactcatctacgccggttggggacgacggcgaggggaaggcacaccggaggggtggtggttgcgaaagtctggatgggggcgggtgcgaaatggcgtgaggagagagatacgctatttttgcctcttctctctcctactatggcgcatccgccaattttggagtgtgggggtagcgcatctgctggagggcatttttttcacccatatacgccaataccgggatggaggattggttagagtatctgctgggcatgctcttaaccccctccaaaaccctagagcagcagcaactggtacattttgcaacttttccaaaataaaaaataaaaaatctgaattttttaaaaataatttctagattttcagaaaaatctaaattttcatatacattttctggtagattttcaaactacacatcatgcaactctcaatctatcctcccccaaagtacactgctaccatacatcatattcttttcttttctccagcgtagcttataattttgtggcctgaggggaattcttgtctttttgaaaaaaaaatcccttcgattggatctaaaatattaaaacaatgagtgtggtgtcgttcagtaaattaccattctgtaggtgtcctctagtcatcgcacgtttttggatgtccacatgtaaattaaataaacattgactatcatgtagcaacatttgcctataattatatcccatcaatttttggaaatgaactttttatgttgagcattctgtttttcttaccatgatgtctcactctcttgtgtacctctattttggtttgatcccttctaaatttgtggagtatattgttggatgtgttgcagtttgttgtatgagacagttatatttacgagtgtcattatgtgaggtattatcacgacaaaaaattttttagacgataataaagtatatttctatttattaaaaagcatatgtatcatatttttgtgacagtagcacaaaagatttgacacattttgtatatattatctaaaaatgctactatacaagacgaattgtcatgtttatcctttaaaaaatgctaaatatatttctttaaatatatgttagattttctgcatttaatactttctcacacaataaacttatgaatattatagttatgcaataaattacttacttccaacggtagatttcataaataacttaggctattcccaacccaagacactagacatagtttctataaactccacattatcaagaattatcaagaaactagtactagacactattcttccaatgcaaacaccactatttcatacttaaatttaatgctacttatctcatatgatgtcttggatgttgtgtagaaaccatgtctcatgcaagacatgtcttatgcaagacatgatttccttctctttcctcatgtattcacttgccacatcatttttcattctagttggcatattatttaatgggagcgtatcctatgtacacagaccttcgcgtgtacacaccatgtacaccaactaaaaattatcacaaaaaattctaggataattcatacatgtactttcaatagtattacatctacgtgcaaagtcgcatcttcaaattcattctacatagagaataacaaaaaagataaaattctgacaaaattacaaccttaaaactgtcagattttttgtttttttgttacggctaaaatataatgaatttgacgttaagattttaaccctaggtgtaatacaattgaaagtatgtgtatgattttttctagattttttggtgacattttttagttggtgtgcacgtgtgtacacatgagggcctgtgtgcataggatatgttgccttatttaatgctgtagacatcatcctagtcattgggttgggaatggccttacatgcccaatggtaaaactaacttttcttatacattaaatggtcaactgatgaaatgagcatggaaggaattaaattaatatttaagggacatgacactaagggagtaaataaaactcaacgccatggaagggattggctaaattgttaggggcatacaagaaattatctacaaaaaatgatcaaaataaaggggataaaaaaagtaaaatttaagtacatagaaggattaccgcgtaaggaatttttttcgataaatatgatgggtcgactgattggttaacttacctgtccttggatgagtggtctgctgatacagtgcggttcaataacataataaataagttataggtttatgaaatacaacccatgtatcaaaataaaaggttattagcattggcacccatataggcctcaacatctaaatatataagtactatttttgtatttaaatatataaaattgttgactttagtctatcttttattgtttgaaggggagactttactttgtctttgatgcgcaagtttaagcactatttttctattagaatatagtgatagtatccaacaaaattataatattgcaaacgtacttaaaacgaaaaatctataaaacctactcatattatttttatgttttcaaactaaagagagctattgatgaggggaatttcagaagtttaaccaaataagttaacataatcatatatttaatatggagggagtatgccactatatgtatacaacatcatatattgtgtcttcagtaacctataccaacagattaatgacatgtcaacagctgcatgctctagctataattaatcgatgtaatgaccacgcatgcaaaatattgctcctgtaaattaaaagggtgtaaacgagttataaaattagccggtagagaaggagccatcacatcaatgaccccaaacaatgatcaccagcctggatctcctagttattagaaacgcaccagcacaccgccatcaactaactccacctccgaacttaatactcgctccgtatattttaatgtatgacgctgttgacatttttaataaacgtttgacatttctgcttatttaaaaaatttatgaaattatcatttatttatttgtgacttgatttatcatcaaatgttctttaaacatgacataagtatttttgtatttgcataaaaaattaaataaaataaatggttagacgttggttaaaaagtcaacgacgtcataaattaaaatacggacggactacgtttttgattcaccgggtaggtaaacattattgcatttctgccatgcatggaagttcaggacggtgtgtttcgtgagccgggtgtttcctctgcccaaagtagagggccctgcaatgcaaagcaagagtcaacgcggcgcactgctcgctggggatgcggcttcctgtcccgatacctgttcccttccctgttcctggcgacgtgtcaccttcttattcgctgggttttttctggtgggtcagtacgcatgcgctcctctttcacttaaacggcgtcatcgtcccatgttatactatcacaattaaattggaaacaacgcaatttaagcgctaacaaaaatatgacgccaagcaaataaaattagtggcgggaaaaaggattagagcggtacataagtacaaatacacagttgttttattttcatctacacagattgcgtctccacactaacaagaactctcccaaatcttggcaccatgatgaactcccgattcctgaaccaatgccatcacaattgcagaatacaggaacatgcggtacgttcgcattcttggatgatacttctgcccccatcatcatcatcatcatcatcatcaaatcctgctgagtccacagatccctctgatggcctgagaagaaatcaattagaagctgtaagatccctatctattctcctttacattttgttaaattagttgcatctaaactgtaagatccggacatgtgcacgtgcatatgaacaactatattcatcgttcctttttttttttttgcaattttttgatggaaactattaccacggataaaattaggatgaaggaacaaatgaagctgctcatacaacaaaatatctggaagacttggtgccaaagattggcatgaaatttagctctgaacaagaagcttatgatttctacaatgcttatgctcttaagaaaggtttcagcattagaagaagcagctatcattacattggaaatactaaaattataaaaaacatgacattttgttgttctcgtcaaggtaaattctttgtttctttttatagttacattaactttcaattagagacattttgtttcaattagtgcactgtattaacaggaagtagaggtattgacaaaagagcagaagcttcaggctatggcgatagttttagtaagccagaaactcgatgcaaatgccaagcatgtatgaagataagtctcatagatggattctattctatctatcactttgtgcctgaacataaccataatcttgccactagaagtcaggctcatcagttaagatcacaaaggaagataaatgaagctcaagttgcaagcattgaagtcgcaaaatccatagggatttctactaaagcagctattgatttgatggcaaaacaagcttgtggatttgagaatctcgggtttactcgtgttgacataaagaataaattatactccaagaggtcactacaaaccaaacaaggtgatactgggggagtgttagaatatatggagaagaaagcatcagaagatgtcaagtttttttattctattcaggttgatgaggatgacttaattacaaacattttctgggctgactctaaaatggttgccgactatgaagattttggtgatgttgtatgctttgacacaacatatagaaagttggatgacggacgcccttttggtttgcttgtaggagtgaataatcataagaagactactatttttggtgctgctcttctatatgatgagaccgctaatagttttgtctggttatttaaaacttttctaaatgtcatgtcaggaaagaagccaaaaacaattttgacagatgaagatgcagctatggctaaagcaattaaaatagttcttccataaactcatcatcggatatgtgtatggcacatgaatcagaatgcctgcaagcaccttgctgggtgtgttaaggactataagaaatttaatgctgactttcagaactgcatatatgatcaggaagaggaagaagaatttttacgtgcatggggccaattgcttgaaaaatataagctccagcaaaatacatggttgcaacggatttttaagaaaagggagcaatgggcattagtatatggccggaacacgttttctgcggatatgagtaccacccaaagaaatgaaagcctgaataatgaattaaagggttatattagtgtgaagtatgacatgcttactttttttgagcactttgacagattgggggagataaaagatatgaagaggta

SEQ ID NO: 25803 - DNA, 3118 bp, Oryza sativa
ccaatgttaaatgcagttgcaagaagtttgaatttgctggcatcttgtgctctcatgcactgaagatacttgacgtcaacaatattaaatcagttcctcaacatatatattaaaaagatggacaattgatgcaaaagtattgcatataagtggcaacagcaatatgcatgatgaccctagaataaagatatcagatcgatactcctcattgtgtagaatgtttgttcgaatagcttctacagctgcaaaatctgaagaaacatactccatgtctactaattgtgctgaaaaattggcagaagatatagagaagttcttgagaatcagaagtgatccagatttagacaagtcgccttccccacaaggttcgtatcaaagttctatatgttaattataagtaatattatagtctgaccgatacaattctaaacatattatttccagttgggaaagaaaatcagatgcccaaaaagccaagaggcattaagctcaaggaaaagggcatccatggttcagctagacgtgttggtggcttagagaaagcatcatcgcagaggaagagaaagaagaaggatgacgatgttccggaccatgtgctagaaccacaacctgagatgcagtcacaaccacctgctacagtaatggtatatttctcacataattaatctccaaaatcgcatgctcttgttatcatccctgacctttcctctgttttttttttgttatgttagggccatctggaggttcctagcaaccaaacttttttacatgtatcacagtactatgctgctctggaagcgtcaacacaccctttatttcatactcctatctcagtgactccagaaagtcaggggctgcaccaagggaggccatttcaacaatttgacactgatttccacaatatgttcccctgacctacttgcaatattaatttcttttagtgcaacaacatttcgtatttttaatttactgaacactgcaatgaagtttacttattagtagtaatatgtgtttttggtcagattttgaataaacgatgtgcaaactatacagcaatcctcttcaggccacaagatactatctaaatcatgcatagcattcagaagttgtcaaaaattgaacagatctgaaaaacaaaggcaacaacattgggattgggatcttactgaacaaaatcaagtcacacgggctggattggatccacaggttggcgtaatacttgacgatgttagcatcgatcacatcatggaccttctcgatccaagctcatgcactttgatgcagctggacattgattaatttgcacgagctgaaccatgcatcagctccaactcagcggcaaggcgcttgatcagtggtggcgagctcgagacaatcgactgctcgggcaagcggtgctcgagctcacccgtaaagcggcggaatctggcggagttcatctaggtcaaggtggggaatttttattttgttgtagtaatagtagatcagcagcatggagagagacgatgccttctgttgggggagggaagggatcaagggattacgccgttgtgtgaaaaagaacggagacgttgacgccgtttaagtgaaagagaagcgcatgcgtactggcccaccagaaaaaactcggcaaataagaagatgacacgtcgccaggaacaggaaaggaacaagcgtatcgggacagggaagccgcatccgctcgctggaggcatgttaactgatatcctacaagtggaatgctgattgagatttgagcatatctgaatgaatatgtcccaggagaactgtaccaactaacactgcagcaccatgttggatttactcccacatttctatttcgaatgtgcaaaaaccttgcaagtcaatatattagaaaaagaaaagatgtttataactgcaatgtgctgacgtagttagggaggattaaagggaaggggaaaaaacactggattaagtaggagaaaatcgagccctaaccagcaagtggaaaagtgaaaaagacaagctagggtctataatagtggggagcacaacttatggggatagcactcacccaaaagattagtgtgtgtgtaaactaggacttaaaagttgtagctctagttagacctgtgtggtaaaagacccaatatgatctagatgacccacggttggtgggtcgaactacgcactctaataagtggtattagaacccatgtttagtattccaaaacaatttctatggatcacataggaggagctatgataacaagtttctagggtcacatgggctcagcacagattattaggcttggctcgaaacaagtgtctatagttatatgggttgatgtgataggggagcttgttaatagttttatattaaaaattatttttggggggaaggcgatattctgtattttaaaaactaatattttaggttgtgtagtcttatgacttcaaatgatgatttatgttggacctatagcaggtccaacgtaatttggggccacagttggagagccactcttcctggaggtttggatgggctgattacccgcacgtaaaatgagaaatgtgattagcacatgattaattcagtattagtttataacattttgatgaataaatttgttggattttttaagcaacttctttatataaagttttttttatgaaacacaccgtctagcagtttgaaaagcgtactaacggaaaacaagtaatagctaatccaaactactccttccgttctaaaataaatcaactcctagagtttgaaatttgtcccaaaataaaccaatttctaccttcttacctaccaccaatccacaaatcgagaaattttattacttcaatacccctcacctacctaccaatcaatacaagttttacattaattaagggtactatggtgttttgtttctttccttaatagtttcttgggatacaggtttgtttttttttgacagagagagtagctacaaagaacgcagccttaacatagtatgtgggcctcaagtgtcctctgtctttgccatatccagtgctctgcagttgtaaacaacagtataacaccgttgaaatcatgtcaccgggaccgggacgtgaatttttttgaaaattaatattattttta

SEQ ID NO: 25804 - DNA, 16104 bp, Oryza sativa
  unsure (1)..(16104): unsure at all n locations
tcgaacaatgggcgttcgacaggccgatttaaagcccggtccactcaggccaggagttcgatttgtgaccacatcgccagccaccgccgagagtcgccacatcgtcgccgtgagcgccggagggagcgaggggaggggatagcaggcctgagaggaggccgaggaggcgccgtccgggaggaaagggttggcgacgccctccagcagtgaagttaaggtatacattagtaatccctaagtacaatgcatatgaaagtttaataaaaaattggtttaagagttgttaattgtttcgcattgttcgatgttagtatgtatggttagcacatatttgttattgctaaatgttggtagaggtatttaagtaattgtacagttaaattagttcttagttagtacatattattgatatgttgtgtgttaaaataggtacaaaggtgttatattttatttggattattaaactagttgtttgttactaatagttgtaaattagtacacggcaatatagtataagttgtaatagggtaattatcgaatgattaaatgattaaacgtgagactatttgtcatgttttatcaggatgtcaggtgatatgcccattcgtctgtattatggcgatgctcctatacaaatatgtaatagcggggtggatttgactgtatatgccttccatgatactagtctgaatgcaccggagcatatgggtttgaacgacgtgttagggtggttgtataatatgtttggggtagatccagtgcacataaatttgtcataaatgccgtgtggccagtgaggggtcaacatggatggcagtggagagtagtggaggttgcgtcatttgggagttggaggaagtttgttagtaaagtaagggagaaaggctatagcctggcaatagtggtgcagaagacaacatgtgttgatcgatcgggggagtcaagtcatgccgtggtggaagaaactccgttggaaggtggacaagctgaaaatgtttggcggactgagcaaggtcgagggcaagaagtagtagagggtaatacacaagaagaggtcattgttcatggtactaatcgtgaggccaacgactcggacgatgaagaaccggattcgcctatgcgtgttgatgcagcggaggagaatgaggcggtagtggatcagatggaagtggaaaacgaggaataccttgcgcttgtagtggaaggagaagatacaacactgtgggacaacgaaactaacatacccgatgattggacgaccatatcaatgagtcgtatgaaggtaaacgatggtttagatgcccactagtgttatgatagtaagcaggtgaaagttggacagatgtttcatgacaaaggtcacttacaagatgcggtgaagaggtgggcatttgtccagaagcgtgagttcagggtgaaggtttcaaataggacgacgtatgacgtgaagtgcatacagggtggatgtccttggagagtgcatggttacaagccacaacatgacactttatgggtagcttcgagggttgagcaacatacgtgtttgttggagaatacccgtctggtgcacagaaacctgacagcggcatttgtggcacaaatggtatattcaaaggtggttagaaaaacatctttctcccctttcaccataatgcatgacgttgagaaagagtacggatatgagatatcgtacgacaaggcttggagggcaaaacagaaagcattggagatgaggtttggaacttatgaggattcttatcacaattttcacccactattggaggtgatgcaggcaagaaacccgggcacacacatggctattctcgatgaggtgaatgaatatggggagaatgttcttcgtcgggctttctggtcatttgggtgcatgatagaggcctttagaaattgcattcctttgctctgtgttgatggcactttcatgacaggcaagtacagaggaacaattctaaccgcgatcggagtcgacgcggatagccatgtcgttcctgttgcttttgcatttgttgaaagcgagaacacatcaagctggctatggtttttgtggcacattaaaatgtgtgttgttgaaaacagaccaaatgtgtgtgttctgcatgaccgacacaccggtttgctatcagcgatacagaagcttcaagaagatgtcacacagtccgttccatggccagatttacatagcagatggtgcatgcgacattttggggctaatttttatagacaattcaggagtaagagattgatggacctgttcaagaagttatgcaagcagaatcaacaaagaaagtttgatgccatatgggatcaactggatcgtttgaccactacacacatggaagaggttaggaaaaaacctataattgccagacaggaggagccggagggacttgaacccattcctaatgaagcaccaagtattactcggcgcaggaagcgtggaagggccacgaagtgcttcacggagtgggtagaatttgagccaagggagaaatggtcgttgttgtacgatacagatggatcgaggtatggtgtgatgacaacaaatcttgctgaagtgtataactgggttatgaagaatacacgacctctaccacttgttgctatcctggagggcatcacgaggggtacacagaagtatctctgtaaaaggtattccattgatagtcttcataggttagttcacatcacagttgtttaatcctacattttttaaaataaatcactgcacaacattttttctgatgtgtgaatttgttgttgtgcaggtactccagaaaggggctcgggctttcctacgagctagttattgtgaccacggttcagccgacggtacaagagtgggagcacgcagctgataacttggcacttcagacacctccagacgatgggagttattatggagcttaccttcgttggtaccgcagtgttacacgatggaggtgttttcctccacaaggagatagcaccgtcccccaccaggcagcgattactgacacgtttgcccctcacctagatcagcttacaactcaatggtacgtgtttatttgtggaatttgagcaactagttcaatatttttaaaaagttagcaagtagttcagtatgtctaataaatgtgcaattggttcaactagttccttttcttacataaatgtggaactagttcagtatttataaatgatgtgcaactggttcattatttctaacaaatgtgcatcatgttaaatactcttaataaatgtgcaactggttaaataattttaattgccttgattatttgtggaacaggcggaatttgttgagcacgttcacgtggagtccgacaccctgctgcaaagactagaggcgagacctccagtcgtcaggcctgacgacgtggcgagcatccttcgcaacttccgtgcacgtgctgccgcactactacgtcgtgtctcctgtcggagcgcggcagatgtggtgcagacgtcgggccgacggccatcaccaccactaccccgacgttccagcgtggatcggagtggtccatcctcttcacgtcgcgggtacgaagcggcccacacatctcacggtcgtccttcctttcagcacaccccagcaccggagtacaccagggggtcagccggatcaggggtacccacgtcgagcacggcaccaccacgtccgcaggtattccaaactccgccttatgttcacccctcgcagggagcatctgggtcggcacacttcccttacatgccaacgggggacaacgtgttgaacacaccagcatggggacttcatatcactccgcgtgcgccagagcagggccacacacagcacacatgtaagtcattttaaacaataacacgctttagtttctaattatatgtatcgttactaactacgccatattttttggtttctccctcttgtgcaaacagatgatgagtacggttcggcgtcgacgcatcacggaatgcctgcttactcccctcgcacagcattcattgaggacttcttttccactgatcctccccagggggaagtagcgatggattactggcacgcagcacctcaggtcacacagccgacacaggagacggaggccggtcaggggccagacgtgacaccacagcaggcagctagagataggcacccccctgataatttgacatatcccactgagcagattaggcgtaggaagaagggaggacctagcaagcgtgcgaagggcactgatcgtccttgacttatctatttgtattaaacttttagtcatttatgttctgtccgtactatttgagaaacattttacgattaacttagtactatcagtactatttcataaacttcttcggataattactcagtagcatacccttcgaatgaatcatgacaaattatcattcaaatatacaaataatgaaactaaataattcaaatattttaaccaacaaataaatactacaatttctgaccaaacattatcaaaaccctaaatcaaaaccctaaatcatatacatataacattacaaaaatattttcctttcttacacactaaaataaattacatattattaaaaaaaataacttattacaaataaatggagaacacgaccctgtcgaactgcgccagttcgacggatatcctgtcgaacaggggcagttcgacagctgcctgtcgaacgggggcagttcgacagccctgcctgtcgaacgggggcagttcgacagccctgcctgtcgaacgggggttgttcgacaggtcctgtcgaacggcagccttccgatctcctcgccagtcgcgctctggccgttcgataggcgccctatcgaactgcacccgttcgacagggacctactttcgcgattttccccggttgaccactacttttgcgattttccataaaaataatattaattctcaaaaaaattcccgggacatcggctagctgcaagggttgggaaaccgagccaaccgaagtgggtcgcctttgcccgtttcgccatggcgtcgtgtgtgttcccaaccgccggtgcatgcatggggcatatgcccttttccagttagctcgcgttactagacacacccatgagtgaacgcacgcacgcacccacgaggtgcgcgtgctgattgcgccgtggactgcacgcctgcacggaggaatctactccgtccaagtccaatctaatccgccgggaggaatcaggaatggagtacgtgatcaatagtggtctgtgctgtgccgtgcgtgcaccggtggtggtggcgcaatgcacatcaggaggagggacacgacgaccgtggttgcggcaaaggtgaattcaccgtcacccgtgtccccgtcaccgtggtgaaaaaatttcaccgtccctgtccccgttcccgtcaaccacgacgggctacaatttcttcagccccgattaccacgtggtgaatttttccccttggtgaacccggttaaacaacaaattcatcaacaaatcatataaatgcaatggaacacaaatcagcagtacaccacattgatatttttccaaaataatatactcaacaaactgctggtcatatcgacggcgacgaacggcggaggaatccatggcggcggatggcgtgctggccggaggcggagggtgccgcgaccatggtctgaggcggcgagcgcgcggcgacgacggccggaggcgccggtcggcgcgatgacgtccggacgcggcgagcgcgcatcgacgacggtcggaggcggcgagtatgtgtcgacgacggccggaggcgccggtcggcgtgacgatggcaggaggcaatgggcggcgcaacgacggccggcggcggcacgcgtgcatcgacggctgggggtaggatcgcactcgcgcgaggggagacggcggccagcggcgctatgcatggtgccgtggtggctggggagaaatttggagatggggagggttgattagggttagaagatatatacatggttactaggcttcatttttatgggccaaaataactataaagtctagaactggactctagctacattacatgcgggtcaccgcgggggacggggatggtgaatggtgcaccgtccccacccccaccatccccgatggtgatgagttttggaccattagattcaccatgggtggtagatatcaaccatccccatcctctaatatgtgaattcatcgtggggaatcggtgatcgggtccccattgccgcgattctttgggggcggtgcgagacatgccaagcccagtcgaaacgatgagaggctctcgggctctcggcacgcgacggcccagctaatagtcgtctggtcggtccggcgcgggggacacgagcacggggccgggagcctgcttttttgctcaaccgcgcgcgtgccgagtcgcgcgttgcctgccttggtgagcggcccacgcggacaatgggaggcgtcagcgtggcccgtgcacctgccgtgtgcgtgtgtgagtgtcgcggatcgccaaggagacgtgagaggcggctttgattttaggcccacgagaaggcaaatgtcttggccggactaatgagatatacaccgctacacgcgactacgccgttggttcgtagccgcacagctggttcgggtagttcgctgctcccagcctccagccagccagcgtgtcatcggccgcatcgggtccagacaaacgagcgagccatcaatctccatcgagagattcctcgcacaagtcatgcatgacatcagctaatctgtctccctttccacccccctctactcgtgtgtcagtgccagatcgccggctggcagtacattcagtaagacgcgacttgatcgcacgattggccctttccttccaaacaagagagtgtacgaagcggttttccaacacaagaagagatttcacgcatcatccggtgaagctccggttactccccagttcacgacttcaagatttccaaaagtttggtactatatctaattttgaggaaacatgatgcatgtctcgtaaagaattcatatggatcggtgcctcttcatattttggcgcacatttatcactttcaaaacttgaataattaaagattaactgatgatcaaaacttaaccctattgattgcatgtattctaaaacatcgcttatttatggtaggcgaagtataaaaacgtaacccatctaagatggccgacagatcgacggacctgctgagcaaacttaagctgagttcataagcgaggattaggaatcctccttcccaacatgtaaaatagagcagtagattaacgtatgattaatgaagtattagctaaaaaacttcaaaatggattaatatgattttttttaaaaaaacaacttttctatagattttttttcaaaatacgcaccgcttaacagcttaaaaatcatgtacacataaaacgagggatagaagttgggaaagtgtaaaaaaacacaaccttaggttgagttcgttccttatgctcccaactccactctgttgattcccgtgcgcatgctttcctaactaatactgaattaattatgggctaatatgccatttcgtttttcttgcgtgggggattagttcttagcccacaataaagaaaccttaacctatctatgggaggtcgaccatctttccttgtggtccaccacctaccccaagtagccggcttgccatcgttgttgatgcaccagatctgccacctctctttttccccgagcttgctccatctccccttgtgtcatctagtagcacgtctgtcactgtctcctcctctgtgcacctcctccttaacttgcttcgccattcgctgttgagctccctcaaatgcctcccctcggtggcgttaagcaacatggccaccaatgtaaactcccgatgtagtcatgctcactctaacacttgctagtgagctctctcagccacctccaccttgtgccgaggctttctcatacttggccaagcttcgtcaaccacccacaccacacaccacctcacatgacatagccagtggtatgggcaatggatggggtagatggataggggagatcataagagtgggtaaagaagaagggaaagagaggatggcatgtgggacccattggagaagcagtaggagtcagaaggaaatatggatatcgactttttctagccatatgaatatttggagtgccaaaaatagtcagaatgctcttagacaagaaatgatgaaatatatgcattgggggtactatgacgatgttcaaaacaataaagtactacatcagtttcgaaatgtagctttttctagcacaatagtatgtcgaaaaagaagttatttctccactcacctttcatataaaccattcacaaccattcttcatttaatttatctatttactttttcttctcaatcaatcccaaatttccccaatcatttctacctattttttttaacatatatgtccgatttaagaaaattcttatattttgggacggatttattaaaaaagaacggggtagtattttgaaaggtttatgacctagaaactctgccaaacaaacatattgttttcactgcatagaattttacaactagaatttagtattcccatgcatcggaatcactactacaaaaatcgtttttctgtacgaggaggtcggtaggttccatgcgggccgcttgtggtggcgcctgcaaaaaccaccccccgggggcgggttgatttgccgcatgcgaagatccattatcgcatgcggctgcttaagacagccgcatgcgataataggtctattttcgcatgcggccgtcttaaggggccgcatgtattagggcatgcggctccttatatggaccgcatgcgaagatctattttcgcatgcggccgtcttaagtgaccgcatgcgaagatcgatcttcgcatgcggctgcgacggccgcatgcgcaaatggtgatatttgcagaccatttcgcgcatgcgggccggccaaccgcatgtgaagatcgattccgcccgtatgcaaaaacgctttctgtagtagtgaatgctgatcagtactgaagaagaagttgagaagttccaacgcccaactgtcttgtgaagttgaataatttctgctgacattgaaatggatacgctggacggctggaggtgttcaggttcaccaacctcactctaagattcttaggtacaatagcaagctataagccagctataaacatattttaaaaaaataaaggaagagagaaaagagcagcgggctacagatctatagccagctgtagcacggactccaagacgtaatgtgtgtatgacaggtgggaccaggtattaatagtatagtaagcaactattgtatgaattagcaattacatcggctatagattatttgaagctagcagtgtgctatactattaaacttgctctaaaccaacggtagaagagccagtggcaaagcacgggacaaccggacaattaagttgttggttatcgatgcctcgcataaataatcacaatacacgtcatcacttacgtttcacgcacgaccaacttgactgtagcaagctactccttgctaggacaagcggacacatcagctcgattggatcgggagggtgactcgcaccagtttaatttgcctctggacaagccaagcacgccgtctctgatcgctatctgctaatttagtcactacagcaagcaagctagtgactgacgaaacgcagaaaaccttatcaaaattatctcccaaagctaatgtacatgcagaggtgaactgagctatcttgagcaagagatccccggccgtgcagtcgtgatctatcaacatgtaaatatttggaactgaataaaataagattcggagaggagaaatggagggagaaatgcaggagaggtagatagaagttcagtttaatttggtgacgatcatcgcgtcgccatctcgacatcgtacaagctcaatcagtgatttaagatcgtcgaaatactcgaatgcatcaaccaaccaaccaacaacaataccagctggttagtagtacttcactagtactagcattgataaatatataattaaggttcatatcagatgattaagcagcgtagtgtttcccttaaaaatgattactgaagtgagttctttaacatcgtcttcagaaggtgcttacagagaaccaacaaccttgactgcaggagacaacaccatcgccggccgtcgtagtcaggattgccccacgacgaggtgtccggggacctcaatcagtcgatccatcaatctccatgataaggcaataggataagcagccaatagacgtttccagaaaggagcaaatggcacactcagccaatgttttaagtactgaaactctcaaagcttacataaatgaaaaggcagttttttttttggtgaaaagaggataaatgaaaaggcagtactatctgacgatgaatcgatgataactccctgaactgaaaggttaactcagtgattaatttagttgtgttttcctatcagacatgaaaagatggcgacctactatgctataaagaacatcgttactacatgatacctacatgatacagcacatctctcttgcaaaggtaaacaagttgtcttttcgtcatgaacagcaatgggttgttcattcgactgatcggacttcgttgggagcagtttcttgacctgcgacacagttagccagttttgtagctagctggagcagaagttcagaacagttcattttgtttccttttttccccccttcttcttcatttgcgattaagcagagccgttcattcacgagggcccgtgaacaactttgctagtgcgttagttttgtccatactgtgtgctgtgctagggacgctaattggcagctattgaagctgaaatttactactcctaccagtaagaaaccttggatcaactgattattaccaggttgtactgatcttcttttgaaagaaaatggcaggaggttactaaccagtaagaaaacggtaggattaccaggctgtagtgatcgtgtttgttgataggattaccaggttgtagtgatcttttttttttttgtagaaagaaaatggcaggaggttactaaccagtaagaaaatggtatatgattaccaggttgtagtgatcttttttgttgataggattaccaggttgtaatgatcttttttgttgaaagaaaatggtaggagattactaaccagtaagaaaatggtaggtttacctggtttagttttttttttttgaaagaaactggcaggattaccaggtggtagtgatctatcaatatacaaggatttgagggggtgtgaatgcgtgatcatgcaacatggtacaaattgggtataatcagacatgcttttgtaaaagctcagcgagagcgattttaccgatttatcactggacttcatctctttgaacgtacctccagtaatatgtacccataaatatgtaaatgggcgttatcaaatgaaaaagaaaaatactccctccgtcccataatataaaggattttgatggacgccccataatataagtgattttactcaccaaaatcccttatattatgggacatggtgtgtagctgagagaacttgtaggtgagcctctcgacactaagaccctccacgtctcacactagcctggttgagtaggtgataagaatatggccctgtttggtgcagcttgctgcaccagctgcaactacaccaacaataccagtgtgtagaaacaatatagtcaccgtagcagctgcagctgcgcaggtacacaaaagttacaacgaatagaccctacaaaaaaactaagttttctaatttctgacttatacgcattcgttttaaaatatagaaatctagtaccggattaaatatatctttatcctgatattagatttgagacggagatagtagtttattttttaaattttataactacaaattttgagaatatgaactattttggagcagattcttcagctgctagtctcattctcacgagggatttagatttaccactcgaagtctatcatatgtggacctcatgtgagtccaggataacaaatccttaatttcattaattattcccattctgacacgcgcccaaaggagggaagggcaagctcgtcatttcaccctttcttcctccctgccaggctgccaccctgccaccccccgtctatttataggcgcggccatggcctcagtggcatcaaccacttcacacgcgcgcgccgcccgccgggaaggaagccaacgccgacgccgacatgcagcgcctcgcctcctcccggaggctcctccaggcggcgctcgcccctgtccgtgcccagtccagcctctccgccgcggggggcgccgccgcgcccgcgccggagaatgccttcgccgccgccccgaagatgccgncgttcgactacacgccgccgccgtacgacgggccgcgggcggaggagatcttccggtagcgggccgagttcctcagcccctgcctggtgcacttctacgaccgccctgtacgttacgccacgatcttttcaccgctcccatttctttggaacgatttggggggaaaacactgtagtattacagatcggattcttgattgtttataccttaaattagaaagaaatactgcaattttgtctctataacaagacgcatttttccattttacatccaaatgctgccacaaatgcatcggcgttcggcgatgttcagagatgatcaggctcgtagcttaaacaaatctccttaatttgtttgcaaaggcggttgttttctctgtttttttatgatctcttgctggtggcttattagtgtatcttgttacaagaaaaggcagcccttttgaaagtgcaacgtctttttctgtcgctattggataggtttggttggaatgccattttacctgttcttacttcttactctgagcatttcttacttcttaccgtttggagtgggcttaccgccacccgcggtttggcagttatcgcgattatcacaaggtatcccgtggttttaaaaactgaaaagattaccgtatactgtttggtaaacctcacaagatgctctgcagaatctccaagatagtcgtactactaattgtagtatggggaattgtgaatctagtacaaaaatgtagttgtcttttctctttcccataacatagatgttctgttctgcttagtaaaaacgtcagcctctatgttcttgtctgcaaatatgcatagttaagaagaaataatttttttttatcttgtgaatagtagtaggtcagtttgctcaactacgtcttgtgctagtagtctgctagatctcaaacatatgtggctgcgccaataacatatgcatatgtctctctctaaaatagcttcataactgacacctttccattttaaaattgcacatgcattgccaagtactctataaacaatgttaaagattggattcctgaaggaggatatagcaccaaccaaactgtgcacctaacattgtgtcttgctgactcctctcatcactggagatcatgcacattgctaaactcctcgtgaaccatctgaaaaatactttttgacagggacgtttatctggttgataaaattggtaggaagaaaaagaaaacaacaatagctctttgagatcaccttgaattctttagaagagggttattaaaaattttctaaaaagggaaaattctcgttctaaaacatatcaatatgtgataaagatatggtttttggagatttcaagttccaaaaactgaccatttagtatgtaacaaacatttcagttgaacatagtcgatgggaaaatgcagtacctgttcgacgaggatggccgccgttacctggatgcttttggtggcattgcaaccgtttgttgcgggcactgccatccggatgttgttgaggcgatggtcaaccaagcaaagaggatacaacactccacagttctttacctgaatcatgctattgcagattttgccgaggcattggcagccaaaatgcctggtgatctgaaggtagcttgagaaaactggactttctctatccgaatattgctaattgtttagaaatacatgaagattgttttgcctgttgaaagctttacctgaatctgttcctttcttttcaggttgttttcttcacaaattctggcacggaggcgaacgagcttgcactgatgattgcccggctttacactggttgccatgacattatttcactcaggaatggataccacgggaatgcggctggaacaatgggtgctaccgctcaatgcaactggaaatttaatgttgttcaggcaagtgttggtcctgttttcgcttacagcattaggtattgagtaaacacgcaggacttaaaactgcgacttttgttgtttcaaaaaaaaaaaaactgcgactattacatgtaaatcattgaaactaatgattattcatttataatttgttcagacgggagtgcaccatgcacttaatccagacccatatagaggtgctttcggttctgatggcgaaaagtatgcccgagatgttcaggaaatcattgattttggaactacaggaagggtcggtggtttcatttcggaagccatacaggtacatatatcaatctcaatgcattatcatacaatggccatcttatttgtcatttcgatcaacagtgatttcttatcattctgaaaacgagttctttttcctcctccagggagtgggtggaatagtggaactggcaccaggatacttgcctgctgtgtacaatatggtaaggaaagctggcggcctctgcatcgccgacgaagttcaggcgggagtcgcacgaactggaagccacttctggggatttgaatcgcacggcgtcatcccagacatagttacaatggcaaaggtgaatcttgaggatccttccataacattcagagtttcagactcaattcatccctcctttgacgaatacaatctttgggaaactcacatgttccttctcttcatcttcagggtataggcaatggcataccgatcggagcagtcgtcacaacccctgagatcgctcaggtgttaacccgcaggagctacttcaacaccttcggtggcaaccctgtcagcacagccggtggccatgctgttctcaaggttctggagaaggagaagctccaggagaacgcatttgtggttggctcctacctgaaggaacggctcaacaagctgaaagagaagcatgacagtgagtatcagtaactaagataaaatcagtaaaatcacgttgcaaccacatggatccagggtagatttgttccttacattttggcttgtatggatggattttccagtcattggtgatgttagagggaaaggcttccttcttggggttgagctggtgaccgatcgccagaagaagacaccggccaaagttgagatcggtcatgtcatgaaccacatgaaaggtactactgatcctctcagcctcttccagttttgttactgaaagatctcaccatgagtgatttctgaactttcttctttgacacagacatgggtgtgctggttgggaaaggtggtttctacgggaacgtgttcagagtaacacctccactatgcttcaccaaagaggactccggtaagacctgctactctgctgctgataaattgtcaatacatgtttcagtaatttctgatccatgactgtaacatggtttgatgaacaacgtatcttgctgcatgcagatttcttcattgaggcgatggacatttcactatcgaagctgtgagtcggagagggactggcaggatcaacctgtccgcatgtgatccgtatccataaataatgttggggattggtgagatagcacctcgttgtctcgtaatatgtcctgcaaacccaccatgcgctgctcaacacatggtccaataggcgctcctccggtctctaatcagatgtgttgtgactcgtgaccaataagcgcatgtcaatgtcagatgtattgttatagttattgtttacatgctgaacgacaaaacgaaccaatcacaatgcccaggcgatgtaaatgttgaaaaaaagttatattggcaaatgtcagtgatttcgcaatgatgttgtgcaaaagttgtttcag

SEQ ID NO: 25805 - DNA, 2695 bp, Oryza sativa
tgagaaacaaaggagttgtactgttgcatcggtttggttgcaggagatggcacttgttgccttggcggagcagcatacggcgatgaaggagctggataggtatttgtgggggcaacagaagcaacaggagggttctgcatctggtatgttgcaggctgaaaaggattggttgagttgacacttgctggcatcgcccatggtggtgctgggtagctagatccatattgttgcatgggctgagtttgatatgctcctccagcctgtgtgccctgtccagcttgggcccaaggtacaacataattgttgtatggggtgtaagcttgattcgttggatatgcctgctggttagaagagtaatgtgatccatttgatgcagcaggctgatagtttggtggtaattctggcccatttgacgtgacagactgctgcgtgccattttgggtctgtgaagaagaatctgtagatgcttcaggggggctgtacagggtgaggcttagaaggtcgatcatgtcctgctctcttgtccgagtaccactggcaggagacgagtcaacaggcaccactgcattgcttgcaacagaagatgaggcttcagaagttactgggtcaacgggtacaagggcctgatcaccagcactggatgatgcctcatcactacttatcacagatttgttttttctgcagatataaaaagcattaagactaaatttctgataatgaatgaatagattgcctgttaaaggatacttttaagtaccttcttgctatctgagcgaactcgtcatcttcatcctcttcaactggaggtgcggatggaggtgcaatcggaggtgcagatggctttatttttggatcttctctgggtatctcgtctttccttggtgtttcgaccggcaaaggagctccagaagcaatggcatcatgttttgcaagtacgctctgtaagtgatcattgatttctaggccttgcttcagtagctcctcatttctaaacaacagaaaccacaaaaacatagatattaatttctgcagtctggattatagcaccaattatatggcataaaattagcagaatgcttatgcatgtgctagtgaaaaacagcaaactttgaagtcacttcagggaaacaccaagtggtgattggaaaaaggaattatatctttgtacagtttgagagaccgagtcttcagaccttttttgacattattcataagcaggaaggaacacaaactagaaatccaacgagcttaccctgtggaactgacaaatcgcatgagcttttgttgatttgatcggcattgggtgacaagctctgaaataatttcatctttaacagcctggggtcaccaaaatgttaatagatcatttgcgtgaacttcaacaaaactagttttgtgttgagaatttcaccctaccatgcgatcagaaggattcaaagcattcaccatatcacacagaagttctgttgtatctctaatattatttaagtcccctaaactgatgacaaaagcaataaaaggttataatcataaagtaagataacaaaaaggacagctggaatgagaagagctaataagtagtagattgtaatgcaacctcagagtttcaacatcggatgtcattctctcatttagacttccagcaggatatgtaggtgaaccataagactgagtatgatgtgttgcagggggagtaaatattggaggagcatctacagggcgcctgggaaacattattcctgacctctgtaacagattttgacatcagctattatggtaaatgagatttatgtcctaagtagattataagtaaactaaaaggttgatgcataccttaagttcaatgtatgaccagtaatactgtggatatttgcctccaggtccaccaaatgcttcttgccatgagtccagaagtatcaatactttatccctcacttgagtatcatgctgcatggacattcagaaaatgaatattctcagaaaaacagcatcattctaaatatcctgacacaattatatacacctcaatcttactggttactcaattaaaattcagaaattaaagcttccataaattcttaacacagaaagaacttccactgtttgggtgaggtaacttctttttagactgtttatttagttcaaattcctaaggatttagatacaagttcccagtatccaaacaggcctagtgccaaaaaaaaaagtacttttacttttctttgctaattaaaacaacatgagagcagtaacgagagtagtggctataaccaaagcagggagattaccttcttctggacaattctaaccatttcttgcaaaatatgttgttcaacaacttcaaaatggacatattcaccacagttcttcatcattgtctccaacaactgaaaagattttgcagccaacgtcagacaagaaaaatcataatcatgaagtagtgttgatagaagaataatttgatatgctcccttaccatgtggatagtcaggagcagataaataaaacaatatatgtgtaaatgttcattcaatcgaacaaattgacgtttgtcaaaaaacatccacataccgtcaaagtgaaaaactgaactcttggatctttatgttgcaaccgcttcttcacagcttttaccacatcctttgtttgcctgattcaaagtggaaatactttagtaatcactaatcattgtcca

SEQ ID NO: 25806 - DNA, 8550 bp, Oryza sativa
  unsure (1)..(8550): unsure at all n locations
tacatctgatctcaaatcacgattccttgactggctaaaagttaactgaaacatacggacatgccaccctaagctgaggttaacatgcaaaagtcgtccggttggcgccttacacccccttctagttctcataatatgtaatcgctaccggaggcggaaaacaatccatggctacatactggaggctacttcccaaaatccatctcaatttaacctcaatcaggtagcaacagcgcgaaatcgatcgaaacattgaccagcacacgccgaaccaatcgagtcaacgctccctcctaaaaccaatttcgacgaggacagcagagccgcgacagaaatcagaaaagctaaacagacaaaattccccgttccccaccgcaaaagctcagctccaagcccccgcagcacaacaatccatccccgcacaaaccacggcggcggcggcggcgcgagctagcacggcgagaggagaggagaggggggaaggaggaggaggcgagcgagcgagcgagcgatcggtcaccagcggtcggcgttgagggtgtcgcatatctcgaggttgatggcccagtcggggccctgcagcaggtggctcgtcgccttgtccacccgcgtcgacgccggcagcctcgccgcgcggcggccccgtcaccaccgggtacatcccgctcgcctccgccgccgcagccgccgccgcctcgggttggggggttcggctcgggtgtcgtacgcgatacggagctcgagaaattcttcgatttttcgccttccttttacgaggagggcaggtggactccggaatcgcgaggagcaaagcgaggaggagacgggattggttcgttcggtttctggtgcgtttaatgcacatcggattattggcaatcaggtggatgacgggtgggcccggggcccacctggcggcgggccatgtttagccggtagggggaagaaatcgggggatggtgttgtgtggaatgttttgggtttaagcggttttggtccaaggggttatctatccattgacgacagtttagtagtcgtacttgcaagttgcaaatcctgttttctcggcttgtctcgcagaggctgattttgtcatttttggaaggaggagacgtctagattgtttcagatgatgaccaatagaaaaaatgtgttattgttgatctttttatggttttatttattacagaagaagggcatggaataatagtatacacgtttctcgagcttttaaataataatatgtatttttaataaaaactttctacatatgatttttctttatatttatttttaagcattataatatcaaattattttgtttacaccctcaaatggagtaattatttaaaaatcattataattattcaacgtaaaagaggataaccatatactcactccgtcccgtaaaaaatcaatctagtactggatgtgatacgttctaatattataaatctggacatatctctgtccaaattatagtgctagatatatgtcacatcctattttagatttgtttttttatgggacagaggaaatatgtgcttatgattgaacaaaggaattatataataccatgacattataatttttttatttaacattcttatggttaaaagggagtttagctttatgcaaatggttttcaagttttagattaaataaatatagttttgaagtttatcattaattttcagtttttccacaaagccattttttgtagcaaaatagattaatttcgtccatggaaataatccccttatatatatccctaacctccttacgtttgcacgtacctgtactgtatacgcatcattattatttattacatagtaatataaagaaagggaaacttattctggccttaatctatttgggcggcacgtaaccagacctttcgagctttccgacagcaagggccagctagaaggattcgccaagtattcatgtcccatcgccgctaatcaacgaggctttttagctttgatcatactataagtataacataaagagattaaattccacataactggaaaccaaagcgtcgtaacagttaaattaagaactacacgtatagaacgatttttgcttatcatgttgcgtgtctaggccaaaactgtgacccagcaacacaagaaaaaagaataaaaataagttattgtaggtttaaaaatttagatagaaatattaaagaaaaacaaaatgaaatgcatggtagttagtattttttaaaaaaaaatggtagtcagtagtatgattgaactcgtagcttcctaaagttttacttttgaaaaatggcgcgaagcatctgccgtcacgccttatcctttccaactgattatcaatttaactaataactactagtaaactactatcgcatatttgactaatccaataaataatcaaatcggattggcggcttgtccccgttggttgcttggtgaggagaacgaggcgcatgggagaagagaacaaaaacgttgacttgaaaatgcgagtctcgcgagtcgcgagtaagaaagcgaaatttacacgagctagatgcatgggtccacgtcatcgatccggacatgtattttccacctgtgccgtgtctcgccgccaaagctgaacgaacgatatatgaaaaatatgcatcgtgttctacttccgatcgcactttccaggtcagtcatgatcaaggacagcatctcctgggtgggaactaatctctgtagcatataaaacggaacaactcattagcacataattagttgagggcctgtttagatccttcaaaatggtaaaagttttaccattttgaaacactttttgccattttggataacactagtagcaaaagttggtaatttggtatttaccatttgctagcccagggtagcaaattgtgccaaaaagtgctccaagaccacgcgcgcatgctctctatctccaccaaaaagtgctaaaaagaaaaactttaggatgcatctaaacaccaactccataccaaatcttttaccaccaaaacttttgctatttgccattacaaatagatctaaacaggccagtattagctattcttttgaaaaataaattaatataatttttaaaataactttcgtatattttttttttgaaaaaaatgtatcttttattagtttgggaagtatacgcaaaaaaaaaaaagagttgagctggaaaagccaacgaaagaatacaaccttaataagactccactctactttaaaagataatttttacatacgatccttcaaatttctacggggagctttaaaaaaaggaaaaagtacgaattacacctctaaactattgtggtcgtccgaattacccccataaccacaaaaacggacattcttcaccccccaactatataaaccggacgaattacccccctcgatccaatccgcggtggttttggtctacgtggcgtacgcgttacagtccaatcagtattctatttataaaaaaatatgggacccacctgtcttcctctctctctcacacactttctctctcttctctctctcactctctctcacttttcctctctctcacacaggtcggcggcggcgggtgactagcctcgtcctggagcgctactgcgtgctgccgcacgcgccgcaagcgcggatgtggggtcggtggagcagagcagggagacgagccgagggaactcgccgcgcgcgtctgcgtcggcttcgacctgaacatgcctttaatattactccagctctgtttcacctgcttgcttggaagcaatccctgcaccctgcttctgcatcagatcaccgactgttcacgcagctaactgatgctgagtgctgctgctgcttgtgtcgtcctcggacaggaagcaatgcgaccttgccgccggagcagggaaaggagaaggcgtcggctccagctccaggcagagcatctcggactggagcacggcgcagtagtggccgaacgtctccggcggcacgttcaggtcgaaaccgatgccgagcgggctgcggatggcggccacgaacccattcagcgcgcgcagcggcgccggcgaggcggacgcggacgcgaccagcgcgccgacggcgcgccccatcagcaccggcccgacgagcacgtcctcgttgaaagcggaccagcgctagcacgcgccgcagcgcgcccgactacctcccccgcacccgccttcgccgcgaggtccgctcggcgcgctacgacgctggccgcgcgcggtggctcgtcgacgccgtcgacctcgccacgggacgcacggagcggtacgcggcgaggcacctcgtcgccgccgcgggcgaaaacgacgagagggtggtggccgggatggacacgttccccgggaaggtcgtccactccgccgactaccgttcagncggcgcgttcaaggggaagttcgtgctcgtcgtcggaccgtacgttgcacgcgcgccgacgacagccgcacgccgaccgcagtgcgcgctttgtgcctgagagagagagagatagagagagagagggaggaggggaggaggaggtatgaccgcctctccgccatggccgccgccgcagcctgagcgtcgtcctcatcgtcgtccaccactccttcgtcaacatcctcgtcgtcctcctcctcatcccccgccgccgcctccgcgtcacccactgccgccgccgccgccgctccgtgtcccccgccgccgccgacctgtgagtgagagagagggggaagagagacagagagtgagagagagaagagagaggaagagtgagagagaggaagacatgtgggtcctacagttttttaataaatagaatgctaattggactgccacgcgtacgccacgtagaccaaaactaccgcggattaagttaaggggggtaattcgtccggtttgcatagttgggagtgaagaatgtccagctttgtggttcaggggggtaattcgaacgaccgcgatagtttgagggtgtaattcgtactttttccttataaaaatctgcaagtaaaaaatgtatccttttctcggtaaaggtccattagtgaattttttttgatagatccatctgcaaaacaatattattttttataggcaggtctattaagagattttttttttaacattctattaagagatctgcatatgaattttcgcagcctcctgactacacatcaaacgtaaagctctcaatactcccctccctaatcttcctctcctcgctctccctctctaacataagacgagcgcttccctgtccgacgaccggtgactggagtccaccgccggaggcctccggatcgaggagcgcgtggccggcgggcgacgggtggatcttttttacccgttactccttttactgtttgagagaaaaaaaatggagtaataatcaaaatcaagcaggggcgccgagatccatccatccatgtctacccgaaatgtattaatcgcacagttgcagtgtcatcgtcgtgaaagccatagtacgtcgatcgcactgtatacggccggagcgcacgtacgtaactacagtatgtacggttttcttgtccttcttttttctactacgacaagatcgcgagctgacgcgagtgcgtgacatgtgcagtacgtgtgcgccagcagagcgctgcatcgcgcgggcagagcaagcgcatgtgttcatgtctagcatcggccggcacgcagcagagacgtacgtacgtcgttcggtacgcgtatgtactccctccggaaaaaaataactctatcaaatactccctccgtattttaatgtatgacgcggttaactttttaaccaatgtttgactattcattttattcaattttttttgtaaatatgaaaatatttatgtcatgcttaaagaacatttaataatgaagtgacaataaaagaaatgataattacataaattttttaataagacgaatggtcaaatgttgaataaaaagttaacggcgtcatacattaaaatatagaagtagtacaacgaactcaacatactttatctgtaaactcgttatgctagaattcacattctaacatgaggttggttttttttatggaggaattactctatctactcccttagctagggtcacgactcacgaatacgtgaggttaacttagaacaagatttgatctcagatttttttttaagttttggtcattggttatttcatgcgtgttgtatgtgtttcaatacaaattaatgatagaaatctaaaattgatcaaacttaccctaaacgttgaatatttattggagagtgtggtccatgagtagtggcggtggttctgccaccactccgaccaacttcctattttgttaagaggaaaataaataggtgaggctagagggccttcatgtaaaccatccccatcaactctttactttttgtgagaaggtaaaataacagtatgactaaaggattcacatgtcagtaaaaaaaatctagcaattaaaaatagtatatcgggttaatgatattcttttaattaaaattcggttgcaaacgcatggggaattaatatgctagttgtgcaaacatgtatatactccctctatcccataaaaaaacaatctatgatagaatgtgacgtttcttagtacaataaatttgaacatgcccttgtttagatttattgtactagaaaatgtcatatcccattctaagttagtttaaaatataaatctagtgatataacatgcataatacttagcatagatatcttagtatgattattagttaaataagggtgccctataatttaggacagagggagtactttatatgtatattacattttgataacattaataatagcacttatataaggtataattataattgaaatgtgtgatggtaaagtggtacacatcatttttttttcatgggaattttgctcggattcaagcgtggaattataaattttcactcacctagaattgcacattgcaaagcctaaaatgtaacatgcaattttagttcattgttacttcatttttgttgttatatatgtggttttaattttatttttatctaagctcgatttttttgcatgcaagtttataatttttatgagctacaaacttatttcatgtaattttgtagattttttgtatgtgagatatttcattgtagaagcattggagagtggtaatcaataagtagggggatggcgagagccgtagaattaccattgattcaatggttagaaaaggtgacttaaattttcaaaaacttcaagctagcgtcttattaaatctagaaactctctttaacatgtcatcacaataaacaaatggtcaacattaagtaacactggtacgcttgctaaatttagaatgaaatattttaaataccaataaatatcacctactattaactttagatcttaccactatagtgttacaaatttacaatcagtagttgaaggtatcaacgttaaaacgctcttttggtgtatatatatgcgccgtgcttttaaataccactgtcagctagtagtatataggagtatagtgtattggtgttgctcttctggtttcgcacaatcatgcatacatcttcagtgccagacacgttctttgtgcttttcaccagagaaagacgagagagcatcataagaaagatttactacttgtagttagcttacgcattattgcatgcgtacggtcaaaaggcgtgtgtccaaggaacttgtcatttctagctatctcagcaagtgcagaagctctagctcgcatatgcatttcagcgatgctactcatctggcgactgaacaagccaaaagagaaccccaatgcaaacaacttattagattaattactcacatccatctgccaggtccaaattcagaagtttgtgtacatacatgtgtcgaggacatatattgcataaagtataatttgaaaaggtgtactccaagcgttgtacacaacaatttaactagcttatatttagcttacgctttgtaattttgctttattatagtttttttgtaatgcaaaaaatttgtctgaagttaagtagagggacgatgtaagaataacacacattcatcatccttattgaccgcgctcaactaatcgaaggcaaaacaaatagtattaattaattaatttgctttcgaaaattaaagatccaaaatcctattatgtgcgtacatgtagccatgtactagttgaaggctcacagtactgcaaatgaggttctctaactctaccaaattaagatgcctgtagatatatataggtcaagagaacttgattaatcatggcatagaatcatcaatctttcgaaatagaaaacacaagggaagatcgaaacgatgagaatggcatggccatcaatccagtatagtatgaccaacatacctgcacatatctgcatgcccctgcctgtcttcttctccccaaaaaaaaaaccgtggccggaggttgcaatcttggaaaatttgcgaaacggccatgcaaagctgcagctggcagctcttgctaccttagtgatcagggactcaatcccatgcagtgctgagctagcccatgtgctcgaggtct

SEQ ID NO: 25807 - DNA, 8680 bp, Oryza sativa
cctcgccatcctcaacaatgacgacatagccggcgacatggagcaagctactagccgacggcgccgtgtcaatcaaggccggctttatacctctcctactacttactcatctcatcctcctcctcctacctgtaatcacacaaggctttgaagactaattaaggagaccggttagccgctctgctgtgcttctaggtagtagtaactactgtactgctacggctacatatatacgcactagctagccggagttatggctgtctcgtttcatcactgcaagcttaagcaatcaatcttagccaagaaggggaagaagaagaagaaggaggaagagaggccaccagcgaggcaccaacaacccggccggggtagggtccagtacagcatgcaagcaatggctgaattctactcaaaggggaccatgaattgacagccgagtgaccgagtgagtgagatatatacacatgggaggacgacgacgagtgatgctagcgtgctactggccttttagggtgtgtttagttcacgccaaaattaaaagtttggttgaaattagaacgatgtgatggaaaagttggaagtttatatgtgtaggaaagttttgttgtgatgaaaaatttagaagtttgaagaaaaaatttggaactaaataaggccttaatttgcctttcgataaaattaacagggcatcctccggtatccatacatgttgccttcggtcttgtttagataaaaaaaatttagccaaagacgccacatcaaatgtttagatacatgtaatgtttggacacatgtatagagcattaaatatggaaaaaaaactaattgcacagtttgcatgtaaattgcctaattatgccataatttgacaatttgatactacgtacattaaatatttgctaatgacggattaattagacttgataaattcgtctcgcagtttataggcgaaatctgtaatttgttttgttactagtctatatttaatacttcaaatgtgcgtccgtatttttcaaaaattttacacccaaataactaaacacacctgaaatctccctgaaccatgcagctaataagctactcctaggtactactagtagctggctatagcgctgctaccgtttgtctgacctcagaaagcgtcatggagcctgcagcgccatgtgtcgtggatgcatagggcgacgtccctcgtgggactgttcggttttgaaggattttcacgaaaattttagagagattattgaactgtttcttatcaatactcctgtaaattatattctttcgtttcgaataagccctaaagcaatgcaagcgaaagggttaaaggcagctcactgctggcactatatattgagagcttctccttttggaatccgtttggtgcacgatcgatcgagctctccatacttttgctttcgatgttccttccgaggcgagctttgagtgcgagtgtggctgtaaaggttctgtacatagtacatgcaagtccaacgttgttttgttcctgttgcaacttctgtttaagatatttgctctactagctcttaaacgggtggtcatggtttgatatcaacgttcaacatgccaggcacataattctcgggaagtcctattgcaaggtcaactgaaagttaattattagctcacggtcacatcattccatgccatggccccatatatatgcccgacaacctagccagccgatttggattatatatgctcaccgttgtgagggcctatttggttggagggaccctccactttagcctactttaatgctaaagtcccagacaggggtgactagaagagactaaaaatatgttagttcattaatccctatggaagaagcttatatagactaaaatgtttttcttccacctcttgccccgctgccatgggctctctttgcatgggctttagaggtaacatagtctttgtacagtgtaattaatgacctttagtccctacatccaaacaagtatggactaaaatttttagtcctattttagtcctagaactatccaaacaccctctgaattacctctgaattatgagcactatgccacctgctttatgtgcatatatatctttccatcttggccctgaaaatttctgagttataaaatcaccgttgtgacttgtgaattaggagtactatatgccaccagctttatgtgcacataatctgtgtatttttaatagatgacaccattaatttttaaacacatgtttaaccattcgtcttatttaaaaaatttatacaaatatatacaatataaagcatgcttaaagagttcaccgcgtactatactactcatgggaagatcggagaagtgagatagcttgtggttatatgaaactagggttcaccaaaccgttttgggtggggttatcattgccccaccatttagcggtaaccacacggttatcgtgaaaaccatgcggttaccgcgaggtatactatggttttaaaaactgagaaggttacaacatgtgaccatgataaccgcacggttttgtaaaccctacatgacacccgctcgtttgcaccggggtggcaattagttcctccattatttttttaaaaaaagatagagtgatataacttattcctaactttactttatgaaaactacaaccaattatgaacaagattgcagggcaaataattaaggtgtggttaaatcacatattaatcccgcggagaagcaccaaatgaaatggtggtggaatcatgagtgtatgactacacccaccaaaattaaaattttgatgtccatgaatattacgtacatgtaggtggactttcaacaggaatttagtgagatcaagaatgtgtcgtcgatttccgtctcttggagcatgtgttaggggacatactcgtagggtgtgagtgtgttgttgcatgtataaagatgtatgtgcgtatatatgcatgttatgtacaattgcaaaaagaaaaagcaattaatcctgcatattctcccttgcttgcaagctacacttcgatcacgtacggacgggttggttatgaatgcaccttaatttttcgtaaatgtaaaaaagattgcatgtcaatatattagaagaaaatagagttttagttacatcaagcaaaaaggtcggaaaaggtcattgtcaggagataggaaaaaataaaaggaaagaaaagactgatttataaaactgtgaaaaagaaaacactactcctatattgaaccccactatcgccgcgccgtgtttagttccaaattttctcttcaaactttcaacttttccatcacatcaaaaaaacttttctacacacataaactttcaacttttccgtcacatcgttttaatttcaaccaaactttcaattttagtgtgaactaaacacaccatatagtcctaacagacccaaaaaaatatataacatgatctcagacaatcttcctgtaggatggacggcgccttatataatttcctatcagtaatttgcaacgtgcaacaaacgtcgatgcatgtgtaacaaactgtgcggatgctcgccgccgtacataggcagcacatactacgaattgaagcaccggtattgaatactgcgtactgctgcttgcagtcttgcagagagcagagctcgattggtacgagggcgcgccattgaagcgaaagctatcgtaccggttgctttgaagcggagcaacctacgcacgtactagtacgactcgatccttacgcggatgggcatgcaagcacacacacaatatatatatgcacgaacagaaacgtacgtgcagtgcgtacaatacgcggtacaccgataaatttgttgtctccagcaaggactagtagtagcaacaaattgaatggtctggacgccgtttgattgataatcgatcgaccgaccgacagatggccggtgacaccggcccgtacgtgcgtcgacagattgatggattatggggctatatgtttgtttccttctccgaaagggattgccaatgcactggttgctcagcttccatagatgtatacgtgccacacatctctcactctcacgttcggatcgacgaacccgtgctggcttattaaccctgaccatgaaacaaagaagattgacgaagagagaaagatatttacatttacagtgcatttgtggacgagggatgttaggttccgatcttccgatagatatcgataaacagttgatttggacggagtcgcgacacaactcgatccggcttctgaatgaatacgttactaagccccgcaatcgcagcaccacgtctcctctggttatcaaccgtgccgaaacccggttgacctcgccgagaaggctaatcccaacatacgaatcgaagaacacaagcgagaataagatagattgcgattaagcactcgaattaggggttccacaaaccgatctagcggctaaactgttcttgacagattaatctaagcaaaacccgacttaaaacgatgacgtctactgaataaatataattatgggcgtctagggttgccctagggcgcacacccccttgggctaagcccacgacgcaattacaaggtacaaaacacaaatcagattcggactggataatatatgtggcttgttttgcatattccgggcagctcggtaggaattttgatgtaggaccaaaaccatatgaaagtagactccataagctttccaacaagtactcatgggccccaaaattctttctagatcagcggctaggtccgtttgaagttgatgctgtcagaaggcccgaatccgaatccaaaacgtgtaggtttatctcttgtcttctatggaccaaaagtgacgtggtgagatgaaaaaagacttggaaaaggtcttggtttgatccccaatcaaattcttcaatcatccatgcattccttacgctcggtctcttttctttcgcccaagtaagtacctctgcaagtaaaaacatacaaaacttattgtgtagtaacgtttgttcaaatatataacaagtaaatctaatatagaacatatacatctttggtttattaatacataagttagtcattgttatatccgagctagttgtgttctcatcatttgttttgttattagtctacgtttagtattttaaatgtgtatccttatacgctaatttttttttaccaaaacaactaaacacggccgaagtcaaatttgtctctccaacggcatgtgtgcccgcgtgatgcatgtgagtatgtgaccactgaccagcaacactgagtcactggcaatcctatggaggtacctcttcgtcctatcaatcctaaatactacctcgtctcaaaatagcttaatctataaatatgacttgttctaacccaacgaatttaaacatcattttatttatattcgtcgtattagaatatattatggtatatcctagcttaacttattttgggacggagagagcacaaatttgttagataggtctcttttttcttaatgagcaaacaaatgatcgtgcatactccagcgttgtcacgcccagaaattctcgaaccagaatttctaagctgaatgtgcattaaatccctgtccaggaccagccagggtacacaaacgacaattgttgacatacagatccacgtcttacaaaaatagaaaagattacaaatgcagcggaaaagataaaagcgagctaaaccgggaagcttgacttcagcagcgggcgactccactccacaggcaatccttgacggcagcgacgaaaccaactttgacaaaacagctccaactaggaagatcttcagctctggtgtgggggaaaagagagcaagactgagtactacccactgtactcagcaagtcataccggaagaggaggtatgatgcaggatataaccaaaggaggctagaggttcttttgcataaagctagcatttaaaaacagtagttgaaggcagtaaaatagttgtagtaattaatcaatattaaccaaacactgtccaacgctaccccacgttgcaacaggcccaaccaaccacctgaactacaccagttcattaagctaaactaggaatgagactaatcacggtgaatctggttgatcgcccataaccgcgggcacggctattcgaatagttttactctggccagaggtgtacaactgtacccacaagacacgattccacacatgtcgccatgccccgaagtatcaccatgatactgcaaagggggaaatcgtgacaagaccctccacataaccctcccctaatcatccacaccacgctaaggtttcacccccacccctcaaaaggcagtgggcggtcccctcttgcgccgcggtgaatccggcagctggacaaccggacaccccggccgacccaactccatcacgcccaccctcgccaccggtgcctaggaaagggtcgagctatacttcagatcaagcagttacccactcccgcttgtggaaagcacggtaagtctcccagggtttcccgtgaaccggtccttaactgccatgggtgcgaccagcaaaaccatgcacccacagcccaccattcagtgtattttaattaactaacaccattgcggtggcaccaatctaaagctatgccaatagacaaagtctatgtaataaggtgatccccatttgtgtgctagttgaactaagcatggctaagcatttcctaaaccaacatctagtcattttgatacccaagttatcaacggcatatggtaaacaatatgtggctgaggaataggacccatcccacattacattgtaaaagaatgcaacatttaatagaaatgcgggatatttgtaaattgggtacaatatgatcaaacgtatttcatgacttgccttgctctcgcactgacgagacctcagcaacgtcttcgagaaaccgtggatcgacaaaacggccgaaacctacgcgacaaacaaagcacacaagcaaaacaggctataagacaactgaaacagggaacaaaaccatttttaatggattctttgcatttttcttgatttactgagacttgaatggacttaaacggagctcggatgaattacttatgaattttagaagataaactgtgtttttactaataaagaaaagtccttaatcaatttattgcgcaataaagcccagggctgacgtcagcgaggggagggggtggcgccgacaggcgggccccactgatcagcggcactaagggggggagagggggcggctggcaagcgggccccacgggcagtggctcaagggggagggagtgggcggcgacatgctcggcacggctcaagccggccggccatggcgaggcgacgacggcgcacgaccgccggcggtgaccggcggcgcggggagacggcggcggccggcgcgaaggcggcggcggcagccgaagacgacggcgcacgcgcggagggcggcggcgctcacggggggagaggaaaggaaggaggaaaggggattcctcaccgaggcgatggcggcgaccggcgtgggaagagacgagcggcgatgaccggcgacgcggaggcacggacgggcggcggcgacaccctaggagaagatggagaggcgttaggagaggagacgacgaccacggcggcttgaattgccggccggagatggaggggagggaaaaactcaccggctcgcgaggggagaggtgctccggtgggattccggcgacgcgaggcggcggccgggaaagctcttgcggcggcgaagctaacggcggcggcggtttggcgcggcggcgactctagcggcggcggctcgcggccgaaggcggcggcaagcggcggcactagcaacaagcggcgcgagcgcgataggaggcacgggagagcgcggcgagtgcgaaaaacgagagaggaagacgcggggagcgatttataggtgcgggagggggcggacgtggccggggaggtggccgatttggccggcgacgtggggagtggagggagagtgagagaggtggattcgaaatcgaatcccgccctctcgagcgcgcgcgcgggccgggagatgcgggggaagaggcggcgacgtgggcgcgaggtgcgggtgcggagagggacggagaaggcgggcggcgtggggaggtggggcgccggcggttggggctcggctccaaccggctagaggaggaagacgaccgacaggtgggccccacctgtcggcgcccgaaggagagagggagggagggaggacttcggggaggggaaaggggaacgggccggcccacaaggggaggccgagcgcgggcgacgggtggactgggccgacggcccaagaagaggaaaaaggaggaaacaggaaaaagaaaaagaaaagaaaggattttcctgggatttaaaaattgcactttggtgatttttaattggttaaaattatttccaaggctctgaaaattccactaaaaatcctgttaatatattgtgacatgtagaatccaagaaaaattccacatgccgattctgattattatttgcatttattaattagagaattagctctaggttaattaagataatttcttcggacgatttatttagccaatttttaaagcaagcaaaaggggggaaacttcagggcgtgacaaacctaccccccttaataaattctcgaaccagaatttctaagctgaatgtgcattaaatccctgtccaggaccagccagggtacccaaacaacaatt

SEQ ID NO: 25808 - DNA, 2316 bp, Oryza sativa
cctgttaatatattgtgacatgtagaatccaagaaaaattccacatgccgattctgattattatttgcatttattaattagagaattagctctaggttaattaagataatttcttcggacgatttatttagccaatttttaaagcaagcaaaaggggggaaacttcagggcgtgacaaacctaccccccttaaacggaatctcgaccccgagattcggaagagctggcgaagaggtgcgggtgggtggccttcaactcatcttctctttcccaagtggcctcttcctctgagtggtggctccactgaaccttgcagaatcttattactttgtttctggtctttctctcgctggtttcgaggatacgagttggcttctccacatacgtcaagtcttcctggatttcgatttgatccggacttgcctgttcctcaggaactctcaaacatttcttcaactgagagacgtggaacacattatggatgccaagcatgttggagggaagctcaagctggtaagcaacttcacccctgcgttccaaaatccgatatggtcccacaaagcgtggtgccaactttcctttggtttggaagcggtgtactcccctgagcggagtgacacggagatacacataatcccctacttggaaaacgagctcccttcggcggttgtctgcatagcttttctgccgagattgcgcgattctcaatctttccctaacagctctgactttctcttctgcctcatttaaaacttctgtaccaaacaactggcgttcccctgtctgatcccagaagagcggagtacgacacctccgtccatacagtgcttcaaatggtgccatctgcagactagcttggtaactgttgttgtacgagaactcagcatacggcaagcttttgtcccatgccccaccaaagtcaagcgcacaggctctcaacatatcctctagtatttgattgactcgctcggtctggccatctgtttgtggatggtaagcggtgctgaaattcaaccgggttcccaattcttcttgtaatttctgccagaactttgaagtgaattggcttcctcgatcagacacgatcttcttaggtacaccatgtaaacacatgattcttgatagatagagttctgctaatttcttccctgagtaggtagtgtgcaccggaatgaagtgagccactttggtgagtcggtcaacgactacccaaatagaatcatgccccgatgacgtcctgggcaaaccggtgatgaaatccattccgatttcttcccacttccattctggaatctgaagtggctgtagcaaacctgctggcctttggtgttctgcctttactcgttgacagacgtcacagagtgctacgaactcagctatttcccttctcatgctgacccaccagaacttttctttgaggtcttggtacatcttagtactaccgggatgaatggaatattgagtttgatgagcctcggttagtatcaggtcttttaattccttgttttcgggtacacacaatctttctcccatccagattgttccttgttcatcctcaacaaaacctcgggcttttccaaccctcatgttctttttgagctctgctatttcaggatcacttgcctgagctatgcgaacctgctccaccagcgtgggctgtgcctctagggcagccacgaatccgtgctcaactataccaaggttcagatgttccaaatcgcgttgaacctcaccacatagttgctctacccatgcaacattgcagtagctcttcctgctcaaggcatccgcaaccacattagccttgccgggatgataatgtattcccatatcataatctttaattagctccaaccatcttcgctgtcggagattcagatcaggttgggtgaaaatgtactttagacttttgtgatctgtatatacctcacaacggttaccgatgagatagtgccgccaaatctttaaagcatgaacaactgcggctaattccagatcatgcgtcgggtagttgccttcatgaggacgcaactgccgtgaagcataagaaaccactttgccatcctgcatcaacacacatcctagcccctggcgagatgcatcacaatagacctggaaatctttcgtctgatcaggcaggattaagactggtgcagacaccaaccgtcgtttgagttcttcaaaactcctattgcattcagcagaccagataaacttttcttccttcttcaatagctgtgtcattggctttagcaatttagagaagttctcaatgaaccggcggtaatagcccgcaaggtcctaagaaactccgaa

SEQ ID NO: 25809 - DNA, 3911 bp, Oryza sativa
catcaacacacatcctagcccctggcgagatgcatcacaatagacctggaaatctttcgtctgatcaggcaggattaagactggtgcagacaccaaccgtcgtttgagttcttcaaaactcctattgcattcagcagaccagataaacttttcttccttcttcaatagctgtgtcattggcttagcaattttagagaagttctcaatgaaccggcggtaatagcccgcaagtcctaagaaactccgaacctgagtgactgtccttggtggggtccatttggtaactgactccacatttgctggatccacagctactccttgagcattcacgatgtgaccgagaaactgaacttccttaagccagaagtcgcacttgctgaacttggcatatagctggtgctcttttaacttttcaagtaccagccgaagatgctgctcatgttcttcctcggacttggagtagataagtatgtcatcgatgaaaaccacgacaaacttgtctagaaattccataaacaccttgttcatcaaattcatgaagaaggcaggtgcattagtgagtccgaaagacataactgtgcattcgaacaacccgtaccgagtgatgaatgctgtctttggaatatcctcttcgcggatcctcaactggtgatagcctgatcgcaggtctatcttagagaacacagtagctcctttcaactgatcaaacaggtcatcaatccttggcaaaggatacttgttcttgatggtgacctcattgagtgcgcggtagtcaacgcacatcctcttggttttgtctttcttctccacaaagataaccggagcaccccaaggcgacgtgctcgggcggatgtatcccttctgtaactgctcatcgacttgcttcttgacttccgccaactcgctggctcccattctgtaaggcctcttgtggatcggtgcagttccaggtaccaagtcaatccggaactcgatatccctttttggtggcattgttgtcagatcgtccggaaaaacctctggatactctctgactatgggaatatcctccagcttcttagtggttttctccactgctacctcttgttcttcaccagcagcctggtttaaactgatccctggcttccgcggcactagagactggaaggttaccacctctccttttgcattggttaacttgatggtgcggctggcgcaatcaatcactcctctgtgccttgttaaccaatccattccaagtatgacatctaggtccttggattcgagaagaatgaggttggctggaaaaatcaacccttgaatttcaactgtcacagatgggcagtagtgagttgtggtcatgccacctccaggagtatgcactcgcattggtatcttaagcttcactaaggataacccatgtgcaccagcaaaacgcttggaaatgaaggaatgggttgcaccagaatcaaacaatattactgccggtgtcgagttgacggggaatgtgcccaatataacctctggtgctgactgcgcctcctctgcagatgcatgattaacacgggcctgaacgaacttgggtccagcacgtcttggcttcgggcactttccaaccgtgtgtccgggtttgttacaattgaagcagagttcgggtttttctcccaacctcttgggctgttctggcagagctggctgaactgattgagctggaatctttagtgaactcggagtagggttgagactgtgctgctcactgttgttgtgactgccattatggtggttcttgttgaagctacccgggtggtagggacggtgctgtcggataatcatggtggaaggtccaccgtgacgtcccatcgtgaaacgaggcttctgactcttcccctggggagtcctgaactgagctgccttcctcttacggtttattttgttacagtgctcctcctgacggatagccttatccaccagcttctcaaagtcctcataatctctagagatcaactggttagtcaattcatcatcaagaccagacaaaaacttctcctgcctctcggcatcggtacgcacgtcctcaggggcgtagcgcgcgaggaggttgaactcatgcaaatactctataactgttctggttccttgttgcagggaacggaactctctcttcttttgtgccacaattccctcgggaacctgtgctttattgaaactatgacgaaactctgtccaagtaacctctgccccagctggacgggtcaccatgtagttgtcccaccaaatagaagcgggaccttgcagctggtgtgtagcaaaagcaaccttctcttgctcgttgcattgcaaaagattcagcttcttctcaatggcatgaagccagtcgtgggcctcgattgggttggtggtgcttgagaaggtgggcggcttgacacgaagaaattctagcagtttggactgaggaggtggagaaccaaactgcaggttctgctgctgcagctgtgcttgctgctgcacctgttgcaacacctgatggtactgttgctgcatctgttgcatcatcattgtcatcatctgagtctgattgtccaacacctgagcaattgttgggttctcgggcggtggggacggactgttgtcagatgcactgttggcacgtgctccattgatcggcttttcgctgccactggcgttgttcgagtcgcgtgaaccattccttgtctccatctgaaggggataggtagaaatatgagaaaaggaagaaaaacagggggctcagaaactaatctttcttatgaatttaagtgcaattatcttaatcttgattaaaacactgaaaaagaggcacgcaactcctaattgaggcagtcataccactgacacatgatatcgaccgccgactagcccacaagcatcaaacctaaacacgaaaactagcaagcaaacagactaagaaggcgataaagctaagggcggcgactctgaagctcgaggcggcgcttgcaaacgagggataggactgacatctaaagtagacaagggataggaaccaattcatgctcaaatccaaattaaacaaagcaaaagaagactcaaatcaataaccgagcaggatgatttttatgcatagaacatttttcatgaactcaaataaagacactaatgcaactaaacaataaattaatgcatagactagttgcatggaaaatgatgcgcataacattgcccccatcgaatatagacacgacctaatgcataacccccaataaattcccgactgactatcgaataaactccaactaaaatttttctaaagccctaggctgagctcatttttttttttaaaaaaaaatccgatccgaatgaacgaccaagatttttcccgcaaaccaaagaggcaaaactccaaattttcccaaaacaattccaggtgcaaaaaggcatatgcagatgaaaaaggggttcagagggctcttagggtttccagttggcttgtcctacggtcaaggtcggctctgataccaacttgtcacgcccagaaattctcgaaccagaatttctaagctgaatgtgcattaaatccctgtccaggaccagccagggtacacaaacgacaattgttgacatacagatccacgtcttacaaaaatagaaaagattacaaatgccgcggaaaagataaaagcgagctaaaccgggaagcttgacttcagcagcgggcgactccactccacaggcaaaccttgacggcagcgacgaaaccaactttgacaaaacagctcccactaggaagatcttcagctctggtgtgggggaaaagagagcaagactgagtactacccactgtactcagcaagtcatcccggaagaggaggtatgatgcaagatataacccaagggggctagagggtcttttgcataaaactagcatttaaaaacag

SEQ ID NO: 25810 - DNA, 4052 bp, Oryza sativa
gcgttgaagatttggcgtcactacctctttggtactcgtacggaggtgtacacggatcacaagagtgtgaagtatatcttcacccagccggatctgaacatgaggcagcggagatggttggaactgattaaggattacgacatgggacttcattatcacccagggaaggctaatgttgtagcagatgctctcagcaagaaaggctattgcagtgctacggaaggacgacagttgccgtgggagttatgcaaggaatttgaaagactaaacttgggaattgtcagtagaggtttcgttgcagctttaggagcaaagcccactctggttgatcaagttagagaagttcaaatcaatgatcctgatattcgagaaatcaagaagaatatgagaagaggaaaagctatcggttatttggaagatgagcaaggaaccgtatggttgggcgagagaatttgtgtcccagacaataatgagttgaaagatgcaatcctgaaagaagctcatgacactttatactccattcaccatggtagtaccaagatgtaccaagatctcaaggagaaattttggtgggcgagtatgaagcgtgagatagcagagtatgtagctgtttgtgatgtttgtcagcgagtcaaggcagaacatcagaaacccgcaggtttgctgcaacctttgaagataccagaatggaagtgggaggaaattgggatggatttcatcattgggctacccagaacgtcatcgggccatgactctacttgggtgatagtcgacagacttaccaaagtggctcatttcatccctgtgaggacaacatattccggaagccatttggcggaactgtatatggcaaggattgtgtgtttgcatggtcttcctaagaaaatagtatccgatcgaggtagccagtttacttcaaagttttggaagaagctgcaggaagagatgggttctaagctgaacttcagtaccgcatatcatctgcaaacagacggacaaactgaaagggtaaatcagattttggatgacatgttgagagcttgtgctttagacttcggtggaagttgggataagaatttgccttacgcagaattctcgtacaacaacagttatcaagctagtctttaaatggctccttatgaagcactgtatggtcggaagtgccgcactccacttttgtgggatcaaacaggagaacgtcaggtttttgggactgatattctaagggaaatagaagagaaggtaaaaatcattcaagaaagattacgcatagcccagtctcgtcataagagctatgctgatagtcaccgcagggatctaagttttgaggaaggagatcatgtgtaccttcgtgtcacgcctcttcggggagttcatcgttttcacaccaaagggaaattggcaccgcgtttcgtgggaccttataagattgtcagtagaagaggtgaggtcgcctatcagttggagttacctcaatccttggcaggtgttcataatgtgttccatgtgtcacagttgaaaaagtgtttaagggtacccactgaagaagctaatcctgagcagatagaaattcaagaggatctgacttatgttgagaaaccaatccgtatcttggagacagatgagggaagaaccaggaatcgagttatccgtttctgcaaggtccaatggagtaatcagtcggaagaagaagctacttaggaacgagaagatgaattaaagtcagcccatccgcatcttttcgccagctcttccgaatctcgaggacgagattctgtttaagtaggtttgtcacaccctaaaaatcctaaatttataaattgttgtttaaatggaattattagaaatgattttaaaagccttgaagaaaagatctaattttaaataataaattccaatataaaagtgggctaaataaaagtttattaagtacttctcttgattctatagttcctagatttttctgggatttatttgagccaagaaagtatttttaataaatggaattgcatttcatgaataatttaaaaggaaaaaggtatgaaaatcctcttttggctttgggccgaaagtcggcccaagtctctttcttctgcttcggcctgctcgcgctcggcccaagtcggcccgccaagttaagccaccctctctccctcctctctctcgctgacaggtggggcccacctgtcagggtcgtcttcctcctcccgccgcagccgcgccctagccgtgcgcaagccgccgccatcccttccaaattccgtcacccctttcccaatccgatcaaattgatagaggggaaatgatcccttcgatctcctctatcttttctcctatagaaacttcatctaatttcgtttggaaatcgtcggattcgagctcgattcggatttgtttttttctcctctaaccctaaaatttccatcgtcgccgccggctgccgtgggcctagccactgccccctagcccctataaaaggaccccaagacctcctctgtccgccgccaccttcgccttagcccgctgtcccttgtagcgccgcctccgcgtcagcccgtgcgccgccgtcgccaccgccagtccagtcgtgcgccgccgctgttccagtcgccgccgtcgctcgggaaggccgccgccgctgttccagtcaccgccggagctttgccgttgtcgtcgacccgaacgtctcccctgcttcgacctcgccgccatcgccgttggttgccgtccgtcgtcgtccgagcctttggtgagttcgccgcattgccctctacccgtaggtgtggtccgtttgtgccgccgcgccgacgttcgcccgcgagcacgaggtgccgagccgccgctggtgatgtcatcgtcgatgtcagcgccacgtcagccgtagaccgcggtagatcggttagatctcggccatccattttgattagattagatctcggccgttcgttccatagaccgtttccgtgcacccggtccaccgtgaacccgagccagcgtgggcaacgggtttaccttttgtatagtgtagttcattgtggagcaccagactatgaagtggcggagataagctgacgggggtcgctggggagtccatgccttgtttataatggggtgattattatccaggaagggtgcactgcttttaattgtgttatgcagagggtattgtcacaatctctattctggccagagtaaaactattcgaatagccatgcccacggttatgggcaggtctaacaatgtcttacgtgattagtctcacacctctgaccataataaatgatgctgaaggtgttctatagtgatgctgaaggtgtggaggattaggcgtagccctggtgaagctgcttgtgggatggagtcgcctgcgctgtttatctttttccgctgcttagatctttattgtttgagaggaactatctacctctgtaatgactttatattcgcttaataattagataaatacttgcactctattatcaatttgttattgtgtgcctcggctgattcctggacgagggtttgcacacatgtaagcgtttggagttttggatagaaattccgggcgtgacaattaaccatcatgagctaccattgaatataaccagaagtaatgatgtagtgtgattcatcccattaataagctaatgtttataggagcaacgactcgcggcctgatgctccggaagaaagcttctggattttctttgaagttttccggaaagttgtaaccagtcatgcaccaccctattttcacaacaaaagtgaaaacaaccaaggttagcctgtaaaggaaaatgattatacagagggtaaatacaaaatattagttcaggtaatctctattatgtatcttccccggcaacggcgccagaaatgcttgtcggtatttgttaacgacattactagaaatataattcctagcaatagtgcagaaatactcttggtatattatggttacagagtttatccgcaagcgcacggatataccattgtagcatttcactcgagagtattccaagggtattgttgtcgaagtgacaactgcgtac

SEQ ID NO: 25811 - DNA, 11779 bp, Oryza sativa
ccctaagctctatattctccttgcggagtttcttcacttgcacggcgagcttatggatcgagggctctgacgacttcacctcatcttctgatattggccgggaacccgtcctgagatataccagccatgggtgttcactaggacttggatcaaaggtttttgagggtgaatgggagattgaatagagaggcttttgcaaaggaggaagaaagagaggaactagctcaggagagtgatccgatcgctctacctccaaactcgcatctaaacagactcaggacgggcgggggagtctaccatccaaaaatggggccgaacgggtgcgccctggttcggccgaaccctggtgggtccggcaggcctccattttctttcctaagcctactaatttctaagctaagcacaaacatgacaattataaagggttttaagcatgcataagatgagatcatcatggttcataattgattaattcaacgacatccacttcttcatctaaagtttcatttggctaaaggaaaatttttaagcgttgaccgtttaccttgaatatattacctgaatcgttgcggagagtgattgccccgtgcgaagaggtattgatgacgttgaacggtccttcccatttactacgcaattttccgtgaccgaaaagcttaacctcggagttgaacattagcactttgtctcctggcttgaatttcttgatttttatccttttgtcatgtcagtgcttcgtcctttctttatatatctttgcgttgtggtaggccttctctctccattcttcaagttcggtgatttgcattttcctccattctcctgctccgtcaaagtcccatgttccagtttctgatggcccagtatacttgctcaagttccacgggtagtcgacatgacttcctgtagattatctgatatggggacattccaatgggtgtctcatacgctgtccggtatgcccacagtgcgtccgacaatttatccttccatcctgtttccattttgttgaccgtcttctacagaatattcttaatccgtttgtttgatgtttctgcttgaccactggtctgcggatggtaaggagtggccacattgtgtttggctcccatctctcgtaggaggtcttggaaggttttgtcaatgaagtgagaacctccgtcacttatgaccattctggggataccaaatcttgtaaagatgatttctgtgaacatcttcttggcatgcctcgcatcagcggtgttgcatggcatagcctcaacccacttggagacatagtcaactgccaccagaatgtactcgcagttgcgagacttatggaaaggtcccataaagtccataccccaaacatcgaatatctcgacattctttgcatacatctctacttaatcgtttagtgacttgcaaattgtatgtgaggggcattgcatcgcgagcagtgattcctccttgcctctggcagcttgtgcatcttctgacgaattcttttgagtcttcgtacattgttggccagaagaaaccactttgtcaaatcttggcctgagtgcggaatgcaccgtaatggccaccatagggtgaggcatggcatcgctctatgatcttaagttctcatcagttggcacacatcttcatagtaagccattggagcagacccgatataggtatggctcatcccatatatgacggcgactttcataattcagtttttgttgattttcccctggtggtatgtacttggataccatgtagtttactatgttggcataccacgggttggagtcgcgaaccatcatcagcatgtcgtctctcaagaagtcgtttatcggctgttcctgcgtgtcagtgatctgcagcctggacaaatgatctgctatggaattttctactccctttttatcttttatttctaagtcaaattcttggagcagcaaaatccatcttgtggtttagcatctttcttagtgagcaggtacttcaaggcagcatgatcagtatagattatcagcttgcctcccactaagtaagacctaaacttatcgatagcaaaaacaaccgcgagcagctctttttcggtagttgcataattcaactgagctccggttagagttttgctagcagagcagattgcatgatgatttttatccttggtttggcccaaggccgcaccaacagcgaaattgcttgcatcacacatgatcttgaagggcagagtccatccaggaggttgaatgattggagcggagacgagtgcctttttgagaatttcaaaagattttaggcacgtgtcatcgaacacaaagggcgcatccttggctagcaaattggtcagaggtctagcgattgtagaaaagtccttgatgaaccttctataaaagccggcatgtcccaagaagctgtgaattcctttgatgttcacaggaggaggaagctgatctataacatcaattttaacccgatcaacttcgattcctcgttcggacactcgatgcccaagaactattccttcatggcccatgaaatggtacttttcccaattaagtaccaggtccttctcttggcatcgttgtaagactttgtctaaatttcgtagacaatgaccgaaggtctttcaatagaccaaaaagtcgtccatgaagacttccataatgtcctctatcatgtccaagaaaatagacatcatacacatttggaaagatgcaggagtgttgcacagtccaaagtacatcctatagtatgcataggtgccatacggacatgtgaacgtagtcttactttggtcctccggatggataggaatttgatgatacccggaatacccatcaaggaaacaaaaaaaggaatgatttgccagccgttccaacatttcatcaatgaagggtagcaggaaatgatccttttttgtagccttgttaagtttcctgtaatcattgcgggattagttcattttgagcatttgcaacgaccgtcattcctcccttctttggcacgacctggactgggctaacccactcgctgtatggtacgggatagataatcccggcatgctagagtttcaagaccactttctttacaacctctcgtgttgcattattaagccatcgttgaggttccctggaaggagtactctcggggtcaataggaatacgatgggtgcaaagcacgggattaatccccctgaggtcttgaagcgagtagccatgaacagaacgatgcttttccaacatggtgagaagacgttgagtctcgttttcagagagcttgtcactgattatgacaggagcttctctgtcattgtgtaggaaagcatatcgtaggcctggaggtagaggtttatgctcaagcggaggtcgaggtgacggttccatgattggcaggtcgagagtctcaacgggatctgcttcttccttgataaaatcggggacctcatcttccagaagggcctcgggagactcgtgagtggggagctgcactaacctcctccgctgactcaatttatgggagggaatcggtcaaggcgatccttgctcgtgagaatggaactgaaaattcattccctcccagtattattttgaggctatctaatcggggtgtgttaatgagaagttgctcaatgggcagcccgattaggatgtcgaaatcttgaatttcaaagacgtggaaatccaagatcgcctccctgtcttcaaagcagacaggcacatcttgtacaatcccaaatccttcaatgatatttccgtttggatgtttgaagaatttgttagtcggggtcattgccttatcgcttaaataagcgaatgcaaaagactaggaaacgagattggcccggacagttggactgtagagaataccgacgtcgttcccttccagatggcaaggaatgattcggggagcggtatttatccgaattactttggatgaaagttctgcctcccttagccattcatcgctcattatggatgttaactcccgtacagtttctcgtaggaacccgagttccataggattaggaggtggcaaaggaacgggtggtttcctctttctaaaatagttcagggtattgccgtagtcttcgtcaaagccgtccctgaacagaattgcggcataatccggagtctgaatttcttcattctcgacagtcggctgcttaggaaccttctcatcaatcgagctagcagaagtggatggttcagtgagtggctcgatcgttagaggttcctctatcttggacatggatgcctctggctagggttcattggattgcgccatgaaggaagtattttctagaatgcgatccaaaattgtccttccttctgacggcgttttgtgcatgaacgatcctcaagcggttatgtccagatagaatgcagactccttatccaaacccgtatggaaatgttggagtagcacatactcgggtaaggacagggttggtccggactacactaaattagtgaatttggaccaggctgcaccgattgattcatttttgatctgcttaaaactgagaatttctactcgaatggcagtaatacgagtaactggaaagaaggcaagacaaaatctgtctcgcaacttctcccagctaccgcctacacatccaacggtagaggtgtaccattgctttgctctctcttgaagagagaacgggaacaatttccaccgcacagtttcttgtctcatgccacgaatcttaaggcatgagcaaacttgttaaaagtatcgcagatgatggtagagattttctagatcaaagccaaaaaaaggtttttccctaaccatactaattagttcgggacgaatttcatagccagttgtataaatgggctctgatgaaggaggtggttcatagaattcgccccgaggagcagacagctcaaaaagcagttgctccatggtcgagaagagtttgacaggaatacttctctaggatagcaggggtgaaggtaaaaaaaaagtaaaaaggatgcgaggatgaacagggttcggaaatgatcagcaaccattccccggcaacggtgccagaaatgcttgttggtatttcttatggtcactgataaaatctgtaagtgcacggatataccgatgtagcacttcccctacggagtattccaagggtatcgaatccaagggaacgtgtgtgatcagatcttcctccggttcatccaaggacaccaagcaaatgataggctaggatagagaggattttctagtgagaaacaatgtctagggaaagcttaactttaatcctaatgcaatacttcaggcactggcaacccgctgttcccaaatgtcgctctactacgtacccggacagggaggacttaagtgatctcgagggctgtcaccacctctacacccacctcaaacgtactgtgagatacgcagcaattactggataacaactacctaaacaccatgtctaagcaattaatatctaccttagtgtttataactcaccaaagcaatcaatatattctagttgattatagtgaacaataatcccgtatgctacttaggaactaaccaagagataattctcacaagataaatccaaattactcaagaagaatattatattgacttcagagtaataaataaaataaaagaaataggagaatattaccgacaactccggacttcttccgactccttctactctactctcttcctattctagtatacaatatagtacaatagagcctcttataattcatctcaagcttgggagtgtgtgttgaagtgagtgagctgatgtccttatataggggtaggtacgattggcgaaggggaaatgtccgaagtgcaatccaaccgtcattagggatgcatctgggacgtccacgccaaaccccacatccaacagtggaggtggtggttcggccgaacctgggctgggccctcctggcctggccatcagctcatgttccccccggtcctcctctattcattcttcggtattttgggccgatttactgatgttttgatgaagttcacaacccatccttgcaggggtacacatttctcctcactttagtctgattttcctcccatcatcgaggtttatcatttgcaaacaaatatataccaacacatatggaatatgtgagattatgtacctatcactatgttggatgttttattatctgaactttatgcagatgttggcggtatagaattgacatttaacagccgccaacagttttctaagacctttcattagcagctcgctttttgcctaaagcatcagtggttttagcttgcgcaaagacgagatctttcaaggagggttggttacagaaattactgttattgttacctccttgatagaataggcgtggctggttccaccactgacctcattgtggatgatactcgttgttgttgttgcccatgtacatcgcctcttcacgggtttctaggcaatcaatcccagagtggcctgtgctgccacagactgttggtatttcttacgatcacggatagaatccgcaagcgcacggatataccgatgtagcacttcccctacgaagtattccaagggtatcgaatccaagggaacgtgtgtgtttatctcctcgtcaggttcatccgaggacacaaagctaatatgggcagagggtagagaggatttcctaatgagaaacagtgtctagggaaagcttaactttaatcctaacacaatacttcaggcactggcaactcgctgttcccagatgtcgctctactatgtacctggatagggggcactgaagtgctcttgagggctgtcaccacctctacacccacctcaaacgtaccgtgggatacgcagcaaccctggagagtaattacccagacaccgcgtccttcaaacactaaagcaatcactacaaataaatggactatagggaacaatgatcccgtatgctaattaggaactaaccaagaagtaattctcactaagaaaatcttaattactcataatgatatttctattaaagcagagtaataaacaagatacaaaagtaagaggagattaccgacaactccgggattcctccgattccttctagcttactctctccctattctaatatacaataaagtgcactagagcctcttgtaattcatctcatgctttggtgtgtgtgaatgagggagaggagaggggtatttataggtggagagttgcttagagagagtggagatgctccaagcatcatatgagcatattccttctagcttcatctcctcttgacaagtgtcctctctatgacagtttccaccggtagaaacggccacaaccatcattgggatgaggagtacaaccgtcataccgaatatgggctggactgggccagctaggggttcggccgaaccctggttggctcccctggcccacatctttcttcaggatgctgacatgtgggctccacttcatgatgctccatgttttggctccaaatgattgcacattttatatgttgtagctcaaaaccatgtgagtccatcagcacggaatatatttccattctttatcctcatcctctcccaacgttggtggttgatcacctgcatacaaatatacaccaacactcgtggaaattgttataaataaatcctaccactatgttggatgtttcacatttatggttttctgcaagtattgacggtgttattttggcacttaacaaccgtcaacaaaactctccacacttagctcattactcgtcccgagtaaaggttaaggattaatgtggaataaaatttcccaagatacaatacaagtacacaaattattctaagtcatacctgtacctatgaacctttgccctatctaacttaccatcttgggaaattgatgaatggaacggtcatgattcaagtccttctttttcctcctatcaatctgttagggttttcatttattttcgcaaagtagctttactcctcaaatgaccttctctcagatcactcatgtggtttgatttgtggatcctcaccatgcatgtttgccgaattgtccctattctactaggttgtataggtggagctcggtagggatcaatcggggcatacctgcatcacatatatagcaaagccaagataccggacccaaggagatagcaagtcatactctctgatcaagaatgtgcatgtgtgtgatctgtgtatgggtatggagaattgtgtggatggaaaaaggaaaatagaagataacaactcctttgatatatctcctcctccaattttctctctttggaaatttgagagagtgcatggctatctttttttcttcccttttttttcatcatgccccatactttgtatgagcagatttttttattcatttttttctcttttgtttatcaatgctccatacttgtatgagcaagactttttttccttcttttgcatagccatgcctctctctatctctgtttttttttctttgaaagaattttggagaaaaaggcataaatgacatggagtatttattttgtggataatgggtaaaataaatgatggatgagggatgctaccttccagtgtagaagtttagcatagtgtgtgtatatggagtgtacgtgatcttgatcatgaaagtatgaaaagcatctcacacgggtcacaataatttgacaaagctcaatgtaatgcaagcagcctaaacatatatcaggattttgcaatgagaatcatatatggcctttgtaggtaataatatagtcagtgaggagtattgctctaaaagaattttttaattttcgcaaagacaaaatcccaagtatcatgacagttggacaagaatttcttttgtcataaccatatcacatatatcaattacttatattagcaaggttccctataatggatgtttgttcacaagtgacaagtgttggcaaagaataaaaagtatacatgattaatcataggaaaattgtattcagtttctttttatttgttgagagttaatgctttcaattttcatttggacttaaactaaattgtattcaaattttctgccaaagtttaactcacaaacaagggaggataaggaaggagacgcgcaaacctgaccacacggcgaacgatgacagaactgagccaggcatgggtcaaatgaacacttggttcgaccaacccaaccaagacttggttctgactgctaagttttgtgcgcggccgtgggcgggtgttcaacatattgtcatgttgagtcgatgctgttgcacgtcaggagttccgaaaagactcccccacacttgttttgtaccttgtctttattcaacaaaatgatggaaagcaaaatgggcttccaccggggtaaaataccggtgagccaaattttattcaagtaattctaggcgcatgaagtgcctaaaattacttttattttatttcacttttattttgtttttatttatatttatattttatatttttttatcattttttatggcagcaatagaggtgatgggtaacctagcagggtggacatatgtgacgcaatgatacacagggtgtttcgaattcttactagataggacttaccaagctttgattcggatgcaagaatgcaacacaactttgcatttgctctgcctggttccctgagcatctgtcttctcatagtccaaggagcgtggtatgaatgttgagattattatacacttccccttagttgtctttttatttcctgcagaaggtcagtggacaacaaataccggagggaccacaaaaagttgaaaagattttatcatagcctcaagattagttgttcacattcatgctaaaaaggaattggattgaaaacttaatgagcatggatcccataaatttgccataattttatttttgtcattatttttactttttactcgagagaaaaatgtttttttttccgagagacatttcttttattcttgaaaacaatttttatcaaacttttatttaagaaaaactcatatagggctgagataaagttacataacatagcaaaggagcatttgacaataggtcacggcagctaaggcgggagtagaccttgcaaagcagggcgaaccgggcttccatggcgccatcgacggtgaccttgggcttcttgttcggcgcgatcgccctgcgccgccatcggagagctttcgccgactcagacccggcctcgaaggggatggagtggtaaaaccacttcgacatccagtggcgagccaacttgaacatggcggcgttgaccggccaaagatcagagtgctcggggcgaacattgaagttcacgctcccgaacgctgtcttcttcgtccctgcgggagtgaccaccgtcttcgagtttacgttgcgtaaaaaatggtgccgtaaaaaatggttcgaacccagcggtccggcacgcccagtcgaagatggcgattcggacgagagccgatgggcttagttgagggagctccacctaaaaaaggcgaaggatctccgaaaacaacacgttgcacggaaaccgaaggccgtctcgaagaacacggcgaagaccaccgtccggctatcgccgggcttcggcacaacagcctttcctgggggaggcctgcttctccgccagcacgccggaggtgaccagctttgccaactcatcctcgtccacaagcgaagccccgagataggcggtggtgtcgtcatcaatcctgccgggatcagggcccgtcacggaagctgggttcggcttgcgaggagccatggtgaaaagtgtgggccgtgacgaaaagaggaacagtcgaaaggtactagtgactcaagaggaccgtgaagtgagagggcggaaaagagagagctcgcggtgaaaatgacgggggtgcggcggtgaaaagggggggatatataacccacccaagcgtcaattcgccttcccacccaatcgtaagccgccatgtgtcacgagggtaggcaaaatggtaaattcccattcattgagctacacagtgctaagcccatgaagggaagcctgtcactgtttattgcggcccacggaaaaaaataaggacggcttcgccgtttgcaaaaggcgaaagctaggaaaatttactaaccgtaaaaatacatatgcacaaagtgtacacatttcctgtaggactgtattataggtttcggcaggagcgtcggtcgaaagggggcgcctcataccataccacatggtttgcacggtctcggccgaagctcctaactcacccttgcccgtgaggggcttgttggcagtatgtcatgagacccttcgaccagacctgccgaaaccgtgcaaccagcgaggactatgaagcaaagatggcgaaggccgaagagtcgtgctggtatccggcaagaccaaatgcgtcttgggcgaagggtgtatgccgaaggatggagacttcgcaataacaagcccaactttgaggaggctcaaggggccatcccggccgctcaggcctgttcgccaatcggcccattagaggcccatgtatccaaattacactgtatacccaagcaaacgtccctttcataagggcaaccatgtaaattcccctgtaaagcctaaaccctaaaggggtgaacctgtaataggattataaatagtctctagggacatgtcaagggggatcccaaagaaaaatcttaaattaatacatttactgtttccaacactgtcggtgacatggggccgggggtatcgtgactagaggcttgggtagccgcggtcaccctcgtggcctgaccccctcgggggggtcgggctcgaaggtgacgtggccacccctccctctgtctccccgagggg

SEQ ID NO: 25812 - DNA, 2018 bp, Oryza sativa
aaaaaaggaggcccaggcctaaggagaggggaagagaaaaagaaaagaagaagaagaaaaaaggagaagaggagggcctgaaactctccctggctctccggctctcggtattcctcactcacagatccaccaaaacacaggagtagggtattacgcttctcagcggcccaaacctgtctacgtcgcctgtgtcttgtgcactttctcgctcgctgacgttcctcagatcgagggcgaagaatctcacttagcgcccccggccgaaccggcaaaggggggcctgcgcggtctcccggtgaggagccccacgctccgtcaaacactgttgagtaaccacgtccttcgacgtacgcagttatcgcttcgacaacactccattaaggaaagaaataaaaaagaagaaataaaaacaaaaatacgaggatgacctagactcgaataaattagcaacagttccctagcaacgacgccagaaatgcttgttggaatttcttacaaccatagataaatccgaagcgcacggaataccactgtagcactttacattcggtgtcatgccctgaagtttccccgttcttctttctttaaaagttggttgaataaatcgtccgaagaaattgttctaattaacctagagttgaatccctaattaataaatgcaattaatagtcagaaatagcgtggtggaatttttcttgagttccccatgtcctaatgtattaacaagatttttagtggaattttcacagccctataaataattttaaccaattaaaattcattaaccgctgtcacaacctgaattttcgtattaggatttataaattatttaataaattattaatagaatttatattaaatgttcattaatttacaagtgaagttaaatgtgggaaataaaatttcctaaatataaagcatggctggatttattttttattaaattctccatgattaattatactctctggaattttctcgaatttttcagagctcaagtattaattttaataatacaaagaatatttcagtaattatttaattaataaattaatcattaaatggtctggtttcaatattattaaatacttagagtgtccaagtatgttcaagatttttcttttaattatttgagcattggaagtatttttaacaattgaaagatcatctcattggttaatttatttggaaaagtaataagaattttcccctcagcttgggccgaattcagctcattctctcccttcctctcagacgcagaaaagtctgtttttcgtccctctcgctacagtgctccttcttctacctctggacagcgcccgagctctccagcctgtgcacagctgccgccgatatccttccaaatccgacctccccgttgctcctctttccaaattagttgcgggaatgggatcctctcaatctcctcttccttttccccaagaaatcactaaaagtttctatggaaatcttttccaatttcgcggttcaatctttccttactccggcgagaaccctagactttcccgacttttcccgtcgatttgggcccggacccgagctcccgtgcctatataaaggacccactagtcgtcctatacctatcctctcaagtcccttcttccgccgccgccggaatcgctctccccacgctctccttctctctccaagcgccggcgccgctccagccgcaccgttcgtcgtcgtctgtcgtcgctttcggtcgccgctgccgccgttggattcgcaagaaggagaggaagaccggcctccacttccccgaagacgaagacctctggaagtacctcgccgacaagaatccaagcttcgccgcctccggccgccgctgcagcagccgtgcgccgtctcctaggccgtcgccctcctgcgccgacacctccatcggctccgcaaggtcgagctctaccccgtctaccggttcccctccgccaagtctcgctggaagtcgctgtcaccgtgaaggccgagtttgccgcctcggattgatctccggccga

SEQ ID NO: 25813 - DNA, 2260 bp, Oryza sativa
ttaaagtctctatttatttcaactgtgcatttattttcgaatgtcaccgggtggtgtgaacttattcctttgttatggtcaatttgcattgattaccctatttcttgattaccttgggttattataatttgactagttgagctttatatattggttcagctagatgttagacataattgcttagccattcttagaaacattagtacacgattgggataactaatgttttactattacttaatgatggatatttaatgattagctcacgatggtcaatcgtgattggttaattaattaatatgctaactaaaacttgataatggtgggttgtgagcacatggttttgatggtcatgcacatgacaattaaggaccggttcacaagtttcagttgtgaaacattaaccgtgccaaccacaagccagcatgggcaacggctttatcttttgtatagcatggttcattgcggagcaccagactgagaagtggcggagataagcccacgggggtcgctggggagtccatgccttgtttataagggggtgattatgatccaggaacggtgcaatgctttgagttgtgttgtgcgaagggtactgtcacgatttccccctttgcagtgacgtggtggtacttcagggcatggtaacatgtgtggaatcgtgtcttgtgggtacagtggtacacctctggccagagtaaaactattcgaatagccgtgcccacggttatgggcgggtctaacaatgtctttcatgatagtctcacacttctcaccataatagatgatgctataactggtaaaatttgattagctcctggtttggaatggtatattcctggtttggagatagatctgtacagccgggtatggttgtttaggtttggttgggcctgtgcagcatgggtgtgatgttcagtgttgattaaaattgatgattaattgctctactattttacttctcttaaatgtttgctaaatgctgcttttgcaaatgagcctattgttaacaaccaaatttggtaatatcaacatcggagatgaagatgaaatcgaagcggactcgaagataaggtttttttcggaaacagagtaagaatcggctggagtccggatcggctacgactgggattggctaagtctgagtcagtctggttaagtgatacagccgattccgataatacgacccatgtgcgacattgggttcgagttgatgtgtttcaagatgattgccacgcatagatagagtcctgggaaggcaattgtatctattaattaggatattttatgtaaattccttagagataaatgtgggcaaaagtctgccgcaaagacttgtggtatcttagagtttgttagagataagagtcgtgtccaatatggacatatcttgtatttctcgggtataaaagaccccgagccctatgtaatgatgaacacacacgttcaatacaatttcggcgcatcgccactctttttgctttcgttttatttcaacgagttattgctttcgggttgagctgcatcggttttgatgttcaacaagaggtaaaacttgttatggcggcttgtgttctcgagattagtgcttccatctttatgatactctaatcttgtttatgtagtccgtcaagttatcatatatcttacataatccttgacaatatcgtcatttaacctacaatcggctaacatctgctaccagaaggcagccgattaggttaaataacgacattggcttagattatatgagatatccaccactctatgaaacatccagcggcttgatcgtctagatattgttcttcttttcatacttaatgctgtatcagttgagtttgatctattaagtcgtgcttaaaatttcaatctctagcctgcctactggttgccgattagggtagtatcggagtttcagccgatcttatctgatccaattgcttttgttctacatgctcaattaacatgttggatctgcccttcatgttaagatcttgttgcatttaagtatattagatttctgtttagtatattctctttgctttaatatcttaatataaagtagtatcggagtattagccgatacacgctagatctatctgatcggctatgctatgaatatatatataatctcattattaatatatatttcgatgtaagtgatttatactgtctcggcaaggtgaccgatctatcccaattacttgattcaagtatacatcgatataaggattatgtatcattgatatttacagccgat

SEQ ID NO: 25814 - DNA, 6799 bp, Oryza sativa
aaatgggtttggctaaactggtggttcaaccgaacccgggatggctccgttcggctcatttttcctcgtggacactaattttgaggcctttagcccattggcatggtggattgggccatttggaggtgtttaattgggtttttgggtccaaaactccataagtttgtatatgtgtttgattatcctccttcatgtatatttcctctcaactttgttagtttgtcacctgcatccaaatatataccaacactaatagaaatgattagtaataaaccctaccactaagttgaataccatattttattccattatatgcaggtattgatagtcatatattatgatttaaggaccgccaatagatacgagcggcacgagtgcttctaaggcaatcatcttccaggacaaatcagagatttgtgcagccttgaggtgaggtttttggcgatttcgagctgggcttttgtggaggccatgggatcggaaccagaagaatctggtaccaagatgtcacgggctagagagttggaatgaggattgcgatgcagttgatatttgaacaaagtggatgggcgtggccctggacctcgtcggcgcaacgtaatttgcgacatatgttggaattggacatacaactcctcgtcattcaaaattcccaaaatgttttagattgcgctcggggtgcatggttttcatagtagcacctcggccatcataaggatcggtcttcgggcttctgtttcaaagcactaccgtacttccacatgtctaatgggtaaggcttagtttggggctcaacctggacatgaacaaaaggacacggatacagatgtcgtggtagtcgagatatcgtggcacaggacgggcatccgggtggtcactcctgagggatgtcctgatgccatggggctcaactataacctacctgtccggggagccctgtccgtaggcgggtgttcagtcggtactcttgttcatggctaggatgagttaggaactatgtcacctcctccgtccgtataccatggtggtatggtgcatgcggcgacacgtgaggaagacgtgtcttatgggtaaagatgtacacctctgatcagagtataatctaatcggatagctgcaccctcaattatggataagccgagcaatgtacccaagttagtggtttaattcttaaaacttgctaagcaactaaaatttggaatggatggcttgggttggcttgggacgagccgaggcccagcttaaggctacctgtccggtccaactcatcgtgggccttaggccaagataggtttgtgtgggttcactgccttgtttaataatactgtgaagacttaggttcgagtttacaaagtagttttgagcaactattagtggttattaaatgccaattctatatcgccaacatatgcataaagtccagataataaaacatccaacatagtgataggtgttaagtctcacatattccacaagtgttggtgtatatttgtatgtatatgataaaccccgaaggtgggaggaaaagcaactaaaagtgaaggaggatgcatatccatacaaggaggagctttgaacttcatcaaaacattgaagaattagcccaaaattccgagaatcggataaggcaagcccagaaagagaaatgggccgaaggacaggccaagggagcccagccagggttcggccttcccctggtttcggccgaaccacaattacagtcgtccaagctggggtttggcgtggacgtcccggatgcatccctgatgacggttggagggcactttggacatttcctattcgctaaccgtcattaactgtcctatttaaggacctccctcacttcacacacacttccaagcttgagctgaattataagaggctctattgtactatattttatactagaatatgaagagagtagagtagaagaagtcggaagaattccgaagttgtcggtaatcttctcctatttcttttattttgtttattactctgatttcaactgaactatcttcctgagtaatttagatttatcttgtgagaattatctcttggttagttcctaatagcaaacgggattattgttcactataatcaagtaaaatatagtgattgctttggtgagttataaacactaaagtagatattaattgcttaaacgttgtgtttaggtaattgttatccaataattgatgcgtatcccacagtacatttgaggtaggtgtagaggtggtgacagccctctagatcacttaagtcctccctgtccgagtacgtagtagagcgaaatctgggaacagcgggttgccagttcctgaagtatcgcgttaggattaaacttaagttttccctaaacactgtttctcagtagttaatcctctctatcttagcctatcctttgcttggtgtccttagatgaactggaggaagatttgaccacacacatttgttaacaccataatttggtaagcccgatgtcatcatcggcctagagtcagtatcggcttcagagtcttggaattggccgatgggagtcgtcaaatcgccagcagttgtgttcttgacggagtcggatcaattaaagaaatttatccagaagagtccgagctcaaggaggaatagtttgttagtttccttttgtctttaggaaagtgtgtttagtgtccgataaggacttcgtgttttcctgttatctttaggaaagtttctttcttgtcctacaaagactagtatctacccatgtgtataaatatgtacacccggggtcattataatctatcaatctctcgatcaatacaactactctccgcgtatcgccaccttctttactgaggtttttacttccatccggcggaacttggcacctgacgcggggctgcatcggctttccatctctggcgaaggggtaagtcctacgttccgctggccctggtgaatctaccgactacattggtgttgttcaagactgcatcgcttcgatctcttggatcgctctggtttggttgatatatttgcctacctgatatctcaattctatccctaattgcattctgtttagagacacatcggtttagttgggactgtctcggttaggtctgatcttttgtcttagccgatatatctctacaatcacaatactctacaatcacattagacagatctatcggcttatcgagtatgagattatcatatacaatctcgtgctgcatcggttagtttcgacctactagattgttgttgataatataaatcttactaagtcgataggttcatgctaatgttttattggtgtgctagccgataagttatctggacgtggcatcggcttataaggattgcatatacatataagttggatttagcggatgacaacaaaggtttattgatttatctaaccttgtggattttatgacatcggacctccagtcgatgtatggtttaaccatcggaacagtacttgttctatcatatcatattgttagccgattggtttgtaaaggattatattgttgttatattgcgtcatcatcagccgactgcctttatatcattatcttcattggacatattgtcgatagctcaaaaccctatcggcatcgactaatatcggctatcggctggaactgctccatcggcttgtcagccgatcggctcattgatatactatttgcatattttgtcagttgcaggatcaaactgacgggcacacccacatatcgtcaacctttggacctacactggagctaagcagatctcccaagccagtgtgtgtttttcgagtcaatttttggcacgcccggtgggacacaagttttgcacccaacatgtctgaagaggaagtcaataccaagaagtagcaatctcgcaagccgatggttgaaacacttcaagatacagttgatgaagcaattcatcgcgcattgtttaatcaatctggagttttggcggatacattacaaagtttgatcaaggtaacagttgatgagttaattattcaaaaaagtcagctcggggggtagattgaagaacaacatcagcatcggctcggggggcaagcacatcggtgtcagcatgatgaggcatatcaacaatatcggccagaaggaattcaaagatatcattatagggaagatttggccaatagaattgcaaaggtaatagaggagcagtttggaatcaatcctaaggaacatacttctgtgtatcggctgccatatgccgagtggtttgatagggttccattgccacaccgatagttccaaattactccaaattttcagggcaagatgatatatctacaggaacaaatcagccaattcttagtgcaatgtggggaagcaacggctgaggaagctctgagagttagattttttccactgtgtttgactggatcagccttcacatggttttcatcactaccatcgaattctattggaggatgggccaatcttgagaagcaatttcatgactatttctttgctggcatcgatgagatgaagcttttagatttgatatcagttcagcagcaagaaggagaatcggctatggaatatattcaaagatttcggaatatctgcagccgatgttatagtttgagcctgagcgatgagcagctagcagatctcgcatttcaaggattgtcagcacatatcagagagagattcttttgctacgagtttgatagcccggctcatctaatgcagacagtatcggctcatgaaagtcgactgcacgaagcaaaggaagatcagttttggagtcaccaagacaagaaatgagataagattgaagcatgagctttcatactccaaaatttggggcatgtgttaacgccaaaatttggtaagcccaaagtcatcatcggcctaaagttagtatcggcttcagagtcttagaatcggccgatgggagtcatcaaatcggcagcagttgtgttcttgatggagtcggatcaattgaaggaaatttatccagaagagtccgagttcaaggaggatgcggcatggcaagtgtatctattaattaggaatagttcgttagtttccttttatctttatgaaagtgtgtttagtgttcgataaggactttgtgttttccttttatctttaggaaattttctttattgtcctacaaggactagtatctacccatgggtataaatatgtacacccggggtcattgtaatctatcaatctctcaatcaatacaactactctcggcgcatcaccaccctctttactaaggtttttacttgtcatctgacgttacttggcacctgacgtggggttgcatcagctttccatctccggcgaaggggtaagtcctacgttccgctggccctggtgaatctgttgactacattggtgttgttcaagggtgcatcgcttcgatctcttggatcgctctggtttggttgatatatttgcctacctgatacctcaattctatccctaattgcattgtgtttagagacgcatcggtttagttgggactggctcggttaggtctgatcttctgtcttagccgatatatctctacaatcacaatgatgttctaaggccctctttgtttaggcttaggcttattggcctagacttttaagtcagtttattggcttatatgatttataagtcagtggatttaatgtcctaagtttagtggtggagtcatacatctatctcatataagccaaaaaagcttctccaacctagcttttggcttaatagtgttagagtggcttatggcttcaaaaaagccaaataaaaaagctgcttgtttgttttggcttagacttttcgacttataagttggcttataagcctaaacaaagagggcctaaatagatttgctatatccatcatattagatagatctatcggcttaccgagtattagattatcatatacaatctcgtgctgcattggtaggttcgacctactagattgttgttgataatataaatcttgctaagtcgataggttcatgctaatgttttatcggggtgctagccgataagttatctggatgttgcatcggcttataaggattgcatatacatataagttgtatttagccgttgacaacaaaggtttcattgatttatctaatcttgtggattttatgacatcggacctccagccaatgcatgctttaaccatcggatcagtacttgttctatcatatcatcttgttagccgattagtttctactggattatattgttgttatattgcatcatcatcagccgactgcctttatatcattatctacatttgacatattgccaatagctcaaaaccctatcggcatcggctaatatcggctatcgactgaaactactccatcggcttgtcagccgatcggctcattaatctactatttgcatatctaccctatagttaaacaaatgattttattcatttactcattcatcatatcacatatctaacggtgtaaaatcatccgatgtgttagatcggacgtcccacatgggcgcgtgtcggtcctcatcctctcccgcacccccccccccctctctctctctctctatttgccgcaatcgacgcgcctcctccgcatcggcgcgaccgcgcatcctctcccgcatctccctctcttccggattcgccgtgcctcctccgcatccctcccctccgggtcaggatcgagcgccgcctcgcgcaggggttcaccggcctgctgcaagcgcatcctccgcagttcccgtggccggcggcgtcgcacaagcggattcccttcaagatcgacctccccgtggtccccttcggcccctccc

SEQ ID NO: 25815 - DNA, 19667 bp, Oryza sativa
cacattcaatactatggtgatcatataatttggagtacatgtttagaaaaaaaaactaatgcactaaacacaatgatgatttgaatgaatcaattattgctgacgatcgcatctgaatcaatggtagtttacccttgaatgatttgtctctgttcttctatgtttggtggtggtggtattatatacatgtttagacaaaaaaactaatgcagtataatttgcatatgttcttctgttcggttaccggaactatcataatacatttattcgtcaccattttctgatgcttgttatataaatatgagcatctctttcagtgatatcctctaaatatgtttcctgtgacatcctctaaattcacaatggaaacgtgttactgattcgaagtctcaatgcagtgacatgtttatttggacacatgtataattggagtacatgcatttgtgataagtttccttggtaaatgcaatgtgttcttcatcattgtcaattattctaggaggccttgatatgtcagttaccggattcatggccattgttccacaccctaggaattatttgaagggcaatatttttatgaagcttaaagattgaatttgaatccatctgccctggcttgaaggtgaacatgattttatttttaagattgcattttagttactcttaacatactccagttactcaatcatatacatatctgtttcacacatgatctatttatgcacttttgtcgcgtttagtctaaaacgatgctgtcaaattttaaaagggcattgctttactaaattgtggtgtatgtagtattagcatgtcaaattacatttatgcgtttcttgcttcccgaccatatgtcaaataactgaaagtgttagtacttgagttaacccttttttcatacttatgccatatagcaccctaattttgttcatgcgatcagaggataaaatattaagaggattctttagtatggctcattttattgtttctaagtttagggttattcagacagataacactttagctttctatataatattggttttacaactttgtctctcgaaggttttttttttttggaacgtattgatggttttcctcataatatgctcttgaaatccatcttgtccctgttcaatgcagtacaatccaaatattatggtatatcaacagcagcttcagtctgggacagagcaatacaaggtcctccctgtaagtttagtatgaacagtgcaatcaaatttataagtcttccctatcaaaatttcagtatagccccatttgtgctggtctgattaattatctttgaaatgatattctgctttgagattaaattacatgtaactaacttgctttgataccttcacaagtcgtgaaatggtttagctgtacttccatgtttgggttacttgtgtaatatttggtaggctataaacccatttgttgtgcctttttttttattatattgctcaataaagatagtcaatcaatgtgttgtaaataataagggaattggcttgtatcatttgtttcttctatgctcaagatcctgaactgttgtgcatgtatcatttgttgccactgagtcattatttggattcatcagagaacatccatcattttgattaccagactatggactgatttatgccatgcttgctaattgatagagggacatttgctacttctgcatataggacagataattaaactttttgtgcgctgaaatgctctttgtacggtgagtatatgacacgctaaagatgactgaaattaaacttaggatacttctgtttgcaactataagacatgagttcttttgctatatttctggataggtggagtaggttttatttttaagagtttggtctgtggattttcgtctgccgatgagtctccaatgtttgatacagtgtagcccatgagcagctgctgttttctgattttttttttcaaggtaatgtagctgctttgtgtatatgtgtttgtccaatagtgcctgccattccctttggatggtttgcattgcagatgaattacgattgccatctcatgttgctatggcactatgctaagtgaatcttgttcacttcctttattcaagcacaaggaatttatgtatgttcattatgaaatctgtaagttagataatgaacatacataaattcactagctgttgtgttatcacattgattgtaacatcaaaacaatcaactactagaaaatactaaagtttctaaatggttatcagaacacactggaatttttttatgggcttactgttccacactgcattccttcacaattgaagtttgccatctcttatggcactcttttagcttgataatctgaaaaaatagatgactaaatctatagtttccttttatccaggaggagatttggcttttcagtatgcttcagtaaggatttagcagatggcaatctttgctggtatgtagagtatttcattaggctaatcgcctatttgttgatgatcataattggcacataaattgataaatttgtattgatgattctactcattttaaatgttatatgggagcatcctttgtttgataaggaaaaatcagtgttctttgcatattcaattagagaagagcatgaatactgttgttactctaggaagaatgcttatattatgaaaggagcgctaacattgcgttgagaaaacaacaggtgatgttatctttttctgatttccttatattgcagtctgttagcaaggagcatcaagagttcctcggccttgtcgacaaagaggtataatgtgaacttgtaaattgatattagagtgacaattattcatgcagttatcttccatttttattgcaaatacttgggagggctcaataactcttggtctttgttgaatgcagattgaattatattatatactaatggaattccgccggcggtgtgaggcccactcagagtaggatttggagggtgcagaactgtttttgcattgccaatgaaaggaggaagaccgcctcaaagagccttgtccccatccaccaacatggtcatgataatcgttgacatcgaccaagatctctccagggtaagtagaacagcactaaaattaggattagcatttctagacaccatgttatttcagaaattgattagttggaatcttgtattcattttgctagcctgagtgcctaacttagtggaaatatattggaaaagtttctccatggcagattgaggctgttatttcctgtagatttaggtttcgctgtaaatactgaacaattattgcaattttctatttgtattgagtacttgggtggttctttctatcaaccaaatcaatttttattcatcagtgtagactctttgaactgcaattgttgtgctgctgatatgtgttatgtaggctgcagcagaaggtcaattttcccttttgtgaggtgccataattttgaaaatatgttaattttgtcaattgcttgatattaagtggagtatctcctttgtatgcaccaaccaattttggagctccagacaatgaaacgatagcttcataatatccatgaaaaagtgctattggatgaatccagtaaagatgtgttttctctggcattttgaatattgaagtgtgctgatgactttgtaattactaataatgatgcaatgcataaattctatggccggttctgttacttctttttatttggacgtaatttgcttgaaagatttttgatgtggctaaaggagaaatttttttaaggcatttggtttctcaggagtttaggagttggaaccatgcaaacatgcctcatgctaatgtcttcctgagctttcagaaatcgaagttatttctagcttaagatgatgttggagctgatcctggtgctgttagagaggccaatctattcaggtccagcagtttacatcaagatgatgttctttctagcgatgcatgtagtgaccattgatgtttcgattgcttgaggcgaccctctttgtaattgtgaaaaatgtggtgttatgaaacaaaaatatagatttacatccaggagataaaattattttattctgtattttagagtaacacggtatagctactggtgctatccatctctggacctgattttttttctgcatgatttaaaatttgttatttaaactgaacttttttttcttgactttaaaatttatctcattttatactttcaagatatataaaatattttgatttttttaattttgcattatcaaatattgtcgtagcgttagcacgtgcatattactagtcttgtcagttgcaggatcaaactgagtggcacgtacgtatatcgtcaacctttggacctgcactagatctaagcagatctcccaggccagtgtgtgttttccgtgtctaaaacgttcccttggattcgatacccttagaatacttcgtaaaggaagtgctacatcggtatatccgtgcgcttgcggattttatctgtgaccgtaagaattaccaacaagaatttctggcaccattgccggggaattgttgcttatcattttcgaacccagttcatcctcgtatctcttttcattttttttattctacctttacccttgctatccagagaagtattccttttaaattcttctcgaccatggagcaatctcttttcgagctgtctgctcctaagagcgaattctatgaaccacctccttcatcggagccaatttacacctccttcatcggagccaatttatacaactagctatgaaattcgctccgaactaatcgtatggttagtgaaaaaactttttctagccttgatctagaaaaccacaaccatcatatgtgggactttaagctaagtctgctcatgccttaagattcgtggcatgaagcaagaaaccgtacagtggaaattgtttccgttctcccttcaagacagagcgaagcaatggtacacctctaccattggatgtgtaaacagtagttgggaaaagctgcgagacaaattttgtcttgccttcttcccagatactcgtattactgcccttcgagaagaaattctcagtttccggcagattgaaagcgaatcaatcggtgcagcctggtccagattcactaatttagtgcagtccggaccaaccatgtccttacccgagtatgtgcttttgcaacatttttatacaggtctggataaggagtctgcattttatctggatataattgctggaggatcattcatgcataaaacaccgtcagaaggaaaagtaattctagatcgcattctagaaaatacttccatcatgacgcaatgcgatgaaccccagctagaggcatccgtgtccataatagaggaaccttcaacaatcgagtcacaatctgaaccttccacttccaccgactcgattgatgaaaaagttcccgagccgccatccgttgagaatgaagaaattcagattccggatggtgcctataaaaggacatcaccttctcacttcactcacacacctcaagcaatagcttctcatttgtctcaagtttagtttagtactatctagctggtggaataggaatagagtagaaatcaggagttcggaagccttcggaagagtttgggtatgtttctattagcttttctcttctcttttgtaagctttgtacttttattagaatactcttctaaatacatttatggtattgaaatactttccgagaatatgagcacctactttacattatgttcatgttatactaaatatacggctagcttatctgggagatgctttggtgtggatataatgtttgcttatgcaattactctatgtcataacgatgatattagagtagtatctggtagtttagacgtattgtctagattacgggatatcattatttggggttatatattgcggatgagaggtgggccactgatggtgacagctcagtacgggtattcctccgcgccggtatataatcctaagttaattccatggggagggtattccttcgtatttagccccgattgtatggtcatgacgggctgtcgtaaggaactcggcagtcaggggtggcttctcgaagtaccaggagggcatcggatagaatgtcggttaactagaatgtatgtatactatgtatattagaagtataggaatagattttcttcctattttctttccacttagcttagattataaagtatgagaatgagtagttaacgcttgtgtgtcactctacccttggattatcttaacccctgcttagaatatgattatcaccctcatatataaattattagtcaatgttctctctacatgatattcccacgggataaaataaatacgatacccttggaatactctcgggtgaaatgctacaatggtatatccgtgcgcttgcggatgaactctgtaaccataatataccagaagtgtttctacgccattactgggaattatatttctagtaatgtcgttaagaaataccaacaagcatttctggcgccgttgccggggattatatttctagtaatgtcgttaagaaataccaacaagcatttctgacgctttcttccggagcgtcaggcctcaagtagttgctccgcagaaaactctaccgacaaagaaaccaaccgtaccagcgccaccgacgttcaagactatggctaacaagactctccacgagttcgctgctccctctgctgacaatgtggtcattgggccacaggtgaacataggcgacgtggatttcgacttgaactctagcctcatcacgatggcgcaggctagcccgttttgtggcaagcctaatgaggatgccaatgctcatctgcaacagttcctgaagatctgtagcatgtacaccatcaagggcgtcagtcccgacaccatcaggctacgactatttctgttctcccttcttgagagagcgaagcagtggttctatgccaaccgtgctgctgtcaacacctgggacaaatgctctagggcatttctctcgaaattcttcccgatgggcaaaaccaatgcccttcatggaaggatttccagtttccagcagacaagagatgagtctattcttgaagcatgggagcgtctacaggagtaagtggccgcctgtcctcatcatgggatggacgactagctgatcctgcagaacttttacaatggactcaccccgatgtcccgctatcacctcgacgcggcagctggaggagccttcttctctaaaatggttcaaggagccgttgaactaatagagaagatggtctccaatatgggttggaacgaggaacgacttcagatgcgtcagcgaggcatgcacaccgtcaaggagtcggagttacttgctgccaagctggacctcctcatgaaatgcttggacgaccacgagaaacggccacaaggcaccgtcaaggccttggactctcacgtcacatgtgaggtctgcggcaacacaggtcattctgggaatgactacccggaaacccgtgaggaggcgatgtacatgggcaacaacaatgggtatcgttcacaaggaggttaggggtggaaccaaccacgcctatattatcaaggaggtaacaacaacggtaatttttctaacagccctccttgaaggatctcgtttttgcgcaagctaaaaccaccgatgcattaagcaaaaagcttgcggccaatgataagatcctagaaaacattaatgtcaagttagatggcttcgcttctgcttttcaaaaccagctgagcttcaataaaatgatagaaacccagctagctcagttggcatccttaaaccctgcaaatgaaactgggaggattctggggcgacccgactcgtgaggaggtaaagtcaaggcgatcacgacgagaggatgtaagtccactcgtgatccgctatatcctaaccctgtaggaactaacgggatatcaaaacaagcgccatctagtgactcggctgacaaagaggttcagccagagaagaccgtgccgcaggaatactgcgacacacggttgctgccgtttccccaacggtgtaggaaaccgtcagtggacgagcaattcgctcgttttgttgaagtaatccagaagatccatatcaacgtgtcgttgttggatgctatgcaagtaccaacatacacccgttatctcaaggacatagtcaacaacaagagaccgctcccaacaacagaggtggtcaagcaatgcagcaacgtgatactccacaagctcccggagaagaagaaaaatcaggggtgtcctacgatcacttgctagatcggggcacaacaattcgaccaggccttatacgacctgggagccagtgtcagcatcatgccgaaagacgtcttcgatagactcaacttcacagtgttggcaccaacaccgatgcgccttcaactggctgattcgtcagtccgttacccggcagggatagcggaggatgtgtcagtcaagacacgggatttctttatcccggttgacttcgtggtgctggacatggacacgggaaaagagacgccgctcatcctggggcgcccgttccacgtcaacggcaaggaagagaagtttgagtttcaaccgaggacggaacaatactccatggtcagaataaagtatgggccgaacccacagaatatccaagaggtcgaagtggagccacccaaaatggacagcctggtgaaatttatgcagaatttcatggagaaggaaacaactatgcctaagaaccgttattggaagatgccggtagaaccacccatactggccaagaaactagagcagccggctcagaagaagccgccatccgcaccaaaaccaaagaaggtgtggaggaagaagccaaagacgcccactccatcacctccggagacgggtggaaaatccgctaactgattcagaaggaggtacggtctcgcaagtcggactttaaatgacgcgaccttcgccaacaggtaaattggtatgtatccgcatatttgctttcaacaatttgaatttttgcatcatcatatatttgaacttcaaaattgcatttaggatttttgaattttgaggaaattcttcaaatgaatcttttagagcaaaccgaaataaaattttcaacgaatattcgctatgccaagaccacactgatcattggaatccaacggccgaaagtggggccggttgggcccaccaggggttcggccgaacaaccggccaggcaacggttacctgctacttttggcaaggtaacggctagtgggtcccacatgtcatttctgactgttatgggtaccctataaaagccagccagccgggagagggaactccaccccatttcaacacattttcattccctctccaaagtttgctctcaagttcattcaagttttgattgtttccctcaaattaaaatatttagttgcatgtatacaagttgctttggtgaaactaaccggcgtgtgaaattcttgtcatctctaacccccgccgagttactccgttcttgctccattgtgcagaatgaggaggcgactgtctcgtctgttcaaggggtccggctcttcatcaagtcgtcatgacgagtctagtactcattcatcagcagatgttttgatggaagacgccgaagctccgcgacgactcctgaacgacaccgacctcgaccttgtcagtgatcggaagagacaagcctactacatgctgagcgaccgggagtatgctcacacgcgagaatactcaccggagctgctgaaaaagataggtattgaagttgaatttcgttctatttggaaagcggttggttggcagagatttattgtggtagatgagcttggttctcgtttgcttactttgcaatttctgtgcactatgaaagaaatagaagatgaaatttcctttcgttttttccataaggagtacacacttacatggaaaggcttaagtacacttcttggttttcacgattcctgtaaagtcgatctccagaaaggaatttcagggttcgagaaaaataggttttgggaagacatttctggtgctccaatttgcaagaaacctagaacgaatgatattcataatcctacacttaggctcatgcacaaatggattactatgactttgtttcctagaagtgatatgagacccattaggggagatgaattaattatcatgtttgccatggttagaaaaatcaaaatttctcctgtgaaatgtatgataaggcaatggttagaaagtataaagttctctgctcctgttgagtgcacttctctgattactcggatagcaaaagggcttggggtcgttagcgaccaaattgcttttatctcagccgctcgtccgcgtattgatgaggcttatctagtgcaagggcatattttgaagcatggagcagatggatctttgatatacttttttcccggttgtacaaataaaatcccgttgccaagtacggggtatcatttgtacaactgccatgaactaaccattctcctgcagaccatacaagaatctcgtgcaggtggaacatatagggagacgcgcaacatgataaggaacgaacaagaaagttcatcatcctcaacacccgtgcagatgtatgaggcaggtgttacagaaaaactcaaagactgacattactattccttaccatgtttttgtcactgacttcctgttgcagcttcgcgcatactgcaattcccacatgacatcgtgtttcatagaaatgttggtttgcactatctgaatatatccttgttttatcctatatgttaattctgctagctatttccttggaatgatttgaagaaatcattttctcttgaaagggaactgtaatgaaaaaaagaactaaagtgataaattccaatttaaaaccttacatgcgattgatgcacaaaaattatcacataatttagttgcaaaactttctctggttaaccttatatattacactaattgaatgaactgaatttgccagttaatcaaaacatcttgtggctaatctcgaacaatgtcaaattagattacgctaaacaaatatagttgtattcgtgtttatatcctttgttaattctctttccccagtagatgatatgtgggaatagtgtatattttgtcaaagataactacatgaaaaaaatcaataatttgtcatactctgtcacaatgtgttgaattgtagttataaaattttatctagtagagcggttaattttatcgtgcaaatgatataaaactaaagttacagaaatatctcccagctgtactgctggacaaagggtttttaaccccggtttataaccccctatagtcccggttatgcaaccgggactacgaatacaggactacagatacccatctttagtcctagttaaaataaccatgattaaaaatatccatttttaggcccgattggtgttaccaaccggaactaaagatggagccaggccagctccagttggtagattttttttctttttttcattgttttaactttgaatattcatttcactacttccccaaatcatccccaaatcgatcatcgcagaaaaaagtatcatctctaaatctctaaattgatcatatccaaatacatcacaaattctaaaaaaaacatcacaaatacttcacatattcacatcacacacaaatcaaatacatcacagattatacatctcagatccatgcaatgaatcacaaattctcaaaaaaaagaacaaaaacaattttgcgatgtcgctgccgcctcctctctggcagaggcgccggccgcccgccgccgcccgcccgtcctactcgctcgccctctggcctgcttgcttgagaggataagaatagagagaggaaagggagaggataagaaaaaagaggaggataaagaagaggtgattgctagaggataagtgctagggattatatactatgcaccgatttttagtcccagttggtatttccaaccgggaataaaaagaatagggggcatacacttttttaaccaggactaaaaacgatctttagtaccaaccagactaaagatcataaaatagctatgggcttttcaaccggggctaaagatgatttttagtctgggttctttttggaaccggggctattaattgtggttttcggctaagccaacaaagattagttctccagtagggttgatagcataaactttagatggcacatgtgttatatcgtggtcaatattatattatctggttcttattatgcatgttggcaaagtattctcagccattatccatttctttttattgctggtgtcagtttaaattaattatattagtgctctttcaccgtgtcgtctattcaacgcgtgcaagtatatgaatatcaaacaattaataacaacggataatcagttcattaaaactcatatgtgctcagcttctataacaacggatatctatccaaagatcaatataattaatttacagtaactatgtcatatatatctgaacttttcatattggtagttaattttcaatatcatggaaaacatgtctatttttcccctgccagctgagatttaccagcataatatataagaagtttcttaccatccacggtaccacatatatttttatgataatatgtccttagtataccctcgggtatccaaaatattagaaaagtatcttaaatttgtatgagaaaatatagtacattgtactttctgaagaagatctaaatgatcattaaataaataaatatttaatcaacgtgcaaataaatacaaatatttccacccgtactcacatatggtatggtaagtggcaaagagtaaatgaaccctgtgaatcttattacctgactgaattggtcaggttagctagtataacatgcatagcctggttcgtccttattgtggttttccacgtgtttgtctctgtgtttgtaacatgtcgtgctgatcaggtttcaactatgaggaaggtagagctatctgcatgtacagacacaaggtgactgtagtgcttgggaagtgaggatgaagatgtcatcttccctcacctatctacaaattaagctcttagtactgacacaatccagcagtggaattaaaattaaaccatgcacatgcatatgatgccagaacacgctctctagtatatatttcctctgatgcattcctgcagctagcagtacttgcatggattccattctctacagtacatattcccttctcatttctccatgctactctttgttttcattttctcttcccaaataaaaaaatatgtataccagaagacattcctatatttcttttttggttcttgtatttatcatctgatagaatatacagtttcagtcgggctctgcgctcagtttgttcccttccttgcgcagccttgaggacagacacaagccccatccctagccttaacttttccattgcttaacgagaccaggcaaagtttccctgtgatctgcagagcatttaacaacaagacagtgattgcatccaggaaagtcacacttgtgtaagaaactgagaagaaaatgatggggccctattgggtactattattggttggaggaactaattaatagtactacagacgatcagaatatgagtcagttgcatccataaagacaagcaaatcaagcctctttctaacttccccggctagcttgcagctcttcttccccccttctgctccggccctctcatagctagatcctcacatgtactgctgtcttcctcaatcctgggttcagatgtttcacctcttctctatctagccctctttccatcatctttggcacctgcaagagctagagctgtaaaagttagttagtgtcatttgatggatccagcaaggtactggatcttggccaggaggaagctgggagatcagaaggcgcctctcttccccacccctcacatcaccatcggcgccggcggcagctccacctcctactacgagtcatgggaggaacgtgccttcgcggaagactccgcagggcatctcgggggctgcatctggccgccgaggtcctactcctgcagcttctgcggccgtgagttccggtcggcgcaggcgctgggcgggcacatgaacgtccaccggagggaccgggcaaggctcaagctctctggggttgtggaggacggcaccggcggcgaaagccacggcatgccgccaaaccaaaactacatgatacaaccatgccctccccaaattggcaccctgcagcacgcctacagcccaaaccctagaagtggcagtattctcgctgctgacactaaccctaattccatatgtgatgttgtcgcgtaccctgctagatccttgcttcaagttgcagctgctagaactgccttgggcaaacaagtcctgaacgcccctcttgtctcatcgaagtcgccgtcggctggtagagaacatggtaagagggagacgttgtttcttggtgctgttcgattggcacaggatcatgacacggtgagttctaatcttgacctgcgtgttgggaaaaatgaattgaagataactactgttttggggtgccgatcaagaagggactttatgtacgataacgaccgcgcggatgatgaaaagactgttgaagcaagtcacaagaaaagaagaatcgatttggaggtaaaccccctgattctaacttcttcaaccagtaatcatcaacagcaagatggtggtgatgaccaacatcatgaaaagatactaaaactttatcgtagctcctcggttgaagaactagatcttgagcttagactcggggaagccccaaaagaacagtagatttcatatccactgttgtatctcaacttgattacaaatgtttaatttgtatttattcaccactcgtgtttcattgaaatgttggtttgcactatctgaatttatccttgttttatcctatatgttaattctgcttatttccttggaatgatttgaagaaatcatttttctcttgaaagggaactgtaatgaaaaaaagaactaaagtgacttgttatatgctgtgtaagaaggtactgaattccaatttaaaaccttgcattgatgcacgaaaattatcacataatgtagttccaaactttctctggttaaccttatatattacactaattgaatgaactgaattgccagttattcaaaacatcttgcggctgatctcaaacaatgtcaaattagattacgctaaacaaatatagttgtattcttgttttatatcctatgctaattctcttaccccccatagatgatctgtggaaatagtgtatatttcttcaaagataccacatgaaaaaaaatcaaaaatttgtcatactctgtcacaatgtgttgaattgtagttataaaattttatgtagtagaccggttaaataaatatttattatcattgacagaaatatctttcaactgatatcagctgatagcataaactttagattgcatgtgttttatcgtggccaatattatctggttcttattgtgcatgttggcaaagtattctcagccattatctatttatttttattgctggtgtcagtttaaattaattagtgctctttcaccgtatcctctattcaacgtgcaagtatatgaatatcgaacaattaataatcacttcattaaaactcatatgacctcagcttctataacaacggaaatctatcaaaagatcaatattcaattacagtattaactatgtcgcgtatatatctgaactttcgtattggtagtttattttcaatatcatggaaaacatgtgtattttttcccctgccaggtgagatttatactagtataatatctaagaagtttcttaacattcacggtaccacattttttttagtgataatatgtccttagtacccttgggtatccaaaatattagaaagtatcttaaatttgtttgagaaaatatggtactttgtagtttctgaagaggatctcaatgatcattaaaaaaataaatatttaatattcaaccagcaagtaaatacaaatatttccatccgtaaggagtaaatcaagcctgtgtatcttattacctgactgaattggtctggttagctagtataacatgcatagcctggttcatccttattgttgttttcctcgtgtttatctctgtgtttttaacatgtcatgctgatcagctttcaactatgaggaaggtagagctatctgcatgtacagacacaaggtgactgtagtgcttggcaagtgaggatgaagatgtcatcttccctcccctgtctacaaattaagctctcagtactgacacattccagcagttaaaccatgcacatgcatatgatgcagaacatgctctctagtatatatttcctctgatgcattcctgcagctagcagtacttgcacggattccattctctacagtacatattcccttctcatttctccatgctactctttgttttcattttctcttcccaacaaaaaacatgtataccagaagacattcatatatatatatatagctcttgtattcatcatctgatagaatatacagtttcaatcgggttctgcgctcagtttgttcccttctttgcgcagccttgagtacagacacaagccccatccctagctagccttaacttttccattgcatatgagaacaggctaagtttccctgtgatctgcagagaatttaacaaacaagacagtgattgcatccaggaaagtgcagtacagcacgcacaagcaacatacgggcgatcagaaatatactagctagatgtcaactgtgactacatttagaggcccggtttagttcctacgcaaaaacttttcatcctgtcatatcgaatgtttagacacatgcatgaaatattaaatatacacaaaaagataaaactaattagacacattgcgtgtaaattacgagacaaatcatttaagcctaattgctccataatttgacaacgaggtgctacagtaaacatttgctaatgacgaattaattaggcttaataaattcatctcgcaatttacaggtggaatctgtaatttgttttgttattagtctacgtttaatattttaaatatgtgttcatatatccgatgtgacacactgaaacttttcacccttagatctaaacacggtcatagatgaatttaagaacatccttgtgtgcaccagctgtggcctcctgcaccaggaggccacggcattggcaacccgctgatttctcagtgttacagaagttttcagaaatcgtgaaggggcagcgcatgcatatgcatggtttgaaacctacaggctttcatgaatggctgcagtcaattaacttttacacttctctagaaacccggcaaatgatcaggataggtctgtaaagagtatactcaataaattaaaggagtactcaaattaagtgtgcaagctagcttctgtgtgctggccgctgcagatgcgagtatcattagtacagagatgcacttaactgtgcttgttttgatcgagagctggatgcgcgctcctggacaagtctgttcagtgagtccaacagcttgaagtgtactgaagggttgtctgcaagtgagctatagctaagctaatcagtttagtagtcatgcaaaatactatagtatatatggatgcacatggtcagaggaatgtctgtttaatagctagctagttacagggtatgttgctgtgtgattaattaactataacatttatatgtcctattctgtggtgcaaatgagattattagagctagcgtgttgtgtgaggggatggtggttggttagagcggattttatattttatggatgctatatagtactgcaagcaccatatatagtactggggagatgtctttaataatcgtgtgggagggaatatggaatcaaatgcactgatcgcaacaggtatattttaatcgaacaattgtactggatatgcgtatgtcgttagggttgagaaagacaaatacgcctttaggatatttggaaacgaaattatattttatggtatcaatactactagaaaaatggtctttagcgacgttggccatttatttttgcagatgggtaggcacctaaaaaccggagcaccacctaggataaatgataccggggccatggttttgttccgcctgcgaagatagatctttgtaggcggaccaagcgagccgcctgtaaagctccatcttcgcaggcggaccacataagggaccgcctgcgattattctaggtggtctaattatgtggtccgcctgcgaagatggaacttcgtaggtgcccatttggtgccgtttgcaaaaatcttcgcaggcgaccatttttcgtcgcatgcaaaaatcaggccggctatatagtcttgttcctccccgagcttctattcatatctgacgattttcactatcttaaaggcaccaaaatataggggtaggttttgaacttcaaattttcgagggatttttctacagtgattagatctatgcctttgcactctatatacatagttttttggtaatttaaacctccttttaggatggatctatgcatgtaaaatagtgaggggaaaagctagctcccatgattgtgttctcttttttttttttgtattttgctttgatatgtgtgttggatttatgtggtttcttgatgctatggggttctctcatcttctagtgattttataatgtaatataatggaataaaattatatacattgctcttatctatttgcctagatctagataggagagaaaacttcatgacatgtaaaaaataattattatgtttaatttccaatggtatgtttttgttggttttatgtatactctttgatgtcatgtggtcgtcccatcatctagtttgttaaatatgatatgttaatttcaaaatgttatatttgatttcataattgtttactaatattatgtagaaataagaatatatagtatgtaaggctcaaatgtatgatgctatcaaggctgaaattactcgattatatgatgctggttttattcggccgtgccgatatgccgagtgggtttctaatatagttccggttatcaagaagaacggcaaatttagggtgtgcattgattttcgagatctaaataaggctacacctaaggatgagtacccaatgccgatcgccgatcaattggttgatgctgcttcaggacataagattataagttttatggatggcaatgctggttacaatcaaatttttatggcagaagaagacattcacaagactgctttcagatgtcctggtgcaatcggcttatttgagtgggttgtgatgacttttggtttgaagagtgctgaagctacatatcagagggccatgaattacataatccatgatctgattggcttgttggtagaggtctatatcgatgatgtggtttttaaatcaaagcaggtggaggaccatatagccgatttgaggaaagtttttgagagaaccagaaagtatggtttaaagatgaatccaacaaagtgtgcttttggtgtatcggttggacaatttttgtgttttcttgttcatgagagaggaattgaggtccctcaaaggagtattaatgccatcaagaaaatttaacctccggaatataagacgcaactacaatcgtgatcggcaagattaattttgttcgaaggtttatatctaacttgtctggaaggttagaaccttttacacctt

SEQ ID NO: 25816 - DNA, 18253 bp, Oryza sativa
ccccatcgtgatgattcaatcggctcggttgaaattgtgcccttgactttattcgttgatggatcggtttgtactcatgattgtggtatcagcttggttataatctctcctcggggggcaagttttgaatttgcttatactattaaacttgtttgtatgataatttggcttatagttagtgcatgtgtgaaggacagattggtttagaattgatgatacaactgtcaaatgattcacttggaaaatctactccgtttacaggtgtaggaaattgtgatgcatcggtcatatgtgatagtattgactaaatgaatatagaccgatgtagtttataatattgtggcctgtgcaagctgattacatatatatgcatatgtatatttggtttttatgcaggctacagaagctatacagggcgtggtcacattacgttaatcacggaggcaggtgattatccctaattgggtgattaagtggcaagggaatccttcgttgctcctgcagatggaaagtcaggtgtcgtatttactgagccaaagagtctacatcgtcatcgagcgagccaggggctcagacgtgtggctgtgatgggagtgctgcttgcgtggatgtgatggtattcgctggatccaaccatcgcgtggcatctgcgttgagagcagggctccggcgaccgagccaagccgcgtgcgatatttatcaagttagaagataaagattttgttacatcgaattgtttcaaatattccggtaaaccatcgttgcatattgcgtgggaccgagtagaaatgccaaaagatcatggcaattagctatatatattggtccacggtagaatagaagggaacccgaacaatttcaatctaatattcatctcttttacttcttagttcttttctattttgttttcatggctgagttctagcaaccctataatatagttaatctttgctgttttatgctgaaaaacgatcgtgcttgtccacgaaagcgagaagcttatcctttgctagtttgctcggaaactagtcgttcatcgtcacgtaagtacgatattatcttctttactaatttgcttgtaaattagtcatgtgattccacgaaagcgatttaatctcgaaatcggtttcactagcagattttgatctagcgattttgacgactctattgaatacaccacaaatcattaggtcatattgtattagcaaaaaaaagcgtcaacatatcttggcgactccactggtgaaaacaatttcggtcctgcgattcaaccgaaatcaatctactgtgcatttttgtcagctgcacgccgaattgatctattcggtggcggcggccagtcagtcctgcttcggtatcgtttcgccattcggcgacgctatctaatctcatcacaagcttgcaatattcacacgatcaggcagatcaagagttgactttgttttgtttcttcgcacggcacaatagcaacacacgcgcaggaacataagagataaagaaacgatcaggtcagtgcttgtctctgtatattattttggtatatttgtttggtgtacagattgattgacgaggacatatctaactcggatataaccataactaccttatgtattaatcaaataaagattcatatgttctacattatatttacttgttatatatttgaacaaacgttgctacacaatgacttttgtgtgttttcgtttgcagacgtacttgcttaggcaaaggaaaagagaccgagcgtaactaatgcatggatgattaaagaagttgattggggaccaaaccaaaaccttctccaagtctacttctacctcatcatgtcacttttggcccatagaagacgagataaaattatacatgttttggattcggattcggccctcctgagagcatcaacttaaaatggacctagccgctgatctagaagtaatttttgggcccatgagtacttgttagaaagattatggagtctactttcatatggttttggtcccatgtcaaaattcctaccgagctgccagaaatctgcaaaacaagccacgtatctcatccagtccgaatctgatttgggttttcggccttgtaattgtgtcgtaggcttagcccaagggggtctacgccctagggcaaccgtaggacgtccctaatcttttttatttagtagccgtcatcgtttagagtcaggttttgcttaaattaatctgtcaggaacagtttcgccgatagatcggtttgtgtaaccccaaattcgtgtgcttaatcattcatatgcaatttggttgcaatctatcttgttcttgcttgtattcttcgattcgcatgcagggattagccatctcggcgaggtcaatcgggtttcggcacggttgataaccagaggagacgtggtgctgcgattgcggggctcagtagcgtgttcgttcagaagccggatcgagttgtgtcgcaactccgcccaaatcgactgtttatcagtacctatcggaagatcgggacctaactccctcattagttggtatcagagcgcagttgcccgttagttaatttatgttcccataaccagaaaattgccacataaaaatatttattctttacctggacaatttgagccgttgcattgttctattagattttgctttgttgaattctatgttgcatcgtcgtgtcgagtgctggtttaattttagatttaatttttagttttgagtattgcatctgttcatcacttaggtttagggttcatcactcaagtctgtctgagttgttttaggtccagtttttcatctggttggttgttgccaggaccttgaaaaattgaatcgtctcgtcgttgggtttccgttttcgtagtttccaaaaaattttatcgagcggttagagagttgatttattgctattgcttctgtgttgccgtgcttttggcgcgcagaggggaaaggagggtttatgtgttgccgtgcttgtgggcgcgcaccgaaaaagctattgggcgatcagtcgcgtgcacccctccccgcgcgactggacacatgtcgcgcgcggagaggggcggcggacgcgccgcgcgagaggagggagtagtgagtttttctcgtttcttttcggtttggtttttctttttttttccggtttctcttctgttcggttcttttccctgttttttcaaagatgcatgaatataaagtttgtattcgtatgtatgcaaagtttgtattcgtacatatgcaaagtttgtatacgcgtatgcgaagtttgtataagtgatgtattttctagtttttattgtatttttttaatacatacgtatataaagtttgtatacatcgtatacaaagtttgtacacatcgtatacaaagtttgtatatgtatatatttttttatacataaaaaatatatacatataaatatatatatattatagtagtaatactagtggtagtataatgacaatagtagtagtaatagtagtgtagtagtactactagtagttctgttgtagtactagtactgaactatactagtagtactgatcggctgatcgcgcgtctggagggccgcgcgactagtcgcgtattagggcccctcgggcgcgcacgagtatcagatctattaaatatctcctagaaaatagcatatacagggagagggagagatatatagagttgtggataagggtggaaccaattttgtttggctttttggtctgttcggtcgagtcatccataccgtgactgagttcctctagcacctctctccgtattttcctcaatcaagtattgttacactgaaattcctttagccaatttgagatatttttataaaaacggaacctacatgatatgagcaatccatttttgaggtgacccaattttagttttgcactttgcatttgagtccctataatattcatatttacatttgagtccttgtttgaagtcagtggttcagttcttgttaaaaaaaagtaaaaaaaataaaaaaagaaagaaaaggcagaaaggtgcaaagaaaaggcagaaagccgcacaaaaaaaagggcagaaaggtgcttaaaaaagccgtacctagaaagaaaaaaaaaaatcatcctttgagtatgttttcagagtgcagagttgtgcattgattcatatctagtcattagttttgtcgggtgcttgcttgagctagagttgagtctagactaggccagcacattgactagtactttgaactattattcaactttgcattttctgattagtacaattgcgttcctttgctactatatattgtgcctcccaagctacacatatatacttctggtcagcaccgctgatccttgcaatcgccacatcacgtccttcaaggtgtcacgaactagccaccggttgtaccgtccttagcattgctggtaagacacttgtaagagcttggtaaggtgctccgtttggctgagttgttaaggggcaccactacaccgcgtagcagattattagggataaccttcattgtttgttgttgtttttgtattcttaatgacaggtatgagtcgcgctcaaaatcagcgataccaacaaggtggacgtgatgacagtactttggtgcaacaagtactaagttctcaaatggagaaagcggagcaatggcagtaccacgaattatttgaaacaaagtttgtggttaaggatagagcatgtcgtactataatcgatagtgagagttgtaataactttgtgagtttagatttggttgagaaacttgaattgcctacacaaccgcatcctcatccatattacatcaaatggttcaactcttgtggtaaggtcaaggtaaatagagttgtgagaataaactttttgattggaaattaccatgatactgccaattttgatcttgtccctatgcaagaatgttctttgttgtttggtcaaccatggctatatgataataatggttcgcataattttgttgctaatacatacacatttagacaaaatggtcgaaaaatgaaattggtacccatgagttttactgaaattttcgaagataatcttgaaaggatgaagaatggaatcaaggaaattttcaaagatagtattgaaaggacgaaaaatagaatcgatgtgattttcagagataccaggaaagatactattgtgatgccttcaactaagtctgagttattacaaaacgaacgtaatgttgtgcctattgttttggatactaatattttacaggcatctgagaataaccaaggtaataatgacaaagagaagaaagacgaagaggaaaaagtcctatctatagctccatgcatgtttgaagaatgttcaattgaacaagcgcctataatttctgcagatgagaaaaaaggtaatgataacggtgctacagctactcaaggtatgcatatttatgaggtgccaactatgtctactacttacgctacattagagcaacccatggtggaaacaattgctgaaatacctttgtcacaaaacaatttgcttgatgtttctcgtgacaaagaagagttgtgcgatgcttcacttatatccatgccacaactagtgaatgaacatgctagttctatagtagagccaccaagtgttgagtttaaacatgttattcacattgctagcgagaatgaagaaattaaattgctatcttctttaaatacttggggttatattcaatttgatgatatttgtccactcaactgcttaaagaagaaattatttgctagatttgaattgccatgcccttctgatgtgatttttcatattattggcaattatgaaagtaaaggagaatataatgtgcatcgagtatatatttgttcgaatttgactatacctccttttcatgatgaaatgtattgtctagaggaccgcatgcatataagtaattctctatctagttcctctagttgtttaaatgagttacaagttggtttgcaagaggagtgttgaggttttcgactacaaagattttaggatccaatcatatgtccatcaagaaatgttccgcacaggatgttgtgatagacaaagataagtacaatacactccatgacaaggtgaaaccgaggacggtttccaatcaagaaagggaggatgataagaacataactagctcggatataaccataataactaccttatgtattaattaaataaatgttcatatgttctacattagatttacttgttatatatttatttgaacaaacgttgctacacaatgagttttgtgtgttttcgtttgcagaagtacttgcttgggcgaaggaaaagagaccgagcgtacctaatgcatggataattaaagaagttgattggggaccaaaccaagaccttctccaagtctacttctacctcaccacaacacttttggcccatagaagacgagataaaattctacatgttttggattcggattcgggcctcctaatagcatcaacttcgaacggacctagctgttgatctagaaggaatttcggggcccatgagtacttgttacaaagcttatggagtctaatttcatatggttttggtcccatgtcaaaattcctaccgagctaccgggaatctgcaaaacaagccacgtatctcatccagtccgaatctgatttgggttttgggccttgtaattgtgtcgtgggcttagctcaagggggtgtgcgccctagggaaccctaggacgtccctaatcttttttattcagtagccgtcatcgtttagagtcgggttttgcttagattaatctgtcaagaacagtttcgccgctagatcggtttgtggaaccccaaattcgtgtgcttaatcattcatatgcaatttggttgcaatctatcttgttcttgcttgtgttcttcgatttgcatgcaaggattagccatctcggcgaggtcaatcgggtttcggcacggttgataaccagaggagacgtggtgctgcgattgggaggctcagtagcgtgttcgttcagaagccggatcgagttgtgtggtgactccgcccaaatcgactgtttatcagtacctatcgaaagatcgggacctaacattccctcatcattgattgcaccagaaaaatacatggatgcgtactggagtgctacgtggtcaccttgctatgccagttgtgaggtacactctacagacacattgctcgttccacaaaataattcttcaagtgccatcaacactcatgtcaatgttgctagatatgctttaaatcaatgttcaagatctttaaattatgagaataacaagtcacagcctatgcaaaataattcacatgctttaaattttaataatggtagcaataaacaatatgtaggcgcaccttttaattcatcggcgattatttcggaacctattactacacaacaaaatttgccgatgaaagatatgtatggctatggcggtatttataattcagttgattctattagatcattgcatgccatgccaagtatcggtcagtcacatgttatatctcagtcttatgggtcgcactacataatatctagtggaaataattcggcttcatatactagtagcgattatagccgaattaatagtcgttccactagtagttccatcttcaaaatgtcaatcaaatagtactatgtatattttcaaacacgcacagagttcaaatgttgtaaattcggctagggggcaaactgaaatacgaactggcaatattgatcataagcacactttcgatcccgacaatagcattgtcacattagatgatttatctgaggatcaacgacgcgagttagagtgggagctcaaggtagaaagcgtggagctaagaaaacagaaacttgcacgccttctaaagaaaaggaaaagcgtcatggaaaaacaacaaaagccgataaatttagaattatcgtctaacaaagacgaggtagttgtgcttgatttctctagagacataggagtttttgttttgccagatgaacttcgtgccaagaaagttgatgagcatcaagtcgatggagcacgataccttgagaacacagaggagatgttggagggccattagaggatgaacgaggacattgttcatgtgaagaaatcaccacgcttctccaacacatcagatcaggtaaagtctgcaggtaatgcgattatttcccaatttgatcatttatctaaaaataatatttgcactagtaatatcatcatgaaataactcaaagggatcgattggggaggttaattttcttattggtaatagtaaagtgtttaaattttccatatcatcattgccaaagtttatgtctacatggtttgcttatcatcaatctagagatagagacacaaaactaaaattggaaaatattaatgaggctgatgctactatagtggataattctaaccgtgtagtcgaatgggtagatggcaaatctgaaccattcgtttgcttagctttaaaaccatctgcacaaaagtgtcggctagaggagaagaagtatacttttgacttaaccatgtgtgatcatatttttgatgcattgttgaaaaataattatattaaattacttgatcaccatgtcatgccatcacttcaggatctaaaagaacgaatttattgcaaatggcataattcgtttgatcattgtactactgactataacacttttcgtcagaagatacaatcggctattaatgaaggccgattgaattttgcaactctaggaatgtcacatgccaaggatgaccgttttggtaaaacaaatcggtctaggtggtctaataagaagtggtcttcggcgcaggtgggaggtagttcaataaggagcaaatatgggtgccgaagtctagaggtcaagaaaagggcttagctactagtgcacgtgtgggtgtacaaaaggcttcagttcagaaaaatgttattgaacctagggggcatgcacgtgtacaacaactagaaaatttacaccatgtgagtatgaagcgagaggcatcttcggcagagttagtaacaagtcaaaatctgctgaagagctcggggggcaatggcaatcaaccgagacactcacagagcttgtcaaattggcagaagaagcagctagaaaagctaagtgtagagaatgtgaagaagagaggtatggcatggattcctaaaggaagtgttcaggtgcataatgaaacagatgttaaagttgaagtagggtgtaacagccctaggttcataaccaggtatttagaagtgcttttgttgtcctttacatttcatatttactatattgcaatttgatcataggcgatgacaaagttaactctaatcggtaaaattgaaaccacttctatttgaacaataacttgaacagaagtgtacatttataataatttattcaaatactagtttatttatcaccaaaaaatataaattttgtggaatttttacttctgtttagtcctcctaaaaattcaaaccaactttcagcctaaccaatttcatcttttcaccagaattaaaatattttgaatttttgagtgaaactttgaaaaatggaacctagaaaccaacacctgtcaccacaccaaatcccttaatttttgaactagttttacctagtcaaattgaatttaccaagagagggaaagaaaataaatcctggaaattacaagaacgaatctatactcagtttttcacccacctctctcaccctcatagacagccacgacttgggcccacttgtcactgaccttgggtgcctctatagccccacaacacatccatgggcgtgctcccacctcaggacttaagggggggggggggcagagaaaacccctttcatcttcactgcttgttctatcttttcttcatcaagctgagctctcatctcactcctcctccccaaatcacatccaatagcccaagatcaattcctgcatgtttgaccacaacaattcccatcatccaagctttccatccatcccaacatcttgcacatgcatggagagttgagagagatcgagaaggaataaaagagtgctggtttcagcctacagggctgcagcagcagcattttgttttcctccatttggtgagcttccttttcatccatggtgcctcttttgaattccctccatgttgaacatccatagcaacgttctataggttgtccactccattgctgcagctagaaggtggctgcaactcaccccgagttcatctcttttgatttcggttgaagcagccctaggcaacgtctcttgccgtcagcccaagaccttgctccatctcttgccatcagcccaaggccttagcctcgcacaaccctacgtccaggttgctgccatgtgagtgaagtccggtggaagttggagaaaaggggagtgaaaatagaaatcgatttctgagatagctattgagctgaaagaggtgtgcgctttaaaaattcataactaattcatatgaactccgaattcagtgaaccaaatttctgtggattaagaaaaacgtgatcttcaacgttgtaaaataaaaatgaccaacttttgtactggttttcccagtaaaaatataaatagctatatgtatcccttgtgtggtatagctcttaataaattcgtaagaaattattggtaaaagctaaatttgtgaaaccaattttgttgagcttatattttagtactctttgctgttgtggtgttgtttttggcaaaactacctcttaaatcttgtttaggagttgtttagcattcccatgattttaacttgtaaaatccataaataaataatggcaacatatatagctatgaaataatttttcttaggacatgtgaaagatgtactttactctaaaaataatcattattatgaaaacttggtttgagttataggttgcttgcaatgctgtaaaggaaacattaatatttacagaaatgccattttcagcacctgagagcttgtcattttcatatctcccaaaccataagtgataatccggtgattctttcacctaaattcaagttaaaatatgatctacccactgtatttatttcataatttattgatcattttgcatgtacatgtttatttggctcttattcgcatattgcttcttttcgatagatttggagattccggagagtaatgagccatatccagaggaggatagtgacttccctcagcagcaaggcaagcacctaagcatatagaacctatgctttctctaaaaatgatttggttgcaatctatacatatatatatgtgcatgcattgcctagatattaatattgtcggtttatggtgtatgggaagaaactatttatgcatttagttcttgtaatattgatgtccttataacctattaccactggatgggattacttgggatatcttattcattaatgcttagccatgcttagtgctaatagaactatagggatggacattgctattaattgtggtacatagacaacttgctttattgggcataaaacttgagtacttacactaaataatggttgatgaaatatgttggacttggacgggtgatagggcgatgaaaggaggttggttttcgtctgatgcaagtagccccgtctgagtcattaaggatcgaacattttgacatctattcaagcacccttcatacttaccacatgccttatttgggaccagcttgtcctttactagttctactatcattatttataccacattggagagacgtgagagcaggtagccctttggagggcctcgggtgcctatgttggccgggggtgcctcccccgtggcccgcccgccttggtcacatcacgcacgcacgtgactgagtcgtcgggaaccccagcgtggtataggtggttggggtggggttaagaaagggcatgtaatgagcttgaatcacttgtgtaccgcacttgacagggtgtgtagcatttgatctttgttcatttcgtgtgggtccagttgtacacctctgatcagagtataacctattcgaatagccgcgtccttggttatggacattgcttgatgtgtatctcactcatgttagcatcaaatgtagattattatggatgggattatgtttgatggtggtgttggcatgttgtgccatgttggtatggactttggtggaccatggttgatgatgagagcgccgtttgggcttatttgcttatacatttcagaattatatacttgctgtccataaattaaaatgatgctagacttacttttccttgcttattttactcataattgctcaataaaattagctttatgcaaatgttgaacctagagacccaccataggctagaaagcttgcatacttctttctcccttatgtatatataattttgggtaagacttgcgagtacaatcttgtacttaacccggtgtctgcaatttcaggagaggaatccggttttgagttatgcttcttgtgtggtcagtgctctgccaagggtggtgagggcaatgagtgatctcttgcagcttggctcttgcccggttggtttgccctagtggggttgtggcaccaccgattttatcttttgcttatgaactctatttgagacttccgctgctatatttatgtgttgtatgttgggacctcggaccctattatgtgtcatgtacctcgctgcactttaaccctattatggtatttgctatgtttattaattgcttgcgatgaaagtgtgaggctagtcgcattcctagggactagctaagcatgagtaacgggttttgatcgcttgagataattggggatagcgctttggatcgagtcattggggtatgcttttggtcgccaccttcgagtggttgacgggcatatgacgtggtggactggcaagctatcttacgattatgtcttgtgcttactactcgacatttcgggtattataacagaaggttgtcaaccgcgatcatggacacattgaggacgagtggctatttatgcgtgtatggatcccacttctccaatagtatgtggtggtcgtgttggacactagatggtataatactcggggtgtccacatgggggcaaagaatgagaagggagttaggaggtgtgcaccaaatcaacagtttacatctaatcattaggttctttcgccaccatattatatatattcttcacttatgccactgatacctatgtcatggaaccaattctaaggtatgtatagttatccctcatggttttattcttatccttggatgtcatatgggtctttatatcatggggggatgttaccatatagttatgcatattgactaattactacaaatgttgatattaatttttagagaccgaaataattaagggctggagatatttttttttcttgtatttatatatattattctttagaatttatttcggtcatgttttgtgtgggttggcaaggagttggtattgttttatatttaccaagtaatattgcttatgacacatcggtccctatcagtccgtttagagtatccttgcactttagaccgagtagatgctctattattcggtttggaaagtttagtcgttgttggtgtgaggggtgtagatgctttcggtattttaatagtccaatagattaattcagcatttttcttggactgttaaatcattatttggaccggtgtttagatacattgacaggaaaaattaacaacgaaaattctttggcataataggattctagttatcaagacagtaaagtgtgtttttgataatagataaaccggctataattagcagtttggatgtaaaataatacatgcaccgactctgagttttgaggttttccaaaataaaattccttaatctttcttgatttaaaataaaataaaatggaattaaaagcagtgtctatacgtcactgtctactattttacaaacaagtggttttcaaacaacatgtatactatatctagaaataaatattttaaaatctttcccttgaaaaattattctagaattctatttgatttgcaaaaaaaaagctttatttacagccacattgaaattacattttttttactggtatcaaatggaaaggtagtcatctctttcgtcctgtcacacttgatatatcagctagctaagcacagaagcccaggatatgatgcactagggtgaaatagattttgccataaatcaattagtcacgcaagtgaaaaaaaaaacttgagcaagacataatgcgatgactgtgtgttgttatgtttggttgcctgccacttttcttcttttatttcctattggttctttcagtaaaaagagaaaacatcagagaatgcacctactgaaaagcttgcctacccctttgaaataataccttcctaccacccagtgtgtagaccgcattcaatatgtagagtgtggtggtaccgacaggtaccggacaaactagagtaaatcacattatgtgggtaaagctgtacaaactctgcagggtctaaaactaatcgattagccgtgctcacggtcatgagcgacttggtgaaatgatacaagtatagtgttggtgatttactaaatgaattgtgaaatgggtatggtgaatattggtgatggttttacccagtgtgggctaagaatgaatttgttacctgttgccatggagggcacaaggatgatactatgatggtacttatactgctactattatggtctattctttgttttaaaaattatgtttcaatctattattatttactattgcgaaacaaaatttgctttacgctaaaaatgaggcacaaatatagccatccttgatctcagcttgcaatagtcctaggtttcccaaggtttgggtaggacttgccaatacctcgtgtattgacccacctcttgttgtttttagtctcgtttgcaggaaacgggtgttccttctgttaccggagtttctaaggatggttctttctagggtgattcctagtcagttgcctgtgtggtttggtagatgggcatactgaagaacttatgtatctttatcttttccgctgcgtttaaactcttttatttggccagtcggcctaactactatgtaagaccattgcactgctaagttatgataaccatttcatctatttatatgtcaagtatgttgtatggatatgatagcaatgttgtggatgcgtgtgctagccactgatcatgggactagtacagtgtacgctccaggtattcgggaattccatcctttgttggatgactaaatatattgccgagctataggatgagtttttttaaaatgtatcgaagtttagatgggattgtttttaatttattttaggcccaagaactgcagccaattcagttaggtggacattacggacaactgaatttgtagtatagtttagtactaaatgggaaatatttgagaaggtattatccttatttgagaaggtagaaaacttgattgtcttagaacaaatacttatttgagtatcgttttgagaggacgactgtagatgggctcaagactgataccatatgtgggagtatcgttttgagaagatgattgtggatgggcttaggactaataccgtgtgtggagtattgttctgagaggacgatcgtggtctggattgattaattctatggtgttttcggtaaagcaaaagttatacgtccttcttataccgaaaacagggggcatgtgtttgtacgataatttggcttatagttaccagattggtttagaatagatgatacaactgtcaaatgattcacttgaaaatctactcagtttacaggtgtaggaaattgtgatgcgtcggtcatatgtgctagtattgactaaatgaatatggaccgatgtagtttatagtattgttgcctgtgcaagctgattgcatatatatgcatatgtatatttggtttttatgcaggctacagaagctatacagggcgtgaccgtcacgttacgttaatcacggaggcaggtgattatccctaattgggtgattaagtggcaagggaatccttcgttgctcctgcagatggaaagtcaggtgtcgtatttactgatccaaagagtcttcatcgtcatcgagcgagccaggggctcagacgtgcggctgtgatgggagtgctgcttgcatggatgtgatggtattcgctggatccaaccatcacgtggcatctgcgttgagagcagggctgcggcgaccgagccaagccgcgtgcgatattatttatctagttagaagataaagagtttgttggatcgaattgtttcaaatattccggtaaaccatcattgcatattgcgtgggaccgagtagacatgccaaaagatcagagcaattagctatatatattggtccacggtagaatagaagggaacccaatttcaatctaatattcatctcttttactttttagttcttttctattttgtttttatggctgagttctagcaaccctagaatttggttaatctttgccgttttgcgctgaaaaacggtcgtgcttctccatgaaagcgagaaggttatcctttgctagtttgctcggaaactagtcgttcgtcgtcacgtaagtacgatattatcttctttactaatttgctcgtaaattagtcgtgtgattccacgaaagcgaattaatctcgaaatcggtttcactagccaattttgatttattgattttggcgactctgtttaatgcaccgcaaatcattaggtgatcttgtgttggcaaaaaaaaagcatcaacaaaaccttatgcaactaacaatcaagctaagtacgaagcagttctcaaggggttgcagttgcttatggaagttgaagcccacgccgtggagataatgggggattctttgttggtgatcagtcaattggcaggggaatacgaatgcaaaaatgatgcgttgatgatctacaacgagaaatgctgggaattgatgaatagttttcggctggtgattttgaagcatgtctctcgggagcagaacgttgaagcttatgacttagctcagggggcatcatgatacaagccgatggtgaaggatgttgaggtggaggtagccgcaatcatagccgatggttggaggtatgatgtttatcagtatttacagaatccatctcaatcggcttcacgaaaattgtgctataaggccttgaagtataccttattggatgatgagctgtattatcggacgattgatggagtattgtttaaatgtttgagtgccgatcaagctaaggttgtgatgggcgaagtacatgaaggtatttgtggtactcaataattggctcacaagatgaagtggttgctttggtgcacaaggtatttttggccgaacatgttagaggattgcttttaatattacaaaggatgtcaagattgccaaaatttggagcaattcagagagcaccagcatcggctatgaatcatatcatcaaactatggccgttcagaggatggggaattgatatgatcggtcagattaatccaccttcaagcaagggacataagtttatattggtggcgaccgattattttaccaaatgggtggtggcagttccattgaagaaagttgattatggggatgcaatacagtttgtcaaggagtatattatctaccgatttgggattcctcagactattacaacagatcaggggtcaatctttgtatttgatgaatttgttcagtttgccgatagcatgggtatcaagttgttgaattcttcaccatattatgcacaagctaatgggcgagctgaggcatctaacaagagcttgattaagttgatcaaaagaaagatttctgattttcctcggcaatggctcacaaggttggctgaaacattatggtcttttcggatggcttgtcacgcatcggttcaagtccctccttataagcttgtttatggacatgaggcagttttaccatgggaaactacaagcggctcaaggagagtagctttacaggatgatttaacagccgataagtattacaatcttatagaagatgaaacagaagatctagttcaatccagattgagagcccttgcaaaggtgactaaggataaggaacgagttgctcggcattataataaaaaagtggtgccaaagtctttttctgaaggggagctagtctcgaaattgatcttgccaataggaactcgagataataaattcggcaagtggtcacctaattgggaaggaccgtttcaaatatacaaaattgtgtccaaaggggcttatatgttgcaaggacttgatggtgaagtttatgaacgagcgcttaatggcaagtat

SEQ ID NO: 25817 - DNA, 4502 bp, Oryza sativa
aaagtagcaaagctaaactttaatctaaacaaaacccaagaaactctagaggggtacctaactatttaaggaggtgggaagacctctaggtcgtcctccacctggttggggcgcaccccacatgggccctacatgggccggggtcccaaaaatagttacaagcccaaaggcccatgacaggtgatgcagcagcttgtttcttcatctgcggttgaccaggatggaatttggtgatgaggctagatccgttggaaagaggactctgagagctttctatcaagcactcatgggccgaaaacggagcttgtatgcagattcggcggccgtttgaagtcagcagtgtagcacgtggccgaatcggattccagtacttggaggacttgcacttgatatcttgttgttcatccatgatgtgagcaacggatgtatccatagtagccatggtcacatcatcctccccttcttcacggaaaaccatcctcggtttttccatatggtgctcttcacatagtccattcaaaataacatgtttcatccaatcaaaaccagagaaactgaagtagtgtgattagcaataacatgtttctctaaattcgaacaaatgaaaactctatgcaccaaatatattcctctatcgttatattcgccaaagatatgaaaaatagcattagttggacatggcaaatcagagttagcaaataatttctcctccaaattattgagctcacaaaaatcatcaaattgaacataacccaaagtatttaaagaagttatcaatttacgttcctcatcatcattagcaatgtgaacaacatgcttaaaatcagcacacaaagaaacactagaaatagcattttcattcactagttgtggcatggatataagtgaagtattatcacacaactcttctttatcacaaggaacaacaagtaaatcaactcgtgacaaaggcaaatcagaagtagtttccaccaaaatttgctctagattagcatggatagtggagaaatgtgacaagggagaagcacactcaccttgagtaatatcaacaccatttaatttaccttttatgccctcttcagataatgtaggtgcaccagtcttctcttcttccttcgtgagcgatggagatggcatctcgatcatattgctcttctcctcatggtgaatgtactgagctccctgcaaaatgtcagtaataggaggcacaagcatagattgtttctcccttgggttcattaaaatattgctctcaacactgcaagcaagcatgaacaagtggcctatatgattatatgtcacgttaataagcccagcctgaatatcagaattaagccctctaaaaaatctagtcattgtgttctcattgctttcttttaaaccactataagtgatacaaattttaaagtcatgaaagtactcccgcacggttttgtcaccttgttttaaatgttctaatttctcaaggagagtatgtttataatatgaaaacacaaaattttttctcatcattgttttgcattcatcccaagtttcaaacttattgccaacaatataccaccaaaaagatgtagaaccagtacacttattactagcagccttaatcatttgagcattagagaaatcatactcatcaaattgtttgtctactgctagctcccaattaacataagcggcggaatcataattaccatcaaaaacaggcaaattagattctacccttgcaagatcattatcatgtaccttatatgcaaagcgtgaagaagacgatatatctcgttgatggtgaagaagtcgatgttgagcatgaccatctcgtttcccctttcacaatcctgccatggttagtagcaagcaagaaacatacacaaatatatgcacgctcctatcaactactaggtagtggcagctcaaatatcacacacactcaagcttttaaccaagctcttacaagttcttaccaaagcaagcggaaaggtgacatacaccgactcaaccaagcaccccaatggaggttggatgtatcgatgccttggcaaacacttgctgtacggctgcaatcaaatctgtagagctctgggtgggcttaaaatatgtagcaaaggaaagcaatggttcaaatcagagaatgcaaaattgaataatggttcaaagtcaagtaccgtgctggtcctaggctagaacgtactagagacgcgagtctagacacaaacgataccataagatagcactaggaacaactcatgcacaactctgatatatgaagttcagctcaaacataacaatattttctcttttctttctttcttctttcttttttttctttcctttccttttcttttcttttttttagggtgtagcttttctttgcttttcttttttttttgattttttttacaaaaacagattcaaggacctcaatataaggctacagggactcaaacgtaaatataaaaattacagggactcaaatgtaaaagtctaaacccaaaattaaaattatacaaaaatggaatgctgaatttatgccggttccatttttccaaacagatctcaaaaccgacaccaaacaaatattcaccaaggtgtttgacacaactcggaaccgtgaaagggagggagggagtcggactcggccaaaggggtgagtggaagtcgtctaggaggtggagtggatggcagccgaatttggtgtatgggataaaaaggaaactgatttttaaccaatccaatctactatatctttccaaaacaaacttgactacttccaaaatcagatatggtaattcaccttcctcctctcgtgcaggacacaggcacggccaaaacagaagcacggcagtcagcaaaccaaagatgcaactcaacaactgcaaaaccaaccggtaaaaacttttgcaaactacaaaaatagaatcgtggcagcgagccgattccgttttcgtaggtcctgacgacaacagatacatggaggtgacgatgactgtggtacaaaacgtgaccagaactcgaaactctaaacgaactagacgctaacaccagcaactcgactcgacgatgtaacacaaaactcaacaaagcaaaaactgataaaaacaatgcaatggcacaatatggctaggtacaggacaatttttttatatcaattttctggttatgggtagataaaactcaccgagcaacgaaagctctgataccaaatgatgaaccctgagctccactcggcactcaaggctgttgtttggcccgatcttttggtgagttgatgataactacgatttgggagaaacgttaacgacccgactacaaccgtactagacgtttttgtgttacgccttagcgatcgatacacctctccgtaggttgttgatcttgccagtgcagatcaaccttattcctgcaagcaaatcgaagaaacaagcaagaacaagataaaagcaatctgaattgcagataggaatggagcaaaaatgataagtttgaggttccgtaacgagcaaaccggtgatctaaccgatcacgggattacacggaaaagtagcgaagctaaacttttatctaaacaaaacccaagatactctagagggtacctaattatttaaggaggtgggaggacctctacgtcgtcctccacctggttggggcgcaccccacatgggccctacatgggccggggtcccaaacatagttacaagcccaaaggcccatgacaggtgatgcaacaccttatttcttcatctgctgttgactaggatggaatttggtgatgaggctggatccgttggaaagaggactccgagagctttccatcaagtactgacgggctgaaaacggagctcgtatgcagattcggtgaccgtttgaagtcagcagtgtagcacgtggccgaatcggattccagcacccttgcacttgatatcttgttgttcatccatgatgtgagcaacggatgtatccgtagtagccatggtcacatcaaagagcaagttttcaccacaagcagaaagttatatattgcatcccaaaagttatgtttgcaaatttaaagttggaattacaagatttagctcatccagacatgtattttttgatggctgatattgccctttgcttaatccgatctacttcgtctatgatttggacatcgactgcatcagtgcttaggatcacctttcgagatttggttagatcggccaagtgcttgctagatgccttcaactttgacttctgatcctcaatggcttttggcaagtctgcaagcttttgctgttcaagggcgatttgtgcattgcactgctctaactcagccaggagttctattttttgagcattaagctgatcaatgatagtttgagttgaatctggaccagcctccaattcatcgagcttggccttctcttcattcatagaaaccctgttggcctggatggttgcctcaagatctcttctttcacgccgatcggcaatcctcctttgggctttttcaagtttaagccgatgct

SEQ ID NO: 25818 - DNA, 21898 bp, Oryza sativa
ttggctcgctagatttggaaattggggttggaggacgaataggctgaaaatacaagtacaaattagcatcggttatttaaaaaactgagagaggaaagttgatgaggtttaaaaatcaatcgatgcagctggtgcttgtggcttcttggaagcaatctttttctgcaagaaaatcaaagttgagaattggtataaaggcataatagacttaagctgaagattgaaaacatgcacatactcttggtttgtatgtgggacgtactggaggtgatggcgttctttgaggagcaggtggatcggctggaggagtttgttcccttgtttcactgacatgttcagccgcttcatccacatgttttgccattgtttcacccttcaggaattctgctacatccgaatctatggctggcaattcatcggcagtggtcttttgcttcttgggtttcttctttgcagccgatggtgcagcagccgattttgctctcttttttctgccagcatcaggggctattggcacacggggcatgccatgcagcagtgttgaagtcttgggggcattgtagccgatgaccggaggagatagtccactaccattgagcagtagccctggggcatattggatctctacaccgctgttgctatgatgaggaggagaatattctgttgtctgcaagagagaatttgcacaaggtcaagattaattcatcggcttgtagttaacataattgacaaaggagaagattcttacttgagggacggcttagggaatagatctattagatacattgaagacgattggtgaagccgatgttttttccactctatccaccatcggtcaaaggatgcacttctcaacatccttagcttgatattgttgatgctgcctaggggtggtccttctatgttcagcagccgatccatcataagtggtgatgtgatttctcctctactctggatcttatgggcaaagaagtgatttctcctctactctggatcttatcggcaaagaacaagctgatcggcagttgacccatgccgaattgccttgcagcacttgtcggatgatagaactcatatgtcatttggatttttttgccttgatggatgccaataggaaggatgcaaggacgatggctgctgagaatacttctctagatttgtcatatttttcggagttgatctcatcaaaccgtaaatcgcctggtagcttacaagtgccatgtccttcgtatgcaaactaaattctagtgtttttgggaaacccatcgtaaaagttgttgaaccactctctgaagggttcagccgatagcttggatgcaatgctaaccgatgccgcttctccaaaggacctgcatcggcatgtagtgattctttctccatcatcatcgatgatcggctcaaatcttggaaatcttgtatcggctaatggtggccgattgacaaccatcctggtgtgcaagtttagccagatctgcagtaaccactagggaccccctgtgccgattgatactccagaggccatcttggttatggcagtgttcagagtttggtacagatagcctagcagatactttccaaggggaaattgtttcttgtctacatgttgccagtttgcagtaggaccacaacttggaccatgaaaaaagaacttctcaagccacatcatgaggaaagctgcatgctcccttgcaaagatcggcctagtacccatgttcttggcaacatagcctgaccaaccgcctatgcttctgattttgaactcttgggtggattggatattcaagatggtcaggttagccgatgaggtcacatctaggccagtaatcattataacatccaaaagagttggagtcatcggtccttgagagaaaaggaaggtattcatggctgtggaccagaagtaagtggcagctaccatcatggactcatcttttgccatgtctgctgcagttaaagccaaggcttgggatatgccgatttcttcccagttggttaactttctagctgacatcctgttataccaagcgggccagctcttttcggccgatggctaagatttgaaggtgttcttccataggcttagatccggttagcaaatctaaaggggattcagttggtttcaccattgatgaactctgtggggtctgggttaccaattgggccaaggaaaaactggaactcatcggttatactagggactgcgacttgatgagagagatgctacagaaggaggaaaatcgaagattgagcagaagaaaaaccaatcttgcacggaaaagaaagaggattagccgatgggtacttacctcgacattctcagaggttgatgcgctcagaggactggcggtggttgacattgtcggcgatgaggagtggaatcacattagttacaattccagaggcccaagacaggtgacgcagcaccttatttatgtgattgcggccaaacgacatggaatttggcaatgaggctgtaaagagggctccgagagctttccatcaagcacttacgggccgaaaacagtggtcgtatgcagattcggtggccgtttgaagtcagcaatgtagcaggtggccgaatcggattccagcacttggaggacttgatcttgatatctccttgttcatccatgatgtgagcaatggttgtatccatagcactactgcaaaaacggcctgtagagacgttccgtaagagacggctaagcacgtcgtccctattaaagcccatctcccactttgcctcttacgtagatacgctaattacggacaggataatagaccgtctctacaatcacattaatcagcgctaaacaatttggtaggaatttttttttgctcgttccctccaaaaagatcaatctttccaactttttacctcattcatgcggattttttttatctcccttggaactcggaagtagttacgatattatctaagagaacaaacccctctccttctcttgtaaaatctgttccaatctttccattagctccaccgtgaagacggcggcctctcgcgtatgagccccatggccgccgcctgtgccgtctgggctcagcgccgccggcgacgccagggctgcgcacctactacccacgccatcgccgcctgcgccgtccggggtgaacgccgcctgtgccgcctagcacccaccgtccacccatcgccgcctgtgccttccaggctgagcgccgctggcgccgccagagatgcatggcccccgcgtcatccgccagccacacacccatcgtttgccccacagcagcagcatcgacacgccgcagattcatcggtgattttcttcctggtattgcccaaattcctcagccatcgaatcctggcaacagtagcaatcctaattgcaatactgtttctgcacacttgcacagctgatgtttgatttgtgttctgcttacagacaaagtatttaattcttaattatctgttatagcaacccaagtatattggggaaaaaaatttaatgcacagatggtttgtttttcctgcttgcatctaattattttataatgtataggtgactggcatgtaactttgcatatttgtgcaactgtaatttggtcatcgtagaggatatttacaacagctagcagctaagggaaacatcagtataatttgtagaacttggtgagtacaatatttaattatgtgtggtcaactaattcgaatgcgtatcttccaatttataatcatgtttgtgccaaaattgattgggaacacagcatgatctgaactttttgatgctctcttggactctaggcttgtaagatgtagacctacttaatacttcagcaaacattagaatttatactttggtcaatttagtttgatcagtggaaaagataaattacctataatgtagcaatagtatattcttgtgatctcgaaatatttataatcaaataatgctccacataatatctggtactgttatttacagtaatttatatgaattggattgttgcttctctatccattatattgatagcacctaatacgatgcatagtaacttattaacaatcaacaatacatcaaacattggctctcctaacattctaattcctcgatgttattttatttatgtttttcagtaattgagtactggataaatgaatagggactggattaataagcccagaacaactgctgcatataaaacaggagtatctcaattcctagaatttgcattctctaatgtacctcaatatgcaagggttatattgttacttatgcacctgtaacattctaatctgttttttaaatatagtgcaaatggcagcaaggtcccaaagactgcaaggcttggatttttcagagaatggagtacagaatcaagaaatggtcccaaatgatcactatgttgaagaacagaacataacaaatgcagaatggcgttcaaactgctatgagtatcgtaagatatattgtttattcgcttttaaaacttgtatgcttgtggactaaatctttaaacatgacagatcctgatggccgcattaaaagacgtcgaggaccaactaaactggcaaatgttgaaaatcttccggaaggtgttaagattattgtcaaattggatcgtttcaatgcaccttgctcacaatcttctatagttcttggatcctatttaggaacacttgttaggaagccacatctagctccactgaacattcttaaatggaatgataaactttataagagaatatatcatccaaaattgatttctgaagtacaggtattgcttgtttaattcacatggtttttaaatcatatttttatggtgattcctgtataatccattcactcttttcatatgtgctagagaaagtttgcaattgatggaagagctaaggattggcttctccaccagttagatggaaaatggaggcaatacaagtcaaatctgaagaaaaagtattacaaggctaacttacccatggaacgagtattgcaaatggtaccccaaactgttaatgaatctcaatggcctacactagtttcttactggtactcagaggactctaaggtaaatatgtgttgaactttttagtgagtgaacagccatcgctttgatttatatcaactcattgatggtatatgttgtatcattagaaaatcagtgatcaaaaccaagagaatgcacaaaatattaagcatccacacaaattaggaagaaagagctttgcaagaaagaggaaagagctggtaagaagtttagcatgtatttcttcattcattattgcttctatttctcatgcacttgacatgtataatctgcaggaacatgatagagtggaggtggacagagcaaccttctttgatgaatgccataagacaaaagatggcagatatgttaatgatgctacacaagacaaaatggtatgacatattacttgtttttctttaactctttctataataaaatacactatagtaagagtacaatttttccatgtagaatgaggtatatatgaaattggctgagaaaagagtagatggccaagaactcactgaagctgattttgaacaagctatgttagaagtgtttggaaaggatcatagtggtagagttagaggcatgggtccaaccattactccaacaaactattatggtggaagatttttgaatatgtcaggaagaagtgaacaagggagtagctccagtaatgtaaatggcttcattagttttatggtatcatatcttgctgagaaatatccagaagataatttgatgtctaggctgccaccttcactttgctaggctcattccaagacaagaggtatgggcacaagattactgttttgaatgttgcaacttatatagccataagctgacaaaataacatattcatggatgtatatgtaggttgattagaaccaaggaagttagtcatcaaataatcctccattctatcctctcttcagtttgatccaaatttaaccaaggaagccagacaccaaatactactccatcgtctagtactacagcatcatctcagacttgaagtgaagaggactgatttacaatggcgactgcatcatttcgcactacttgttgcattagaattagcacttgctgctgccggaaacatatttaagttttctcgtcgggaacaatgtatggatattgctttttctttaatgctaagctactagtgttgaaaatattatcaatgtggtatgatggtaactcagtctgctgatattattgtgtttatggattttctgaatgaaatgtttggcatatgtgactaatagcgctagatgcgggtattatttgttaattagacactgtgtagagacgggtgcacccatgtctatagaaatggatattgtctctaggagagaaataagtaatatattaaccattaatagagacggttagaaccgtgcctaaacaagacataaattgtctctactatatgatagagacggaagcaaccgtggctaagatcatcaagtgtctctacatgtttaatctgaaaatttgtatttcaaatttggaatgttcgtaatttatattagagacggtcaaatttaaagtagagatggttttcggcgtgtctacaaatttgatttgaatttgtagtcatgcgtgtagcgacggtcccaaccgtatctatcgaccgtctctagacgtacacatggctatttgaaccgtctctaatcgtttgacacgggagcaatggcaacgcctatgagacgggtgctaaaaccgtctctacctataatagagacgggtatagccatctctacatcacataaaaaccgtctctaggggctgtttctgctgtagtgtagtagccatggttacatcagagataaagctctcagataggcaattgtatttattaattaggatatcttatgtaatttccttagagatatgattgggcaaaagtctgccgtaaagacttatggtaagagtcatgtccggcaaggacatattttgtatctcgggtataaatatgacacaaacccatgtaatcaatgaacacacgttcaataacactttcggcacatcgccaccctttttactttcgttttatttcgatgagttcttgctttcggattgagctgcatcgatcttcaactagaggtaaacttgtcatggcgatttgcgttctcgggattagcacttccatctttatgacactctaatcttgtttatgtaattcatcgagttatcataaataccatataatctctgttagtttcattatataacttgtcatcggttggtttttactgttagaaagtagccgacagagttaaacctcgttattaatttagattatatcatatacttatcatctcttagaggttttcatcatcttgtttagatcttacaattatctttatgcttaatgctgcattggttgagttcgatctattaagttctatctataattttgatatctagcttgttttatgattatcaatagagatagcatcggaatttcagccgatcttacttgatatcatactcttgcttgttatgctaaatctgccctttatattaagatcttgtcacattaaagttatattaagtttcttatttgatatatcttgtttgtttcaatatcttagtataaagtagtatcggagtattagccgatacatgctagatctatctgatcggctatgctataaacctctatataatctttgctttaatgtatatttcgacttaagtgatttatattgtctcgtcatggtgaccgatctatcctaatcacttagtttaagtatatatcgaagtaaagactatatgatgttaatatctacagctgatcgactagatttagttttatcttatttattcatcattgtcgatcgattcaaatatgacgtcggctccgagataaatgatatgtcatcggcaactagccgatcggctatcgtttatgaatttaaccgcagtttttcttgtcttcctttcttgttgattacaagatcaaatcaacttgcacgctcacgaacctaaagcgagattttggacctgcacaggagttaagcagatcttccaggccagtgtgtgtttttctgatcaacaggtgtctagtggggtccgtttgtgggccacttgcctcggttgacacatggggtccgcttccgtcgacccgtggaccgtctctatgtacttggtctaccgtggccctttaggttgacatgtggggtccacatgtcaacagtgcagccttcctgtctttatggttgcaaagcttaattataataatccgcaaatctccacataacagcattaaacgataatcatattttgatcatacgaactccgaatcgacccgttcaagtctcttaatgtttgttataacctaaagaaccatgtgcctttctttttatgtattgttattgcttctttataggttgtagctttgcttgtgtgctgcgcgtagcttctgtcgttccggaggttctcgaagcgtggttcgcggttgtcgccgaaggttcggaaggccgttccctctgagcaaggcaagtcgcatcatccttgagcatattgaatcccagtttataaaattatttaaatttccacgttatcactgttttatttagccatacctatttatctttgttatgaccttatcattgttgctattgttatatcaccttgttcaccctagtaaaataataccccaactagtgggtacttattcatggttccactagtaagaatttaggtagattcatggttatgggcaagcctagcaatgtacccaagtttgtggtttacttcttaaaacttgcttaacaactaaaatgtggaatggttggcctgggttggcttgggacgaactgggacccaggtcgggttgccagttcggtctgaatcatcgtaggccttgggttaaggtaagttcgtgtggtttgacggccttgaataataatactatgtaactctaggatcatttttgtaaaatagctttgggcaactaggcgacttttaaatgctgtttaccgcaaaacctagccctatattattactccttgtacccccttgcattaatcatgcatctctcggtgtgacttgctgagtactgtgattgtactcattcttgctcaatctttccccccttcaataagagaaagctttggagaggaaatcctaggtggagtcctggcttataccccaattgagcgcctgtgaagatggagccgtaggctcgctagtccactgttgtttatttctgtttgccaggccttaagtgcctttgtaataatgtaaatattattgatataataaagatgtgtcttttgtatcaagtttgtgtggtgtaccccggcttttcctgggatggggattaatacattaacattcagaaaggcatatttcccgggcatgacaatattgtatctattacatgggctaccaaatgacacacacagagagaaacgactgttgacggtcgttatcgatcagttttgactgtcaatattaccaaaatagaggagagctagtgatgcttgcaatgcatatacatgttagaataataatattccactagtattaggttcactaaccttttgcagagaataaccataaagtggaggagaatcgacatcaactcaaacgataaatcaatcggacgatgttgaggatcagacttatgcatgaatgggccaagaactcagaattgacacaatgaattgggccaaaattcacaagtctacgaagtgaagcaatgttgtaggccacctgctgaatttggatccaggtttgggctggacggcgtggatcactccccaatgacagttagagggaaattccgaacattccaactaccacaaccgtcattggcagcctatataaggacttcactctcttcacttcaacaaacacctcaagcaagagctctctcatattctctcaagtttagtttagtattctcaatctagtggaataggaatagagtccggaaatcaggagtccggaagtcttcggaagagttcagatatggctctagtagctttcctttcctcttttgtaagctttgtacttttattagaatactcttctatatacatttatggtattgaaatactttccgaatatatgaatgccaactttacattatattcatgttatactgaatatactgctagcttatctgggcgatgctttggtgcgagtatattgtaattgcttatgcaattactctatgtcatgacgatgacattagagtagtatctggtaatttagaagtggtgtctagactacgggatatcattatttggggttatatgctgcggatgagaggtgggctgctgatggtgacagctcagtacgggtattcctccgcgcgtgtatatagtcctaagttaattccctggggagggtactcctccgtatttagccccggttgtatggtcatgacgcgttgtcgtaaggaactcgacagccaggggtggcttctcgtagtaccaggagggcatcggatagagggtatgagctagtatatcggttaactagaatgtaagtatactatcaatcaatctggggtgttagtcaataccttatcaaacatgatgaagtccatagccgatggttcaaaagctgagcagcaggctgcaggcccggtttatttgcaaggaggtgtctttccaaattatcggtctttgattaccaatgttcagccatcaactcaggcggttccctctattgcacgaacatctcagccgacggcactggcgtcaactcccctacctgttccgtcagcaatggcgccaggccagccagtgaaccctcggttattaatgagagagcagccacagcatggcgggcaggttgcgaatcggctgacccaagatcatgttgctgccacgtttctgccgcctcaacctattgttgatccaatacaacagcagccgattcagcagacaccccaattcagtaggttgtgcaaccaatccagcaacaggtcatgcaatcagtttagcaaacaccaccaaggtagcagctgattcagcagacgccgttaagacaacaaatcgttcagccgatccagcaccaaggttcaataggcgcatcggccgggtttgcaacgcctggtggtcagcctgtacaacattttttaaatcaagttgtcccagaacacttggttcaccacgtacagccggatggcacagtaatacctcaagttgttcctgagcatttggtacgtaatatccagccgaaccttcataattaccaagggggtaacttgaatttccaatatcagcctgcttccccgcaagcccaatatcagccagggggattggctcaacctcagtttgcgtctcagtatggtcagtttgagcccatgcagcaacagtcacaaggggtagcttagcaacaaccgtgggccgatgtgattgctgacgtaatgagggaacagtttgggcttaaaccaaaagagattggaagcttgtattggcaaccttatcctgagtggtttgagagagttcctcttcccaatcggttcaaagttccggacttctccaaattttcgggacaagatggtgtgttaacttatgagcacattagccgattcttagctcagtgtggtgaagaatcggctatagacgctctgaaggttaggttattccggttatctttgtctggatcggcttttacttggttttcctctttgccgtacgggtcgatcaatagctggaccgatttggagaagcaattccacagctatttctacagtggggttcatgagatgaaattatccgacttgacagcgattaagcagcggcatgatgaacctgtgcacgagtatattcagagatttagggaaatgaggaacaaatgctttagcttgagtttaactgttgcccagttagccgatctggcttttcagggtatgattgctccgattagggagaaattctcgtctgaggactttgatagcttgtcacatctgatatagaaagtaaccttgcatgagcataggtccgcggaagttaggaaaaactcaaagaaggttaatcatgtttatccgtacatgtatgggtcggatgatgatgaggacttttctaaaatagctgcagccgagtgggtgaggagtaaaaaggtcataccatgccaatgggtaaaaagttctggaaaagagaagtatgactttgatattactaaacctgacaagatctttgatttgctactccgagagaagcaaattcaacttcttgctggtcatacaatcccatcggctgaggaattaggcagaaagaggtattgcaaatgacataattctgggtcccattctactaacgattgcaaggtttttagatagcagattcaggtggccattgagggaggcaagattaggtttgatgattccaaaaagccgatgaaggtcgatggtaatccttttcctattaatgtggtgcatacagctggccaaacagccgatagggcccgtgcaatgggttttcaggtgaattcggctaagattatcaacaaatatcagaagaagtatgacaagcagcaggagaaggatcatgagaaatacgatgatggttttgatcctcattggtgttgtgagttctttagattctgctggaatgaaggtatgaggttgccatctatttaaaactgccctgggtgcagtgatagcgtcgagaactcaagccgatcatataataggggcaatcggttaaggcagacaagagtttctgttcatcaaagattgggtccagtaaatcaagatcatggccaagaagacaatgtaatcaggaagaatcaatggtgtccttttggtattttcacgaagaatcagaagagaagggttcagagattgaggaacagggagcgccttcaggaggttgaacaagaaattaatcatcggctgaagaaagcaaagccaaggcaggagtggcgtgttaagaattaggttactgtagccgattatatcgcagccgatgaggcaaagaggttggcaaaagggaagagtgttgtgacggcaccggttaacatggtctttaccctgccagccgaattcgggatagaccaagccgatgtcgacgaggtggaagaggaattggctaagttggttctgtcaccagaacaggcagtgttcgagaaacccgaggggacagagaatcggcatcttaaaccattgtatataaacggctacgtcaatgggaagccgatgtctaaactgatggttgatggtggggctgcggtaaatttgatgccctatgctacgttcaggaaattaggtaaaaatgccgaggatctcgtcaagacaaacttgctcaacgattttggtggcaatccatcagaaaccaaaggtgttctaaatgtggagctgacagttggcagtaagactattcctaccacgttttttgtcatcaatgggaaaggttcttacagcttgttgcttggaagggattggattcacgccaattgttgcattccttcaactatgcatgaatgtttgattcagtggcaaggcgacaaaatagagatcgtaccagccgacaggtcagttaatgttgccagtgccgatttagctctttgggaaatggatggccttgattgtttatctggaaaagtctgggatggagattttctaaaagtgtccgattctgatatacagccaattgaagatggagaacccaagctattattttgagggcgtcgtggagggttcaaatgtctacactacggacacggtagatgatctcgatgacaagcaaggtcaaggtttcatgtcggccgatgatttggaagaagtggacataggtctaggcgatcatctaaggccgacatttattagtaggaacttatctccagagtttagaaccaagctgatagagctcttaaaagagtttagagattgcttcgcttgggagtattacgagatgcctggactcagcggatcgattgttgaacatcggctacctatcaaaccagtggttaggccacttcaacaacctccgaggagatgcaaggccgacatgcttgaaccggtcaaggctgagattaaaagattgtatgatgctggttttattcgtccttgccaatatgctgagtaggtttctagtatagttcatgttatcaagaaaaacgacaaggtcagggtatgcattgatttccgaaatttgaataaggccaccccgaaagatgaatacccaatgccagtagccgatcaactagttgatgctgcttcgggacataagattttgagttttatggacagaaacgcatgatacaatcaaatttttatggccgaagaagacattcataagacagcttttaggtgtcctggtacaatcggcttatttgaatgggttgtcatgactttcggcttgaagagtgctggagctacatatcaaagagccatgaattacatatgtcacgatctaatcggctggttggttgaagtcgacattgatgatgtggttgttaagtctagagaaacaaaggaccatatagctgatttgaggaaggttttcgagagaaccagaaaatatggcctgaagatgaatccgacaaaatgtgcttttggtgtatcggctggccagtttttgggatttcttgttcatgagagggggatcgaggtaactcaaaggagtgttaatgcgatcaagaagattcagcctccagagaataagacagagttacaagagatgatcggcaagataaattgtgttagaaggtttatttctaatttgtctggaaggttagaaccttttacaccattgttgagattgaaagccgatcagcagtttacttagggggcagagtagcaaaaggctttggataatattaaggaatatcttagctctcctcttgttttgattcctccacagaaaggaatactgtttaggttatatttatcggccagtgagaagtcaatcggctcggttttgatttacgagttggaagggaaggaacgagttgtattctatctcagtcgtcggctcttggatgctgaaactagatattcccctgtggagaagttatgcttgtgtctgtatttttcgtgtacaaggttgaggcattatctactgtccaacgagtgtactgttatatgtaaggccgacgttgtcaagtacatgctatcggctccaatatttaaaggaagggttggaaagtggatattttccttaaccgagtttgatcttcggtatgagtcgccgaagttgattaagggacaagctatagctgattttattgtggaacatcgtgatgattcaatcggctcggttgaaatagtgccatggactttattctttgatggatcggtgtgtactcatggttgtggtatcagcgtagttataatttcccctaggggggcatgtttctagtttgcttatactattaaaccgtatgcgactaataatcaagctgagtatgaggcagtgctcaaagggttgcaattactcaaggaagttgaagccgataccattgaaatcatgggggattctttgctagtaatcagtcaattggcaggagagtatgaatgcaagaatgatacattgatggtttataatgagaagtgccaagaactaatgaaggagtttcggctggttactttaaagcatgtcactcgagaataaaatattgaagctaatgatttggcccaaggggcatcgggatataagccgatgatcaaagatgttaaggttgaaattgcagcaatgacagccgttgattggaggtatgatgtgcatcagtatttgcataatccgtctcaatcggcttctaggaaattgcgatataaggcattaaagtatactctgttggatgatgagctttattatcggatgattgatggagtgttacttaagtgtttgggtgccgatcaggctaaagttgcaatcagtgaagttcatgaaggaatttgtggtactcattaatcggctcataagatgaagtggttactttggcgtgcagggtatttttggccgacaatgctggaggattgtttcagatattatagggggtgtcaagattgtcagaagtttggggcaattcagcgagctccggcatcgactatgaatcctattattaagccatgaccattccgaggttggggaattgatatgatcggtatgataaacccaccatcgagtaaaggacataagtttatattggtggcgactgattatttcaccaagtgggtggaggcgattcctttgaagaaagttgattctggggatgcaattcaattcgttcaagaacatataatatatcgatttggtattcctcaaactattacaactgatcaggggtcattctttgtatctgacgagtttgttcagtttgtcgatagcatgggtatcaaattattgaattcttcacctaattatgcacaagctaatgggcaagccgaggcgtctaataaaagtttgatcaaattgattaagcggaaaatatctgattatcctcggcaatgccatactcagttggccgaagcgttgtagtgttataggatggcttgtcatggatcgatccaagtccctccttacaaacttgtttatgggcatgaagctggtttgccatgggaggttagaatcggctctcgaagaacagaattacaaaacgatttaacagctaatgagtattacaaccttatggccgatgagagggaggatctggttcagtcacgattgcgagcccttgcaaaggttaccaaggataaggaacgtatttctcggcattataataagaaagtggtacctaaggatttttcggaaggagaacttgtatggaaattgattttgccgattggcactcgtgatagtaaattcggcaagtggtcgccgaattgggaaggatcgttccaaatttataaggttgtgtctaagggagcatatatgttgcacgggcttgatggtgaagtctatgggcgagcgctcaatggcaagtatttgaagaaatattacccaagtatttgggttaacgcatgatcggctagtattgccgatgcatgacagccgatgtgtttgcatcaccttgagatggccgatatggttatatcgcccttagttgtttttcatggtgtaatcggttgtggtttgccgatgtacaatggccgatatggttatatcgcccttagttgtttttcatggtgtaatcggttgtggtttgccgatgtacaatggccgatatggttatattgcccttagttgtttttcatggtgtaatccgttgtggtttgccgatgtacaatggacgatattgttatatcgcccttagttgttttataattttatcaatgcttttgtcattgtaaaattaggggggcacatatatatcaaaatgcaatgcaaatttttgcaaattttttgaggcaaatttttgttggctgattacaaaaatttctgagtcctattacacaaaagttattgagacaagtatcgctggatagccaaaatagccctttgcctgatttgttctacttcttcaatagcttgggcatcttgagcatcagttccagagatgactttcagagacttggttaggtcagcaacattcttgatagccgatttgagccttgctttttgttcttcaattgattttgggagatcggctagctttttgtgttctatatctagctcggcattgcattcttcaagttgtgccaagagctcaattttgcgagcttcgagccgatcaatattggatttgatcggacttttagatagctgatcaagtttggttttttcttcatgcacaagctgccgattagcttggattgtggcctcaatctctttgcgatcacggcgttcggctagtcttagcttggctttttctagcttgaactgatgttgctcgagataagcggctggagttaggacatcggccaaatcttcgggaatcagagcttgaacttcatgcagccgcgtcctaattgacccacagtcaactaccaaactgtctaaagaagaggcttctagccgatgagagatgtcttcaagtgtttttctcacatcatcagataggggagctagggctttgcttgaagtgtcttcttctgcctcgtcaaggtaatctctgatgtcaaaagagaagagatcggctagagcctgcagagacaatttcggaaagaataagagctgagtaaattatagccgatctatttgttgagacaaagggaaacttactgggatagcaggagcagctgattgttcttcctcttcgacgtgatgactacccacaaccgatggagtctgatcacttgacgattgttgtacaggaggagaaggaggaggaggctgcgaaatagacaagtgttatatagaatcggttgagattgattaagtaaaagaattaaggacatcttactggtggagccgatttaacaattgttgctgctgtttttttcttcacagcagttttcttcttctgcaaccacaaagtctatgggtaattagccgaagagagaggtaatttcagaaaaagtcatagagaggtacttactcttataaaatgaacgggggcagaaggagttggaggcgtttgcttgggtgaagccgatggtgttctttttgtgtcacttatttcggctacagtttggtcaacatcttcaccaatttcctcttcatctaaagcttgttcaatagatggatccaagacgggcagatcatcagtcgacatatcagttggttgtggttgagttttcttgaatttggtctttttctttggagccaaggctaaggtactcatggctgatgatctggttttccttttcttgcctgcatcggctggttccctagttaggccgtgaaggtgagttgaagtcttgggggcatggtaaccgatgaaagagggagatagtccacctccattcggaattagacctgaagcatattcaatgttcttgccactgttactttgatgaggaggggaggactctgttgtctgcaaaacaggagcaagaggttagtcaagtaatgaatcggctaactggttatgcaatttagtaatgacaaagtttacctggggcatgacgtcagggaatagatctgtcatatacattgaagccgattgatgaaataggtgcagcttccattcaccccaccatctgtcaaagtttttgcttctaaatcctgccaactcaatattatcaacgctgcccagagggggtcctggtaggtttagtagccgatccatcattagagtggaattgatttgtcctcggcactgaatctagtcggcaaagaataagccgattgggagttggcccaatccaagttgtctggccgagctcattgggtgataaaactcgtaggagacttgcatgtttcttccttggtgaatgccgacggggaggatgcatgggctgattgcagctataagaatttctctggatttttggaatttttcatggttaatgtcttcaaatctaaagtctgatggaagttcaaggtctgctgagtcttcgtagggaaaccagattcgtgcatctttcttaaaaccttcgtagaagctgcagaaccagtgtcacgaccggaaataacccaacgggcgttccttacgtgcgtgcattaatccttgtcccaggaggcaaggtacaccaaaagttgatacaattcagagtttaacaagcggaagcgtaaatagttaatttattacatgggcagcgaaggcccagcacacacagagacaaacgagaaactgcggaagactagggcgacgaccacaggcacttgacggaaggcacgagctagacaccgaagccttcatcctccaggaactcctcttctggggttggggaaaattgagcaagactgagtacaaccaccgtactcaacaagacacacccacaaatgcagaataaatgcaagggagtacaagggagttatactataaagggttagggttgcagtaaacagcatttaaagacatttagttgctcagggctattttgcaaacacgaatctaatactatacaatattatttatcaaggccgtgaacccacacgaacctgccttaacccaaggcctacgatgattcagaccgaactggcaacccgaccctgggtcccagctcgtcccaagccaacccaggccaaccattccacattttagttctttagcaggttttaagaattaaaacactaacttgggtacattgctcggcttgcccataaccgagggcgcggctattcgaataggttgtactctgatcagaggtgtacatctttacccacaagacacatcttcctcacgtgtaaccacgtgccacataccaccacgatatacagacggaagacgtgacatagtttccaacccatcctagccatagacaagagtaccgacccaatcccacctacggccggaacccccgggacaggcaggtaggactgagcccctagcagcaggacaccggccctgtgccatgacatctcgactaccgggccgcagctcgtgtagccttcatttgccctggagaatgtccatcgacccccgacttcatccatctccatccgtgtacttttgtttataaccagactgagccacaaactaagccttacccactagacatgtggaagtacggtagtgctttgcaacagaggcccgaagaccggtccttatatggccgaggtgctactatcaaaaccatgcaccccgagcccagcctaaaaccatttttggggattttgaatagagggggcggtgtgaatccaattccacaataaccaaatcattccatggtgtccaggtgatatgaatattcccaaagtctagagttgtaaaaccacctaatgttacctaattaaaaagcgaagcatctacctataatcatactagtggtaccatgagtagagtgtccactagttggggttttgtttaatctagggtgaacaaggaaataataacaatagcaataataataaggtcataacaaaggtaaataggcatggctaaataaaacagtgataacgcgggaatttaaatagagcgataatgcaataatttaaatcaacataattttacaaactgggattcaatatgttcaaagatgatgtgacttgccttgctcgctttcccaaacgtcggcttcaacttccacgaagagcggatcttccgaagctgcagcgtctacacgaccaacggaaaagaaacggcttttactctactaaactccatataacaagcagaaacaaagcacaaaaatgggttcttgacttcttaaggagaaattagagacttgaacggtccaattccgagttcaaatggtcaagttatggccatttgaaggttatatgctctttaaatgaatatttgcgaatttcttcatttaaattttaatttaaaatcggatttattgcatcagccgaggggaggggcgcgcggaccgggtccacgggagtggggcccacgcggcagcctcacggtccacggtggaccgggtgcacgcggcttacgccggccggcgccgtgggtcccacgcgtcagccgcacacgagggcgcggcggctgactgccgggccccacatggcaaccgcggggcgcgctccgaagctgcctctccggcacagccgactggaggcgactcgcccgcgccccgatggtctgcggcggcgaccaccagcgcggcggagcggcgccccacagaggggaggaagggggaagtgaaacggcggtccacggctcaccccgggtcgacggcgacgacggaaacggcgaccggagcggaggaaggcggcggcgcggctcgggtcgacgaggacggcggtgttccggtgatcggcgggtgaaacggaggagtggacgaggtcggcgaggacgcggcgaagccgaaggaggcgatgccgaagcgggaggaggtccggggcgacggcggcggcgaaccggagctcggcggcgacggcggagaaagagggcgacggcccgagctcgattccgacgggga

SEQ ID NO: 25819 - DNA, 9072 bp, Oryza sativa
ccggcccaaaagggggaaggggggggcaaaggacttttagggttttttctttttataaaaccattttaactttgtttatttcttcttaattattatttgtgctctgaaaattccactaaaatttatttacgcattttaggcttttaggaaatgtacaaaaaccctccaagccttatttgacttttaaatttacacattttaattgttggaggctttcacatgaattttaattattctatgcataattttgagaatgtattttagagtcgatttgggacgcgacaaccagtccttgagtagctcagccgatagcttcgctccagcatcggttggtgtggatgcatattctccatatgacatgcatctgcgatgggtgcgctcttctccgtcatcttccacaatcagctctggcaattggaattcagcttctgtcacagagggccgattgacaaccttcatgactatcaggtttaaccaagtttgcagcagccaccatggtccacctgctccaactattgagtcgacggctattttagccgatgcattattcaacatctggtacagatagccgagaaggattttgcccaaaggaaattctttctttgattccaaggcttcggctacaaattgccagttggttgtagggccacaactggatccacagaagaggaatttttccagcaacatgagcaagaaagctacatgctctcgaggggtaaaagacccttggcccatatatgcctccacatagccagaccagccacctatgcttttggtcttgaagtcgaattggctcttggtgttcatgctcatagggttagccgatgaagttacatctaatccagtaatcatggtgatgtcgattaaagttggagtcattagcccttggttgaataagaaagcattgatggtgttggcccagaagtaggtggcggcagccatcagaggttcattcttagcagaattggctatggtgagagcgagtgcttggccgattccaatttcgtcctagtgaactttcttactagccgatacgcgttggtaccaggtggtccagctcttatcaggagtaggtttttcgagagatggccaagacttgaaggtattcttccagtgacccaggttagggtttgctagtctaaaggggatccagttagtttcaccgatgatgaaattagtggggtcgagattgtgggccaagaaaatagtggtttttgtgtgaaaggctgggaatcacgactaggctggaaaggtgctgcaaatccaaaggaattgggaagcagaaaacatgaggagaaaaggagaaatcgatttcatgcgaggaaaagggatctagctggtgaggacatacctcagggtacttgtcacgaccggaaataacccaacgggcgttccttacgtgcgtgtattattccttgtcccaggaggcaaggtacaccaaaagttgatacaatacagagtttaacaagcggaagcgtaaatagataatttattacatgggcggcgaaggcccagcacacatgaagacaaacgaaaaacagcggaagactagggcgacgaccacaggcgcttgacggcaggcacgagctagacaccaaagccttcatcttccaggaactcttcttctgggtttggaaaaaattgagcaagattgagtacaacaaccgtactcaacaagacacacccacaagtgcataataaatgcaagggagtacaagggggttataatataaggggttagggtttgcagtaaacagcgttaaaacacacttagttgctcaaatctattttgtaaaaacgatcctagagctctacaagattattaatcaaggccgtgaacccacacgaacctgccttaacccaaggcctacgatgattcagaccgaactggcaacccgaccctgggtcccagctcgtcccaagccaacccaggccaaccattccacattttagttgttaagcaggttttaagaattaaaactctaacttgggtacattgctaggcttgcccataaccgagggcgcgactattcgaataggttatactctgatcagaggtgtacatctttacccacaagacacatcttccccacgtgtaaccacgtgccacataccaccacggtatacggacggaagacgtgacatagtttccaacccatcctagccatagacaagagtaccgacccaacctgatgcgaacccgctagggtttgtggcccgatctttcgatgagaggtaagggataactcgattagatgaagtcgacgttcacggcccgactacaactgtccaaagacgctgcgccttagcaaccgatacaccgtctccaatggtcgccgcgaacttgtggtgcgcgtcaacccggccacgagggcactcgtcctgcaagcaatcgaagaacaagcaagaacaagtaggacaagcactgagattgctagataaagatgaaggtttcactatcaaacacaatatggtggggttccgattacaggcagacgggcggtttagccaacacgcgcgctgcgagccggtagcaagaagctatctctatcatcaaaacccgcctgttcttggcggcgactagaggtataaaaagaggggaagaacgaccatagggtcgtgctccaaccctaggacgcgcccctaatgggcccaacatggatacacagcccattgggccaaaagaggtgacgcagcaccatggacaaaaaatagtcgggagtaaaatgacaattgcggccgctccagaacagatatggacatgtggctggatccatttgaaagtagacttgataaactttccatgaagtacttgcacgcccaaatcggagttcgcatgaagtcgtggcggccgtcagaagttggcgctgccctgcagtccgaatccaccccgcgcgaatcctcttccctttggatcctctccatcgttcctgagtaaaacacgagtgcacgcgtctccgaggtataaagacgaggaatatgaactcaagaaagaactcacctgataatttagttgacgtgcacgagcgcgggtaataggaccatcatgctgtatatggggggacgtggatgtatcgatggtgttgatgtcctcatcatcctccccttcttgcatttgagtcgtcctcgactcaagctcatcttcttctcccaaatacggcttcaaatctgcaacgttaaatgtgggactaaccccgaaatctgcaggcaaatcaatcttatatgcattctcattaatctttgctaacactttaaatggtccatcagctctaggcatcaatttatactttctcaaatcaggaaatcgttcttttcgcaaatgcaaccaaaccaaatctccaggttcaaaattcaattcccttctacctttgtcaccagcaaacttatacttagcattcatgcgctctatgttttctttagttgtctcatgcagttttaacatcaactcagcacgttgcttagcatcaaaattcagtttttcagaagatggtaaaggcatcaaatcaattggagcacgaggcaacaaaccatacacaatctgaaatgggcacatttttgtagtagaatgcaaggaacgattataagcaaattcaatatgaggcaagcattcttcccacatcttgatatttttcttcaaaacagccctaagcatagtagacaaggttctattcaccacttcagtttgtccatcagtttggggataacaagtagtagaaaacaaaagtttagtccccaatttagcccacaaagttctccaaaaatggctaagaaattttgtgtcacgatcagaaacaattgtgtttggcacaccatgcaagcgaacaatttctcgaaagaacaaatcagcaatatgagaagcatcatcagttttatgacatggtatgaaatgtgccattttagaaaatcgatccacaaccacaaaaatgctatcacgccccctcttggtcctaggcaatcctaacacaaaatccattgaaatatcttcccaaggaacagtaggaacaggaagaggcatatacaaaccatgtggatgtaagcgtgacttagccttttgacatgtagcgcagcgagcaacgaacctgccaacatctcttcgcatctgtggccaaaagaaatgactagcaaggatgtcatgtgtcttcttggcaccaaaatgtcccatcaaaccgcctccaagcgcttcctgcaacaacaacaagcgaacggagctagctggaatgcatagcttgttagctctgaaaacaaacccatcattgatgacgaatttgttccatgttcttccatccttataatgcagcaacacatcattaaaatcagcatcatgcgcatattggtctttgattgtttctaggccaaaaatcttgtagtcaagttgtgtcaacaaagtgtatctcctagacaaagcatcagcaatgatgttctccttccctttcttgtgtttgataacataaggaaaagattcaataaattcaacccatttagcatgtctacggttcagcctcccctgactacgaatatgcttcaaagactcatgatcagaatgtatgacaaattccttgggccacaaataatgctgccatgtttctaaagttcgcacaagagcatacaattccttatcataagtagaataattcagaacaggcccactcaacttttcactaaaatatgcaacaggttttccttcttgtagcaaaacaccacccaatccaatcccactagcatcacattcaagttcaaaagtcttattaaaatcgggaagttggaggagaggtgcatgggtcaacttatctttcaacatgtggaaggcgttctcttgtgatgtgccccaagtgaaaggcactcccttctttgtaagcgcattcaatggtgcagcaatggtgctgaaatcctgcacaaagcggcgatagaaccccgcgagtcctagaaagctccgcacttgtgagaccgttttaggagtcggccaactctgaattgcctcaaccttggcttgatcaacctcaatcccctgcggagttacaacatagccaagaaaaggaactcgatctatgcaaaaggtgcacttctcaaggttaccaaataaacgtgcatcacgaagagcattaaaaacagcacgtaaatgattaaaatgttcacccatagacttgctgtaaatcaagatatcatcaaagtagaccaccacaaattttccaatgaaaggacgcaaaacctcattcatcaacctcatgaaagtgctgggtgcattagttaaaccaaaaggcatcactaaccactcatacaacccaaacttcgttttaaatgctgttttccattcatcacccaacttcatacgaatctggtggtaaccactacgcaaatcaactttggagaacacaatagagccactcaattcatcaagcatatcatttaacctaggaataggatgacgatatcgaatggtaatgttattaatagctctacaatcaacacacatacgccatgaaccatctttctttggtaccaaaattaccggaaccgcacatggactaagagactcgcgtacataccctttatcaagcaactcatgaacttgacgctgaatctccttggtttcctcagggttggttcggtatggcgcacggttcggtagggaagcacctgggatcaagtcgatttgatgctcaatgccgcgcaccggtggcagccccggtggcacttccttgggaaacacatcagagtactgctgcaaaatgttagcaacagcagggggcaaagaatgctgcatatcgtgaagtgaaatcaaagcatctttgcataccaaagcataggcaactgaaggtgatgcaatcaactcattaatatcagatttagtagcaagtaagaatttgggtttcaaattgattgtctcaggtttcttgccatcagatgggcttttttatcactctcacatttggatttggcagccttagcaacatcatcacgcaaaatatcttcaggagacatgggatgcaacacaattttcttatcatggtacagaaaagagtactggttggacctaccatgatgcatagaatccctatcaaattgccatggtctacctagcagaatattacatgcttgcatgggcacaacatcacattcaacaacatcatggtaatttccaattgcaaaattaatgtgcaccagttttgttaccttcgccttaccactgttgttcagccattggatgtattatggatgtgggtgcggtttggtgctaagtgcaagcttctccaccatctcgctgctagccaagttgttgcagctacctccatcaatgatcatgcggcaacaacgctctttgacgacacactttgtttggaacaacgtgtgtcgctgattttgctccgccttctccatttgtgcgctaaggacacgctgcacaatgaggctctcatagtgatccgcaaatgcagccccaatgtgctcttccggtggctcattatctgcatggtcagccgcaagcaaagcaagtgtatcatcatcgaaatcactagcagaggagtactcaccatcgtttttgactaccaaaactcgcttgctagggcagtcacgctgcacatgcccaaagcccttgcaacggtggcactgaacatctctcattcggcctgtggatgccattgaagaagcactcggtgctggctgagcggcctttgtcgctgacttgtcactagatggaggaggtgctgctcgactggttgtgggtgtggaagatggagaagcagtacggccggccggaggagtggtgcgtgtctgccatgatgaagttttacctgcagaaaaattagccttggcactagcacgtcgtccttgcacttccctttcagccttacaagcaagatgaaacaatcgggtcatattagtgtaatctttatagtctacgatgtcataaatctcgcggtttaacccacccaaaaatctagccatggcagcgtcctcagtttcctctaaattacaacgaagcaagcccatttgtaactcctgataatattcctctacacttttcgcaccctgtctcaattgttgcaatctattcagcaagtcacgtgcatagtaagaaggaacaaatctagcccgcatgacccgtttcaaagcatcccaagtttgtggcatgttattaggatttttcttgccatgttctatccaccaaaccgaagcaaaatcggtgaactcactcgtagcagctctaactctagtgttctcaggaaactcatggcatgcaaatttttggtcaacagcaatctcccaagagaggtacgcatcaggatcatattttccatcaaaaggaggaatcttaaatttaattttagaaaaagcatcatcattgttgcgtacctcgcgtcggcggtgaccacccatacctcgtcgattgttgtgtagccgtcgacgatcttgagcatctcgatcatcttgttcagtgtcagcaatatattcatcctctaaattatcctcgacgtactctccgtcaatatcatcgtcattacccccaccattgcctccagcattgagagcatcaaaatgcctcacaagagcagcaaggctagtgtcaatgcaggcgaccgctgtctccaaccctgtaagcttagtgttggtggagatctgcatggactccaattgtccaatcttctcatttgtcacctgcaaatctgtatcaagtccttctgtgtgctgcttcacttgccttgtaaagtattggatgatgcctttggtgcgtggggaatgagatgcaccctcctcatctttatcctctggacctaccatggtttagaaatgaaggacaacaaaacaatggaggatgtaatgtaagccctacacaactattgggatgtagcttttgcaagacgctcactctcacttcactcgcagcttgtctcacaagctcttaccagttcttaccttgcccacaggagcgggacagcaacaccacaagttagcaaccgtggaacgaggtgtatcggtgctgtagcaacaagacctgtcaagctgtagtcgggtttgtggtggagctgttggtgggctgaaagcaatgctcaagagaaaactagaaaccacattagccaaagcaaattgaataatcgctcaagggtatagtgtacagtgctggtcctaggctagtcgaagtagagacgcgagcctaaccacaaaggacgccacaaaacacaaacccaaacagcaacgaaaacaagaaccggtggtagaaggtggtgacaaagggggaatggtgtggtgtgctcgctggatactcctttttttttttttttttttttgcttgctctctctagtgctgaggagagaggcacaactttttttttttgatatttttttcacaaccaggagcacactagaaccaaccacagaaaatcttatctcaaacggacaaagtatgaagcttgtagaattttttttaaagttctatgcgaataggtcccgaagcttctcgccacaaaaacagaattttgcaagaggaatttggcgattttaaatttgccgaacccggcaagagaatcggatgtaacttttttttagatgtccgtggatatattataagcctaatttcgagtccgtatgaaaaagatatgactgttttaaggaaggtcactcgaatcagggttctatttcctttctagtggcggcaggatacaaggcaactaacaaaagctatcggcaacagatcaaacacaaatagaaagtgatttggtgggtgactgcgacggtggtgacggtggtgatgacggcaaaattgatgaaggtggcgatgtgcggtggtggcaagaacttgaaactctaatcgcctaacactaagaccagcaaattaacacaaccgatgcaatcgaaaactcaacaagccttaactaagcagtactagtgaaaaggcacaatggtctataggatcatggaaaaactaatctactatttttttttgttggtcttttctggactataggaaaaaaaaattaatgacgaagggaagggtaaattctctcaccgatgaaccacgctctgataccacctgatgcgaacccgctagggtttgtggcccaatctttcgatgagagg

SEQ ID NO: 25820 - DNA, 805 bp, Oryza sativa
  unsure (1)..(805): unsure at all n locations
gtcaaagcatatatccactttccaactcttcctttgagaattggagctaatagcatatatttgatcacatcggctttgcatacaacaatgcattcattggataacaaataatgccttaacttggtgcaaaagaagtataaacacaaacataatttttccactagagactaacttgtttctgtatccaatagcctatggcttaaatagaaaatagctctctccttgccctctagttcttgaatcaaaactgagccgattgacttctcatcggctgatagatataacctgaaaggcactctcttttgtggaggaattaaaactggacgagaactcaaatatgccttaatgttgtccaaagctttttgctgctccgccccccaagtgaattcctgatggnctttcaacgtttacaaaggtgtaaaaggttctaaccgtccagacaagttagatataaaccttcgaacaaaattaatcttgccgatcaacgattgtagttgcatcttatcctccggaggttgaattttcttgatggcattaatactcctttgagggacctcaattcctctctcatgaacaagaaaacatagcccccaagtnnnnnnnnnnnnnnnnnnnnacgtttacaaaggtgtaaaaggttctaaccttccagacaagttagatataaaccttcgaacaaaattaatcttgccgatcaacgattgtagttgcgtcttatcttccgaaggttgaattttcttgatggcattaatactcctttgagggacctcaattcctcttcatgaacaagaaaacacagcccccc

SEQ ID NO: 25821 - DNA, 1013 bp, Oryza sativa
tatggaatggttgcattattgtggaattgcattcacacctccccctctattcaaaatcctcaaaatgtttttaggctgggctcggggtgcatggttttgatagtagcacctcggccacataaggaccggtcttcaggcctctgttgcaaagcactaccgtacttccacatgtctagtgggtaaggtttagtttgtggctcagtctggttataaacaaaagtatacggatggagatggacgaagtcgggggtcgatggacatctctagggcaaatgaaggctacacgagctgcggcccagtagtcgagatgtcatggcacagggctggtgtcctgctgctaggggctcagtcctgcctacctgtcccggaggttccggccgtaggtggggttgtgatgaggacatcaacaccatcgatacatccacgtccccccatatacagcatgatggtcctattacccgcgctcgtgcacgtcaactaaattatcaggtgagttctttcttgagttcatattcctcgtctttatacctcggagacgcgtgcactcgtgttttactcaggaacgatggagaggatccaaagggaagaggattcgcgcggggtggattcggactgcagggcagcgccaacttctgacggccgccacgacttcatgcgaactccgatttgggcgtgtaagtacttcatggaaagcttatcaagtctactttcaaatggatccagccacatgtccatatctgttctggagcggccgcaattgtcattttactcccgactattttttgtccatggtgctgcgtcacctcttttggcccaatgggctgtgtatccatgttgggcccattaggggcgcgtcctagggttggagcacgaccctatggtcgttcttcccctctttttatacctctagtcgccgccaagaacaggcgggttttgatgatagagatagcttcttgctaccggctcgcagcgcgcgtgttggctaaaccgcccgtctgcctgtaatcggaacc

SEQ ID NO: 25822 - DNA, 850 bp, Oryza sativa
gccggaggcggtggtaggcggcggcgctagcggcgagtggcgcgggcgcgatagtaggcacgggagagagcggcgagcgcggaaaaaggaagaggggactccggggagggattttataggcgagggaggggagaacatggccgggaggtcgtggttggcgccggcgacgacgtgggggaggtggggagagagagggtgttgggggatttcaagtcccccaccacttgcgggcacgcgcgcgggggagatgcggggaaggtggaggaggtgggtggcgtgggcgcaaggtgcgggagcgagaggcggggaaggtgggcggcatgaggagcggtggtttcggtggcggttggcgccggggcgtgggcgactggaggtaggggacgacctgacaggtgggccccacctgtcagcgtcccagagaggagagtggggtgatgggccggactagtcaaggagggagagaggacgcgggaggaaggaaggttgggccgacggcccaacaaaggaaatagggaggaaaagaaaagggaaaaagggaaaggattctcctgggattaaatattgcggttgtcacgcccggaaataccctagtaatttccgaactaatttgtgcatgaaatcctcgtccaggaatcagccgaggtacacaaactgacaatttaatatacagattcatcataataataacgttacatacttacaaaagaaaagaaaactgctgcggaattacggtctagcgaagctccggctccactctcacaggcagctcaactggggtataagccaaacgtcttctcctttgcgacttgtcttcaactgagatttgattgattattgcaaggtgagcata

SEQ ID NO: 25823 - DNA, 1299 bp, Oryza sativa
tttggaaaagcgagcaaggcaaggtcccatcatccttgagcatattaaatccaagtttataaaattattttgatttaaatattgcattatcgctttacttaaatccccgcgttatcactgtttatttagccatgcctattaacctttgttatgaccttattattattgttattgatattatacccttgttcaccctagattaaacaaaaccccaactagtggacactctactcatggtaccactagtatgattttaggtagatgcttcgctggttaattaggcaacattaggtggttttacaactctagactttgggaatattctcatcacctggacaccatggaatggatggattattgtggaattggattcacacctccccctctattcaaaaccctcaaaatggttttaggctgggctcggggtgcatggttttgatagtagcacctcggccatataaggaccggtcttcgggcctctgttgcaaagcactaccgtacttccacatgtctagtgggtaaggcttagtttgtggctcagtctggttataaacaaaagtacacggatggagatggacgaagtcgggggtcgatggacatctctaggacaaatgaaggctacacgagctgcagcccggtagtcgagatgtcatggcacagggccggtgtcctcctgctaggggctcaatcctgcctacctgtcccgtgggttcctgtcacaccccgaagttctcctcccaagcctaaatttaatttacaaatgaccctaagaaaataccggtgcaaagcaagagtaaacccttttaaatcaatgcaaataataatcggaattggcatgtggaatttttcttgagttctacatgtcgaaattctctaacaggatttttagtggaattttcagagccctagaaataattttaaccaattaaaattgagcaagcaatattttaattccagggaaaatcctttttcctttttctttttctttttcctccctttttcgaatgggccgctggcccattctctcctttcctccccctcctccctgctgggccggccgcaggccgaggcccagccaggccgccccgccgccctcctctccctgggtcgccgacaggtggggcccacctgtcgggtccttccccaacctcccgccgctcccgccgcgccgccgtgcccgcaaccgtcgccgcgcccacgtctccgcctccttcgggccacgtcgaccacgcccgcgcgtgcgccgcgttccccgcgcccactcccctctctcacccgctcgcgcccgcgcccgagatg

SEQ ID NO: 25824 - DNA, 45611 bp, Oryza sativa
atcgtgctcatagtggaccaataaagtcaaacactctatgtattagacccaaatccacttatgccagaatataaaaataacccaaacatgagatacaccagaaaactgataactatttgtgaccactttaacaaagctatgaggaaggcatgccctggctctaggtggaatgaagacatcaacttgtggaggcaagtatttgtcaataatccggttttcgacaggtaagttatcttctaaaaactcgttcaaaccaataaatttaattctgtagtgcaagggtagctaactatcaaatttccttaggagtttatcgggttttgttgttcatctcttcatgtgtacatggaaaaataaagaaccacatttgtcggctattaatgtaagtcgtgataggcattgattatacatataatacattattttatatttaccaatatttaacttattataaatacatgtgcaggatagtgacgagctaaggaaacttttttttgctaaatctactgatgtaccaacaaaatgagtgtgaaagcaatattcctaacggcgcacaagattttctgaagtgtataaaaaatgcacaacattagggtagttatttaactatatggagtgatttaatttgaggtgatcatccattagaattaccgtatctagaaatgctggatgttccatattttttgcttgtgctttatttgtatgacatcatcaaattttcatagctgtcttctatctatgttgctttttataatttaataaacgccatgagattgttttatgcgccaaaaaggttgcactacacttctataatgataacatatatcttgctttcaaattaatctcaaaacaactatgacttgtagtttcttttcgatgccagattttatcccccgtgatcaacaaaattccctgtagcaacgcacgggcaccctactagttatatatgattattagaatttttaacaattttaaatcttgcatgtggtaattacatatgattattagaatttttaacaattttaaatcatgcatatgatatttatatatgcttataagagtttaaaaaaattttaaatcatgcgtttgttaactatatatgattattataatttttaacaatttaaaatctttcatatgctaattatatatgattattagaattttaatgcattataaatctagtatttgttaattatatgtcatccacataatttactacatattttaatctattttaaatgttttgtcattaattttgtgattttaaatcattttaatgcattatttactattacgttaaacccatatgtaatgaaaataaataagcactgttattatctttagtcccggttcttaaccctaaccggttcaaaaaagaacttggaaatagcgggaaaagatcttttcccggttggtggctataaccggttattaccaaccgggactaaagatcgtctctttagtcccggttggtgagaacaaccgggactaaagaaatctttagtcccggttggtgagaacaaccgggactaaagaaatctttactcctggttgtagctgttggtatttcttctttactcctggttgtagctgttggtatttcttctttactatataattcccagcaatagcactagaaataatcctggtatattacagttactgatgtgatccgcaagtacacgtatataccattgcaacatttcacccgggagtattccaaggtatcatatttattttatcccaaggaaaaatatgataagagagtactatgctaatagtttatactttacttgtatacatcaaggtctatgcacgggtaagttaagcttaagggtagagtgacagacagctgaggatttagctaactcctacatctcctaattatagctaagtggtagtagtttaaatatgttccatttctgtacttctagtatacaacatcttagtatactctaactagtatacactatgttgtataacccctttaacaatgcagcattgctaagccgtaactcagctatgccctcacgatgcatcgcaaagttaccccgggttgctgagttttttacaacaacctgacataaccctccaaccgaagtaggatacataggtgtatccaaccccagtaaattgtatgtagaaatataaacggcggggaagacgtccgtactaagctatcaccatcagcggcctgctactctcccggcgaacatacctctaaataatgatgagtgataacctaaaccctatgcttaagttactacttattactctacagccttgcaatcggtgcagagcatctgggtcctcgggccatagctctcgacctagccagagcagacttatgacccggtaatcagatattataccagcatcaatgcaaatcccagaaggtttaaccacacagattatactacttatgaataaactaagactgatactcatactctatgattggaataaagtaccaaacttgtataaagaagaatattatatttataaatggaagtcttacaaagaagaaaggaaaagctatagaacctttactgaactcctcgaggcctccgcggacttggaactattctaactctactccactaacactaatactaacattgtagagagctttgatccttgcttgagtgtgtgttgaaagtgaatgaggtgaggtccttttataggcaggtatgacggttgtagagcatggtaattgtcggaaataccccacaaccgccatcaggagttcgtccagagcgtccacaccaaaccccatcctgaacggctgtgatggggaaccatgatatggcctaaacggcccaatttttggcaggccgactccttgtttgctcctcaatccaaaacatggaattttgggcttaattgatcatgtcttttctgagttctcagcccatctatctataagtctgatcctcggcagcacctgattgatcgtttgtctattttctgtcgattctcctcatttatatgtgcttctcctgcatacatgttagtagcaaagtatatagtggaagtagatattttatttggaatttgtgcattgcaagcatagctagtcttcatactttggttaatattgatggtcgaaactggtcgataatgaccgtcaacaaggacattatggaagtcacagccgcgccacagccgccgccgccgctgccacaggccgccgccgccgccatcgataccgacgccgccacagccgccatgcccctgccgccgccctgtcgacgccgccatagccgcggccactgccgtcgcctctgctgatgccgccactgccgccgtgccactgcctctgccggcgggcaccagtgaatgaacgtgaacgaacgagaaaaagatcatgaacgaacgagaaaatgagtggaacgaacgtgaacgaacgatagaaatgttagaacgtacgtgaacgaacgagaacgacagaacgaacgagaaaatgagtggaacggacgtgaacgaacgatagaaacgacgcacacgccgccccgcaccgcggccgcgccaatgccgccgccgccaatgccgccgccgccatcacctctgccgacgctgtcatagccgccgcaccactgtcgccgcctctgccgacgcggccacagccgccgtgccacagtcgcggccactgccgctgcctatgctgacgccaccagtcgccgcgcctctgcctctgcctctgccggccgccgcccgtgaatgaacgtgaacgaacaagaaaacgaacatgaacgaacgagaaaacgagtggaacgaacgtgaacgaacgatagaaacgttagaacgtacgtgaacgaacgatggagacagaacgagaacgatagaacgaacgtgaatgaacgagaaaacaagtggaacggatgtgaacgaacaagaaaacgagtggaacggacgtgaacgaacgatagaaacgatagaacgtatgttaacgaacgaacgagaacgatagaacgaacattaccgaacgatagaacgggacacctcgttaacgaacgatttaagttacatttatattagaacaatttagactaatacatttgtttgcattttactgaaaaatacatggtcaagcactggtcgtcaccgttgctcaagcctaagtggtatcaagccctcggaggaatttgctcaggcaagtgacattaacgatcaaacgtgattcaatattgttttgaattgtaacaatcgtttgtgcccaaattaaaattgttattacattgtaataataagttgtatttaacatacacccgacataagtcaatatatgattattagagtttaaaccaattttaaatcttggacgatgtaaattgttctcgatgtattgaagatccatataatccaattgttgtgtggcatatgttaattatgtatgattattagagtttaaaacaattttaaatcatgcttatgttaattatatatgaatattataatttaaaacaattttaaatcatgcttatgttaattatatatgaatattagaattttaaacaattttaaattatgcatatgttaattatatttgattattacaatttttaacaattttgaataaagcatatggtaaatatacatgattattagagttgttattacattgtaatagtaagttgtatttatcatacacccgacataagttgtaaataacatacgcctgcaaatatttcttgtatgaacagatggctgatcgcgatgacgaacagatacaatacgacacgatcgtagagggaagcagccagtactagaacaaagaagaggggaacgaggatccgaaccagtaactaaacgaggaggggaacgaggaggaggagggtagtggaagtcaaccctccgctagacagaagagggcacgcggacaacgaggtgctgtgaagaagattgagggtcggcacatcataactgaagtggacaaagacagctgaccaagtgccccgtcagatgcagcctggaatttcgtacgacacagcggttgggttgtgagggataacatgcctgtcagcacggtgtactggcgcagaataaggacacacggggattttgaatgttttgtcccagattcagagaaagagatgctgtggaccataatgctcgagacgttcacgctccatgagggtacggaagacaaagtgaaagagtggactctgaagaaagtgactgaacagtttcagaactacaagggagacctctacaagaaatgcatcatgaaagggcagacaatgaacttcaactcattcccgaagctcagggatcattgggatgactttgttgcttacaagacagggtaacaagggcaagcgcagatcgaccgaaacaaagcaaatcccgctaagaagaagtaccatcaccacctggggtcaggcggctatagcatcacagtgccgaagtgggaggatatcgaagccggcttgattgagagaggtatcgaaccggccatctctaaatggctggaatgatcaaagcgctggtactatgctcacggtggaacgctgaaccccgctgatggctccctggtgttcagcaatcagatacgcgaggctgccaatcgactaacggaagcagtggaagcctcttctcagggcatgtttcgaccggacagagagaaggacgagcttacgctcgctctgcagactcccgaatatccaggacaaacgcgagggaaaggcgtggttccttggaagattggattcaaggaggacatccacatgtacaggagttggatgaggagcaagagagataccgaggcgaagattgcagatctcgaagatagggtatcgaactatgagctcagtatgcaagaggaggtggcaagaaaggtggatgaaagtatggccgcacagcggagccatgagccccagccgtacattcctcctgtcatggtcagcccctcaggcaatcatagcggctgcacctcaacggggtaggtaggataacagagcatcgacgcgatgcaagctcaggatgaaaccacctgcctcgtcgatgaaatcacgcaacggacgccatgtgagctacatattccctttatgaacttatcaatcaaggtatgctcgtagttttatgatttttgacatgtacattctgcaagttgctgcttaggttgattactaatagataacctctcatcacgtgaaggtggcgtcaggaatggccattccaatggacccttgagggacttacatctgcaggccgattccacctggatactcgagggtcggagttgagctagtggaagccgtgtacgaggacctcgagttggactaccttggaggagacggcgagacgcatctacgagacacaagccacgtcattatactatggcgcaagcgctacatcatatttcttgggcgacaagcggcgtctcgtgcaccatctcctccagctcctccgcctcgtgcaccgtctcttctgcctcctacaccatctcctcaggctcctgcaccgtgtccttcggcaccttccaagttaaggtcttgccaagctccaccgcttgtccgcacaagggcaacgaagaaggcgaaagttcaagaccagccgctcgccgaaaacaaagaggaccttgatgcttatgtggtaggagaagtgaagaggcaattcaagcctcggagtctagaaaagaagatacctatagacccgagtgtgaagtacttcttcaagaaaatgtccacaacaaacaaggaggtcttaaagataacggactatgagcgaacacttaagaaagcatattacaaaatgtccaaaccagtccctcagcttggagagcaaccaaaccaagagatcgagccgttggtgaccggccaagaaattggcataaaagaattcatttctgacactgtactagctagggatcaactgcttaaaggcgcaccaatcccaacggcggaaatgaaataccaatttgaactcggtaaaccgcttgtcaagcctgagcagctgaagtccctatcaacacagatgtaccgattccatgaacggtacatggaaatgagcgccaacggtaaacagatgttcggagcaagaatcagaaactcagacttcttccaaggagaagatgttctctggatcctgttcgaggatgtcttcgacctatactatctggatgcccacgatgtctctcttctaagcacatggattttgtaagtatcattgagttagatttatttcattccttaattagctccttgtatatatgtacaccataataattccttttatcgttgtagaatgttgatttaaagggcccgacggtgaggggtttactatactggattcatcgaccctcggaaagttaacatcgaaatgatcaacaagtattagcaagacacagaggacaatctcatccatctcctgacgcagcagcatttcaagatgttcatactactgtcgtacagcacagagtgagtttttactgacttttgaacaaatttcgttcccgtacatacatgtacagtttcatatatcatctcacgcaaattgcagattccattgggtccttttacttttcgacttggaggcatgcgagtcaatgtctatgactcaatgaataaagaggagtctacttttgaccaggtttttcaactgatagacaggtaatgtcatctattccactgtcattacgaattttgctattgctactatgcagatctcggataataattaatcatagcttgcaactgcatgtagggcttgggatcggttccgtcaattggtccatgggacttggaaagaaaaacttggccggaggtttaattttccagtgagtacataatctctaattaaaatataagtgtatattaaatctctcgtcgtttctcatgtagtgtgcaaagcagacccagggaactaacttgtgcggctactacgtatgcgagtatacccactgcctatcaacccaaatctacaccacaagagagctcaatgtacgtattcaaaatttcattgcgtatcgatttcttgtttattaatttcatatattcataggttattcacatgagggacaacctcatacacaaggaatttatcacgtctgttcaagaacaactgataggattcatcaacaaactagtccttttttcttctgacataacaccaacgtcgaagtcgtagctagcgagcacatcaatgaattgtaatacatgtatatatttatatatgtacacatttactttagtgtaaatatatatgttggtaatatatgcacataaactgttaagtgctttaaattatacttgggtaattcatatatgaatttatacatatacatatgcatttgactattttgtaacatcgttactgcggaaagtagttgtgttactacacattgaccgtcgagttactatgtcgttccagcgagacaggaactaaaaaatgtataaatctcaatatttagagagcaatatctctcacgttgtatattatttttctaatccgtctgcaccgtgatgttcgtaaaaaagtgcttaacaaaactagatccatcataactattttttaacgttgttactgcgagaaagcaaacgtgttactgtacaatggttgtcctgttactgcgcaattcttacgagacgaggacagtaatgaggtgggcgtggggggaaatgagtaggcgggtttgaccaacgtttgaacggcggggggcactttgactaccctttgactgaggtgggatgtaggttttgggccctaggaagggtggggaaagtggggttgacccatgggagggggtgtagaatagttattctaggggagggttgtagaatagatttgctatatatatatactagaaaaaaatacccgtgcgttgcaacgggtgaagtctattttaatcttatcattgttatatagtttagttaagaagaaatgcactgtgagttagaaatcatgagctgcagttaggagtccaatcgtctcaagttaacatgcgagtttttttaaaaaagatttcttatatgactccttctgtatttctaaaagcgaacaaacttaaaaccgatatatatatttttagaaaatcatgagctacagttaggagtcaatcgtctcaagttagcatgcgggttttttaaaaatgatttcttatacgactccttctgtattttggaaagcgagcaaacttaaaacccgacttaaatacggatctgtattttcaaaagcaaatgaacttaaaaactgactcatacacggatgatgtaccaaagtaccggtaaaaacatcttcaacttttataatagtagagatagagatagagatagagatagagatagagatagagaagagatagagatagagaagagatagagatatttgatggtttttcatcggatatattacggtggtgatggtggtgcccaacggccaaaagcggatagccatggtgaagcaaagtgacgagccaggtcccggggagattagatcaacttctggaaggcattccatgggctgatgaatagctggatgtgggaaatattcatgggccgatatggtaaagctcccgtccatatttattggatactcacgtttgcctttctttttttcgggaaggatactcacgtttacgttcgtgaaaaaaaaaattcgatggactcgtcgcggatatgaaacagaatcagatatagatgacagtacgaaaagtaggtaaaaacatctttaatttttataatagtactagaaaaaatacccgtgcgttgcaacgggaaaaaacatgagaaatttaagaaaaggttaagaaaaatttacattatgtaattaattaaaatataaaatcgtagctatacatgtatacgatgttgaagaaaagaaaggctcataaaaatcaaggtaaatgtggaaaataaaattttccaaataagctatggctggatttaatttttattaaactctccatgattaattacactatgtgaaatttttccagtattttcagagcaccattgctaattttaataatacaaacatcattctagcatttatttaaatggaaatctaaatgaaaaccctcctttctccttgggccattttgagcccattcttctttagcccatagctgagccggcccattaacctcacttctcctcccgtccaccttggcctgtaaccgcacatccgacccatcaagcaaccacaaagtctaataagcatcccttctcctcctctcactttagtgtggtcccagtgctacagggttgtccctacctccgtccgtatatacaacgcttctaccaggtccgcaacactattccgtgcattccggcccacgcggtcgtttatgcgtttcggaatagcgtgcggcacaaccgcatgctggagaagattgcctccaaggagctcaagaccaccgccaagctcttcgagctggaggacaaggtggctcgaaaggaggaggcgtgggcctggaactcccccggcaccggcgcggcggctgcagctccccccaagtccgttccccgctctaagcggcgagataggaggaggaaaaggaagtcggcccgctccgatgacgagggccacgtccttgcggccgatgggccctcacgggccccgcacaaggaaaaagccaccggcgacaagccgagctccactgctccctccggcgagggtcgatcggcagacaagtggtcctcggtgcacaacacctattggcatagcctcgctgactgctgctcggtcaaaaacttggccgagcggttccggaaagccgatgagaagcagcagagtcgacgggagggcaaagccctcgcgacccccgccaatgaccagcgagggaggccaagaagaaggcccccgccgatgacagcgaggatctggaattctagatacctcagggaaccgtcgccactctcgacaggggggcttgtgcttacacctcccgccgcggcttcaagaccatgaggcgtgagcttttggccgccgtcccaactcacgaggcggtacggaaggcgcactggttggaagtgaaactcaccttcgaccatagcgaccatccgatagtgctcgctcgggggggggggggaggggagttggccctcgtggtctcccctaccatccacaacgtcaagatgaagtatcctagtcgacgggggggccagcctcagcatcatctccccggctgcctttaacgcgctcaaagcctaggggatgaagctccagccgtcattgccgatcatcggcgtgatctcgggacacacgtggcctctaggtcatgttgagctcctggtgccctttggcgactccaccaacttccgcaccgagcggatcgacttcaacgtggcggacctcaatctgcccagggcaggcccgcgttggtgaagttcatggctgccacccactacgcctacctccagatgaagatgccgggccccagtggccccatcattgtctttggcgatgtgaaggtcgccctggcctgcgcggagcagcgcgccgacaacttggcggcagccaccgagccgcagcccccggaggcctccgtgtcccgcgcctccaagaggcgtcttgcctcggccgacgaggtgcccgtcaaggagattccccttggcgatgatccgtccaagaccgccaaaattggcggtacgttggacgccaaataggaaagcatgctcgtctccttcctacgggcgaactccgacgtcttcgtgtggaaaccgtcggatatgcccggggtccccagggaggtgatcgagcaccgccttgccgtgcggccgggtgcacgacccatccggcaccaagccccggagaggcaagccttcacccgagaggaggtgacgcggctcctggaggccggcttcatccgagaagtcatccacctagagtggccggcaaacccggtggtcatccagaaggccaacggcaagctccggatgtgcatcgactatatggaccacaacaaggcatgccttaaggatcccttccctttaccacgcatagatcagatagtcgactccactacggggtgcgaccttttggcttttttagatacctactccgggtatcattagatccgcatggctagggaagatgaggaaaaaaactgctttcattactcctgtaggcaccttttgttatacaactatgccttttggtctcaagaacgcaggtcctacttttcagcgcatgactcgcattactttgagtaatcaaatagagcgcaatgtagaggcgtatgtcgatgacctggtcgaaaagacgcgccaccaggacacgttgttgcaggacttggccgagactttcgacagttttaagtccacgcgcatgaaactgaaccccgaaaagtgtgttcggtgtgccagcgggcaaactccttggttttctagtcttctcccgaggcataaaagctaatcccgagaaaatacgcgtgatagagaggatgcgcccaccccccagcaaacttagggatgtgcagtgcgtcacgggatgcatggccgccctaagtcgattcatatcgaggctaggagagagggtgctgcccctattcaagctcctcaaacgccccgggccgtttgtgtggacggaggaagtggagcaagctctcaatcagctaaaagcttacctcactccccccatcctggtagccccggggccagaggaaccgttgctactctacttggccgcgaccccccacgcggtgagtgccgcccttatagttgagcgcgacgaaggcgacccgcgtcgcgagcccggccatgaaaagggaccaggggcccccttgattggcgatggcccctcgtcccccgacggcccggtgcctgaagccccgaacccctgggagggtcccgaggcccccgtgggaggaatagaggctctggcgggtggccccgaggcctataatcccgacatggcccgagatccccccggggctcctgagcacgggcgccccaggccagctgcccctgacaacaaggaccggccccaccgaaaggtgcagcggcccgtctgctttgtcagcgaggcacttcgagacgtgaaaacccaatacccacaggcccaaaagatgctttacgcagtcttaatggcctcaagaaaattggccactacttccaagcgcatcaggtttccgtcgtgacctcttaccctctcggccaaatcttgtacaaccgagagggtactggtcgggtcgaaaagtgggccatcgagctcgctgagttcgacctgcacttcgaaccacggcacgtggtcaaaagccaggttctagatgacttcatcgtggagtggaccccggtggacgaccctgttccgtccaatgttccctccctcctcggagatgcgcagaagctgagaagctcgcgcgtatctctaagcagtacgagctcgtagaaggagccctctaccggcgtgccgccaacgggatactcttgaagtgtatttctcgggagcagggcgtcgagctcattgctgacgctcatcatggtgagtgcggggcccattcggcctcacgcacattggttggtaaagccttccaacaaggtttttacttgccgaccgcgttgcaagatgcccaagaatgggtctggcgatgcaaggcgtgccagttccacgccaagcaaacccaccagccgccccaagccttgcaggtcatcccgctctcttggcctttcgcggtctgggggctggacatcctaggacccttcaaagcggcccgaggcgggtattagcacctgtacgtcgccatcgacaggttcaccaagtggcccgaggcttacccggtcgtcaagatcgacaagcattccgccctcaagttcatcaggggcatcacgtcccggttcggagtgcccaaccgtatcattacagataacggtacacagttcaccagtgagctatttggcgactattgcgacgacatgggcatcaagctgtgtttcgcctcgcccgcccaccccaagagcaacgaccaagtggagcgagctaacgccgaaatcctcaaaggcctcaagaccaagacgtacaacgtcctgaagaagcactgggattcgtggctcgaggaactgccgcagtgctgtgggcgaatcggaccactccgagttgcgccacaggggaaacaccctgtttcctagtgtatggcgccgaggcggtcctaccttccaagctttccctgggtttgcctcgcgtagcgctgtacgatgaggccaaccaggatgatcttcgccgcgacgatctcgactatttggaagagcgaagaaggcgcgcggccctgcgagcgacgtgctaccagcaaagcctgcggcgctaccatcagcgccacgtccgggcccggtcactgtaagtcagcgacctcgtcctacgccgcgtacagtcgcgcttggggctgagcaagctctcaccaatgtgggaagggccatacaaagtgatcggcgttcaccgagcgggctccatttggctaaccacggaggatggcacggagttgcctaacccctggaatatcgaacacctccgtcatttctatccatagggttgcgcgttttttgctttcctggagctcggccaacctccgcacatccttcggcttgtgcgggtttggccgggggctatcactattaaatatgttgtatcttttctcttccccagcaataaacttttccgcttaagcggaggccgttgagcgccctttcttactctttcctatggctcgtcctggttcaaaggataattcgcgcttactcttgaccctaagtggcgttgggtgacctgaaaaccgccgaaagggagcctaaacgcggggcgcaccctgggctgcggcgaaccctgggggctcggaagggcctacgcatggccatccccaacccccggtcgtcgtagcctcggtctggccagacccgctgggcagctccctcggggcgatggccttgcccctcgccacctaggtgccacagaccgagcgcgaatttcccttttcaccggaacgagcccggggggggggggggtataaagggggtaagaatggcaacttaatcacaagaaagtcaattgaatacgttcgctttggttttttttttctttacttgccgcagacattcaaaggacaaagcaagaacgtaaaggtgcgaaggggaagctttatttacaaacaggatggcacgatggcctaaagtttgaagcattcactgcgagcacataacaaaataaaagaaaaaaggcggggatagtcacggagtgcccgggcccccgaggccggcgccgctgaccacctcgtcctagtcctcgctgccgtcatcgccaccaccgtcctcgctcccgctctcctcatccgaggcaagcgcgaggttgaaccgaggggccgacccctcgaagctggagacgatcgcgtcggccgcctcccggacttgctcccgagcccttgcctcggtccccgggggaaagtcctcgagcgcgcgtcacgggaagaagtcggggtcgcgagcttgatggctcgcgagaaccagctccaccgcagcccgtgccaaggaagccgacgacgacttcacggcctcgccgacctcctcctccagcctctccaaatctgcagccatcccatccagccgaagtgcatggagatgcctacccggcgccccgcgcgctccagccgttcgatggcataggagagttggccaggcccaatctcgttggtgaggcggagggccgcaatctcctcggcttggtgctgcaccaggcgtcccaggtcggcgagagtgtcttgagccgcgacgagctggctgaccaactccgcgccgccgggctacccgcctgccatcaactccttctcccgagcctccagctcggaagccctcgccgccatcgctgcgcgctcagcgcgggcgctctccagatgccgggcctcgcgcccagcgatgacctcctcacgcttggtgagttgctcgcccagccaccgcgccgccacctcgcgacggttcacctcggcctcatgtacggcaagcgcggcgtcctgttcccggcacgcctcctctcgaagccacagctcctccgcgcgacgagccaccaaagctctgcggtgagggtggtccggttgtgctcagctgcggtctcctcacggaggcgaagggaggattccgcctcggtggccgttctctcgtgggtggccaaggtggtctcgcgctggtctagcatgcgtgcccgctcctccagtgcccgggtacgctcctccagcgcccgagcatgctcctccaactcccgggctcgcagcccctgttcccggctacgcccgtcctgttcgcgctggttacggtcgaggacctcgatccgtcgacggatcatggcctcgaactcctgcatggagcgggcacgctcgtctaaggccttgcgctcggcctcgagcgccgcagtccgagcccgcagcgaggcgtcgacctccgatgcccgccgctcttaggcggccgccgcgtcgaggactccacgggcgtcttcccagatcctcggcgtgggcctcgtactgcaagcggatgtcgcccagcgtctcatccaggacgcttgaagcgatgagcgccgcctggcactcctcctgtctcccgcatgaccgagtctagcgtttcctcgcgcgcctggatctccgccagttgggcttggtgcattttgcgccccacctccaccatgtcgtccatggcgcggcgcccctcgtcaacccgcgtgcggtccgccgcgagctgtgcccactccgcctccagggccgcccgctcgtccgctagggcttgaacttgggcattgagcccctcccggacggtggaatcggcggcggcgagcacctgcaggagtggctccatgctcgcgggagttggagaagaaaaagtcgcggtccgcccccgggatgacggagtgctgctagaccccccgcgatattgggggctgctctcggccccccttccgcacggccagccctgaggacgccccagatgcagaggggaacggttgcccccgtcaccccccgccttgggccctcaggaagactcggcctcccgagtagcgctcctcgtgggtcgcgccctcgggatcgccctgggggggcgcctgtaacgtcccgccttcccccaggccaccccaggccgggtccacttacatctgatagctttcataggtcatagactgccctcacagaccaacacgccttcccccaggccaccccaggccgggtccacttacatctgatagctttcataggtcatagactgccctcacagaccaacacatgtcttttctgcacactttgtcctcactcgtgtgcacccggtaagaatttcccggtcggtcacccatcccaaattgctccaggccaagcacgcttaaccctggagttctttggagattggcttccggaaaagaagttgcaacttgttgatatgagtattctattaatcctattaagccctaggccgggatgttacaccctcaccaatgttacagcgccgccgctgccatcacccgcggctggttgcacctcggctgtggcgaactcggagccagacccgccgtgtggcccgtgggccccgccagggtgctgcgaaggctccgtggcaccgggtcggccgggtcccggtcgatccggtcgcttgaattttgacccctgtgagggatcggacgccgagaccccctaggaaggaatcccgctacaggagaaccccgatcacgttaagaagaaaaagaagggggaggagcaagaggccaaggtggatagagagcaccgagtcgggcgctagcgatcctacctgcgagggggcgtttgaaggtctacttcgggggctcgatgaaactcccccggcacggctccgtttgccctatcttccggagccgcttcttcttccgtccagcctcggacgtggcggggcgtttgtggcccgctggtggatggtccgccgttcgcttagcgcgccctatgcgcgggggagaacgcggccgagattcggacacctttcgcttccctttcgggtcgcaggcccctgaggcgatccgtcactgcgtcgtactcctcgccctgcgtcatactcctcgcccagttccaaaaccgccaaccacgcggcggatcgtttgggagggccggcggggagccgaagtcgcggatgatccggcagcgcggtgtaaaaccaatccgtcttccaatcctcccacttcttgcgaaggtggctctcaatgtactgccccgccgttcctggccggggctagaagtagcatcctcccaccaccacgccttgcagtagctgtgggacgaagaaggacaggaacagccgcatcgtctgcgcaccccgacgaacatctcgcagaagtgcgcgaagatggccagcgtcatcacagcgttgggtgcgagatgctaggcatgaatttcgtagaaatccaaaacctcatggaagaacctggaaaatggcgggatcagccccaccatggcgaaggacaggaggtgcacggatcgctctgggtactgcggccgcggccgcgactcctccaccctcacgacggcgtcctctggcatgatcttgcggatgaggctaaggtgcctctctgccatgatgagcgacgccgggggcacagcgtcaccagcgtcttgggccatggtgaccggcggggaaacggcgaggagtttggtgtacggaatagcgtggagtgagagaagcgttagggcttgaggagcgagtatgcgggtgagcagtcggcgagaggaaggagacgaactctccacctccctatccttttatccccgcctcgcccgcgctcgcctccttgtttcacgcccccgcggttgccccctcgattcctgcacctgcggtttcctcctcgactctcgcacccactcatcacgccgccccactgaacccgcgccccgcgtttggtgcacctgtcagcggcacattcggcgcgggccatgcgatgttcacgggcatggttaggcgggcccgctgtcggtcccgtcgcgtgcctggcaggcgggggagtcgaggcggcgtgggtgatgattctgggcgtggtctggccgaccccccgattttcgcgccctaagcgcctccatcatcggcgcagttagtggcggtcaaatcgccgttatgggcacagttagtggcggtcaaatagccgttatgactaatgcgccagcctggccgcccggcggcaaccgtctggattcctcgtcgggcccacaactcggcacgggaagtcgtgaggcgccacgtcggactgccctcggggggccaatgtccgacgcggtgccgggggctactgtcggagatatgggcccgggggtaggcaaagtgaggggaagttaccttcccatccagtcacgtggctctacagcctggccctccccccgcgcctcgcgagtcgcagaagtagccagggggcctcggggtgccacgtcacgcccctcgggctctcgcgctgcctcccccgaggccctcgtgtcacgtcccaaaacgaccctaaaatatatcctctaaattatgcctagaataattaaaatccgtgtgaaagcctccaacaattaaaatgtgcaaagttaaaagtcaaataatgcttagaggatttttgtatatttcctaaaagcctaaaatacgtaaataaattttagtggaattttcagagcacaaataataattgttaagaaataaacaaagttaaaaaggttttataaaaagaaaaaaccctaaaaagtcccccttccctcccttgggccgacccggcccatctctcccccctctctctctcctctccccgcggcccatccggcctctccccgcgcgcgcgccgctgacgggcgcgcccgcccgccaccctcgctgacaggtggggcccacccgtcatccccttcctcccgccgcctcccccgcgccctagcgccgccgccgccgcgaatcccgccgcctcccgccgtccccgcgtgcaataaagtggggggaattactccccgtgatcccctctccctttccccccatttttccctctctctctcgcgttcaaacgggcggatttgcccccgcaaatctcgccggcgccattgatgacggccggacctcccgcgccggtttccttcccctccggccgctctctcccccttccaaccctatttaaaccctccccgcacctcctccgtccgttttcgcctctcgccgccgtcgccgccgagctctggtccgccgccgtcgtcgccccggaccgcctcccacctcggcgccgcctccttcgccttcgccacatcctcgccgacctcgtccacctctctgtttcggtcgccgaccgccgaaacaccgtcgaccccgtcgacccgagccgtgccgccgcctccctcctctctgaccgccccctccgtcgccgccgtcgccccggggtaagccgtggaccgtcgcctcctttcccccttccctcccctctctcgatcgccgctccgccgcgccggtggttgccggcggcgaccatcggggcgcgggcgcgccgcctcccaccgaccacgccggcgtggccgccctcgtgcgcgccgagtggctgccgcgtggggcccggccgtcagccgcccacgccctcgggtgcggctgacgtgtggggcccacggcgccggtcggtgcgagccgggtgcgcccggtccaccgtggaccgtgaggctgccgcatgggccccactcccgtggacccggtccgcgcgcccctctccctcggctgacgcaataaaccctttttaaattaaaatttaaatgaagaaattcgcaaatattcatttaaagagcatataaacttcaaatggccataacttggccatttgaactcggaattggaccgttcaagtctctaatttttccttaagaagtcaagaacccatttttgtgctttgttcctgctggttatatggagtttattagagtaaaagccttttcttttccgttggtcgtgtagacgctgcagcttcggaagatccgctcttcgtggaggttgaagccgacgtttgggaaagcgagcaaggaaagtcacatcattcttgagcatattgaatcccagtttataaaattattttgatttaaattattgcatgatcgctttacttaaattcccgcgttatcactgttttatttagccatgcctatttacctttgttatgaccttattattattgttattgatattattaccttgttcaccctagattaaacaaaaccccaactagtggacactctactcatggtaccactagtatgattttaggtagatgcttcgctggttaattaggcaacattaggtggttttacaactctagactttgggaatattctcatcacctggacaccatggaatggatggattattgtggaattggattcacaccttcccctctattcaaaaccctcaaaatggttttaggctgggctcggggtgcatggttttgatagtagcacctcggccatataaggaccggtcttcgggcctctgttgcaaagcactaccatacttccacatgtctagtgggtaaggcttagtttgtggctcagtctggttataaacaaaagtacacggatggagatggacgaagtcggggtcgatggacatctctaggacaaatgaaggctacacgagctgcggcccggtagtcgagatgtcatggcacagggccggtgtcctgctgctaggggctcaatcctgcctacctgtcccgggggttccggccgtaggtggggttgggtcggtactcttgtctatggctaggatgggttggaaactatgtcacgtcttccgtccgtataccgtggtggtatgtggcacatggttacatgtgaggaagatgtgtcttgtgggtaaagatgtacacctctgatcagagtataatctattcgaatagccgcgccatcggttatgggcaagccgagcaatgtacccaagttagtgtttttaattcttaaaacctgcttaacaactaaaatgtggaatggttggcctgggttagcttgggacgagctgggacccagggtcgggttgccagttcgatctgaatcatcgtaggccttgggttaaggcaggttcatgtgggttcacggccttgattaataatattatttagctctagaatcgtgtttacaaaatagctttgagcaactaagtgtcttttaatgctgtttactgcaaaccctaaccctttatattttaacccccttgtactcccttgcatttattctacacttgtgggtgtgtcttgttgagtacggtggttgtactcagtcttgctcaattttgcccaaacccagaagaggagcccctggaagatgaaggctttggtgtctagctcgtgcctgccgtcaagcgcctgtggtcgtcgtcctagtcttccgctgtttttcgttatcttcttgtgtgctgggtcttcgccgcccatgtaataaattaattaattacgcttccgcttgttaaactctgaattgtatcaacttttggtgtaccttgcctcctgggacaaggaataatgcacgcacgtaaggaacgcccgttgggttatttccggtcgtgacacctcgcccaaccgccatgtggcgggggagcgaccgggaagaagaccaagccgaaccgccatcaatgcgcgcggcgcccgaattgtccctcaccgcgtttaatgcggtaagggcagacgtgcggtgccgcccgactgacccacgtcaatcgggtgtgaccagtctgtgaccggcctgttgccggtcacgtccaattggacgggcaggcgtgcccccacgttgcctctgtatccggcagagtggaggtaggtatgtcccgtcccattggagcgttatccggagttccctccacgtgaggaggaccgctacaagtcttcactcatttaagagggaatgacagggctgtcccccgtgtcaggcggggggcggcgccgggtcccactcaaggacggactgcttgtttagattccgggcgaaggcacggatcgtggtccggtcaaagtaaagtgggtccctctcccgtgaaagagtaggtagaagcggcgcatgtggtatccccttgaactataaaaggaggaccttgcccgccgaaaaaggagaacgacactgagtaggcctgaactctaggaagcgaagagcaagagcgctctccggagtttaggaacccttgtaacattcaaccactaatcccacacacaggagtagggtattacgcttcatagcggcccgaacctatataatcttgttgcccatacgcgatttagaaaccctgagggcggatacacgatctcgagaggcgaaccctttcccccggccgaactcacaaaagggggatctcacgatctcccgctagagaggatcactcctcgacaattggacttacgaagaaattaacgctgaccaaacttattaagattgaattatatttttatcctatgaactgaagcaaattttcttaggtaatcatatagattgattacctgcctaagatctttaggtacctgaatgctatcagatgaggttcactccacctgaaccaatctatatacaattagccaaaattcagtattcagagtaggtttcacacttctggaatatttgcattaaatatttgacttacctaaattatttatgattagcaaaacttattctgagccgcttaaacatcaaatgttcaactgatgttattgttgctttatcttgattcaaattgttctatctaatgccttgtgccctttgactaaattgctctggtctttaccatttgttgatccatccaagcatgtcattagactgcgaaatagaacagtcaacctcttgattgaacaagtattatatttttctctctgatgggatgtatttaccaagttgatgataccaattttccagtagtcatttacgattttttttggctcatttgattattatttttcgatgctatatcacagaaagcactgtggaaaatacaagttctgaacatgctgacaaagcttcacctgctgatctgttgtgcatatggtattcctaccccactaataagaatcggtaaattcaatcatatcacagcataataggtgttaaaaagttaattggaagtctttctaactgcaatctggatgcttttgttactatagtctatttatatttgtcaactgatgctctactatcggtgcttcagagtataaggtgggagtgctgatataatgataagctgaaattgattgtatattgtatgttgcagactatatatcaagaaaatagtatggacatatggttaacctgccccaatttacttgccaaatttataatttgttcagcccaatcaatattttgtaagctagcctatgccatatcatggcttatagagaaggttcttaaaccggcatcaaagtcgtgcaaagcacgactgtatgtggctagttatatatggggtagattagattttgcacctataaatgtccggtgcttcttatgacgtcagaacacgcaaacgtccatgcgagacatttaaaaaaggaggtaaaacaagtatttttcgctttgttgtttgttctctcaaaaaaaaaatcttcgttgttttgcctttattctttttatccaccgacacccccaaacacctcccggagcatccggcggagcgctgggccctcaaggtcgggcacaagttagcagcagcatggtaaacaagcccttgtgagctggcgcgaaacatgcgggatatggagcctttcataacgccaagcacaagcacgccctccacatgtgcctgcccgtacatctcattctgctgttttaagcccaagtgtcatctcgattttagtattgctggccgctgctctgctcctggatccgatcgcattttgcatcgtgctcatgttttcgtcaatagcaaggaattgctgcttgtgtctgggctaggaggttactaggagatagtagatgggaaaggcaccaccattgcatgtgcggcaagtgattgtctctcaagtcttaattgagggagttttttttttttttctttagagcgcaattgagtgaggcatgctgttacagcatggattaccccaaccattgatgacgatagcatattccctatattaaaaaaaaactactagtaacatattccctatattagaaaacaaccaacttccggttatgaatgtgaaaataaactttgttcagatttacgattcatagtttaaagttcattttttagggacgaagcgggtacttgcgtgtctacatgtagaacaaaatagatgggcgaaaataaactgacaaaaaaataatgtggtacaggtacatcagacctaagattaattcccgaatgccaaactatactgatttcttggggttttttattttttgaactttttaattttaaaataatccatcctaaaacttatttcaaatttaaaacttttgcccgcatcacccagtttaacatgacaaaacaatactgtcactctacctcacagcaggtgtgccattgttactaatagttggcgtggccaaaaagattatttagaaataagttttgaagtgtttgtgtttaaaaataaaaatttaaaacgtttaagaaacagtaaaaatttgatttcttgctcctgctatcctactgcgacttattttgccacctactcctacctatatagttttatttactttatacaatgtatttagaaggaccaaaaatatgtcttctaatgtgcaggttcaagaggttggtcagcttagcttctaccataccacctgacacctaattacaccaaccttaccccttccagcttgcgcacgtactactcattagaggaggtacaaacatattttaagaagataaatgaggagagagaaaagcagcgagctatagatttatagccagctgtagcacgaactccaagacctagtgtgtatgataggtgggaccaagtattaatagtgtaatatataactattatattaataagctattagattggctatatataaattggaggtagtagttggctatactattaaacttgctcttagaagtggagaatcataatgaatcacacagcacaaaaaaatgatggtctctacttactcatttccaatttcttcagctatccttgctgtcaggcctggaacattcattatactttcctcaaatcatgctgtcggtagcagcttatcgatcactaatgttcatgtggatgatatttttgatagttaatacagcaatgcagaagccagatggacaaaaatttacaagtaaaaaataaattattttctatttccaatcgagaaatatgatctagatgacacatcatggatatctgagtttaaatccatgtggcagcataattttctacacattagacaaataaattaattcctgccttgctcatgtaatcagaagatggccaacaaattttactaaataaagaacggtgaaaccaaaaatttgtggacaaaaacagtgccccagcttgcaatatattagtggtttctattgattcaattgatcaagaacctccaagagtacaggcttgaatcggttgcaatcaagcttgacgttttgcttatccatgaaggtctgcctgatgaattcaaatccatgtttgtggaacgaaagaggatttgtgaagatctcatgatctaggggatattgatcagtaaggctgctttcatgtacaccaatgctatactgcttgtaacgcaggcccatttgttccgctgggttgccgaaatcaattcttgatatccagtctagtccaccccatggcacaatctgaatcaatgtagcgttttgtggcaagaacacacagttggtgagtccagcaccatggacacccatcatcacatcaacagagttgacaaccttgccaaaatgggagagatcagagctcacattggcctcttcaaccaccacctcgtaacctatctcctcagccatcgccactatctcgttaagattgagaaacattcttgtcctctgcctggatataatgagcagtcttggcttggctttgggaatctcaccaagcgcagttacaaaatccctaggcagtgagtaggtcctgcgcatgaacctattaaaatccaccattgagtagttatgtggagcttttgatgagtcaattgtgaactccatgtaagcatgaaggccaacaattgcatgcttgaagcaatgcacttgatcgtcattgttgaagtcaatcaaggggtacttggatagcttatcaaacaccaccttatacttccttgtccaccaaatagccatgtctgtgattaggaattgaacttcgccattgaattcgcttgcggttgtgaaaagagggacaagcacgtcggtgaagtcatggaatagatttccagtgtatccagtcagagcaaagaccactgcaggcacattgtgatacttgctacactcaggtgccactttgcttgatttcacggttatctctgtaatatggccgaggcagagctcgtcacctttacgagggtaaggcttaactttccatatctcctctctctttgaactggcaggttccatgtacatgacagaacttgcattgggatgaatcctaatgttgccccgcatctcacagacatttgctctgaagtttgagaaatcacatagtggtttcttgttccactcctcattatcagtttctgcaatagagtatcatcaatgaaagagcagaaacaaaagactgaatgaagcataatcagtctaatttaaggttcaatctagtagttaggaatctgaagtgtatgatgccattggtctaggataccaaaatagggttttgcatctatggccaaaatcactaaattcagatggtccattttcctgtcggcatttattgaaatctaaaatcctaacctggttccacattgtctcccttgtccgcgtccatctcaaattcatatttttcattcggtttgccatctgcagacaaagtagggccatcatacccaccaagaacttgtaagcaccagcttaacaagtaccaaaacagctagtactacaagtaaagtccaagaaacacaagaagaaacagcatctactaccttcttgcttgccattgtcagtgtcttcagcatcacggatggtataattggaaacagtcgggagggtcaccttgctatgctgtgtgtgcccctcttcctcgccgttcttattatcctcttcgcctccaccacctgcacatcccaccaccaaagtactcatacataaagcaagcatcaattgatggcgcccaaatctctcttgacctctcaagaccccgtgaatcaaagcatccagagacagagctagacaaggaaattattgacggattggaaggtgacggctcacctaacacctcagatgcagtggccgcctcctcgttcttgccttgctcgggctcactactgagtagcctcttctcctcctcactagtccctatcatcatatataacgaaaaggtcagtacgctaggcccaagatttgctgactgcagcaaggcggcaattagctctggagcttttcacctttggcggtggcgtcctcggcgccttcgtcttcgtccaccaccttgggatcctcggcggcggggaaggtatcggcggatctcctggagtcggcgtggatccgctggcggatcaggagcgagcgcggcgcatgatccaccgacagccggccgttcactgcgaactcaaagaaacgagtgaggcgcttggtgttaccatcgatccaaggatccaagaagaaaaagaagaagaagatgatgaagaagcggcgacggcatggcgtacggttgaagaggagggcgtcgggcttggagatgacgacgaaggtgagtgtgacgaggaagaagccgatgacgaggacgagcaggcgcagccgccgcgactcctgccggaggctccgcaccagcttggcgcgctcgacgggcttcatctccccctcctaaatctcctcgctcttcttgccggccgctccactcgaccgacctcgcgcccgccgctgactttctcctatcccgcgaggagagaccggccgagagaggcggaatggggtttgggatcagcgtggttgcgagaataagagggatagcaatctgcaatcctgggctggctggatatgtgcgtgctagcttccttcctttccttgcctctttcgtcagctttccagtattcctcttcctctgcgctctcctcccagtcccagcactagcggtctctcagtatgtgtttggcactttgggttaaaacagtgatgatgggaggtggggttttattcttgcatagtttacccgttccaaacaaacggcggcttaggctcagttttacataacttttttccaactcacctcttgcatttttagcgcacacttcccaagctatttttctaaaataaattcctataaaaaattgcttaaaaattatattaatatatttttaagttttgttagctaatacttaatttatcacatgttaatccatccgtatataggggagctccaaaataatagccttaatcagtgtgaacactctcgttgcaggagaccggaaagcagctgagaggacatccattgataaggcaagacattactacaggagtatcatgatatcatgtatgataaagtcataggtctcaaatcagtttttttcatagtgttcagtagttctaaagctgtttcagtttttgcatgtcaacccatattatttcctattttagtcctcatattttacatcaaacatcccgaaaattagaaaaagaaatataaatacaccctcccatcctcgtccggtcatccccgtcacgctttctccaaatgtcggcacgtagctctctctctccccctccgccgctctcctcctaccaccagcacaactctccctttcctcctccgccgttctcctcccaccgttggtgcaaccctccctcttcccttccaccgctctccctccaccttcctcgtcggaatgctagcgccgcctcatccttgccagatctagcccgtggttcgtcgagtctggcctcggacggcggcgatggctgcgactccactccactaagctcgccagatccaacctggggctcgccggatctggccttgggaggcagcgacgacggctcgacgacatcggtgcagcaacttgactacggcggcagaggcaatgggacctcccttcacccgcttcctctacctcgccgaattcggctgaatctcgacagtgaaggcgaggatgttataaaactggcctgaaatcaccatcaacaaccaaacgcggaagaaacgccataggagatccaaacacgatgatgacacgaggcacgatatttgttaacgaggttcagctgaagcctacatacccgggacactgattgtgggtgctcatctgcgatccagcatactacaatgtatcagagttacaatgactcacgcccggacgtcgccggcagccacaccatctcgctgtgctaagtcaccatatgcggttacaacaggttcgtccctctatttaagagagatcctatgataaagtccgactctcactctatttctaatacctattacaactccaattcctaaactgtaatcgacattgtacacatattcaacataaactctaacaaactccacgttgccctccatgctgcttgcctgaccccaaccccgatgcaccccatctccgggagccacatcgtagtgcctggtaacacctctaaccgccaagagctcgaaatctctgctacgactcctgaagaaatcctactcgatctcctccctagccgcacgccaacgagtgtcaacgtggaaaacacgcgctggcctgagagacttgctttactctagtgtaggtccaaagagatcgctttcgggttcagggtgtgccagttggtttgatcctgcaaccaacaagaaacaaagaaaacaaccaacaagaaacaaagaaaacaaagttaaatccgtaaacgataaccgatcggctgggttgccgatggcgtgtcgtttataccgggctgatgcgatacagatcataccggccatgtagtatatggagaagggataattggacgtgctctgtcggctgtagatgtcaataatatataatctatgctttgaagtactcttgaaccaagtgattaggatagatcggtcagcgcgccgagatagtataaaccacttgagtccatgaacactttaaggcagggattatatacgctcacagcatagctgacaggcaaacccaacgtgtatcggctagtaatccgataccactttataccaagatttcggtatagatcaaatatgctaaacaggaatcaatctagtgtcagggtaacctgacagactgatggcaagcttagtatatttggtccaaacgagatcttaaagtaaagggcaggcttagcatatcaagtaaacatatatgaaacgagataactaagtcaggtaagaccggctaaaaccccgatgctatctctattaacaaccatagaacatgctacttaacagatcaaactaaactgatgcaacattaagcacatggagaaacataggatctaaacaagtctaagaaagccttttcgagatggtagatatgctatataatctaatccgacacagctatctagccctatcggctattttcgatgatagagactagccgacacggtaatatagcaagatcgatctagattatatagcatatatgataactcagcggtttgtatagacagggctagagtgtcatgaagatataagcactagccccgagaacgcaagccgccgtaacaagctttacctcttcatcgaagatcaaaaccgatgcagcccaactcgaaagcaagaactcgttgaaaacaaagaaaaggaaaaaagggtggcgatgcgccgagagtgtattgaacttgatgttgtttgtttacatggtctcgggtcatatttatacccaaaatacatgatatgtctttgccagacacgactctatctctattacaactcaaaaatatgaacaagtcccttaggtggactcttaccgaaaatatctataaggaaactatgaaaatatcctaattaatagatacaattgtcttctccgagctccatccacatttggcaatacttgtgtagcacctcaacagatcctgacaacgatcccatgattgtcttgccgggattggctacattggcttctccctatcaggttcagtaccagccgatgcagacgacagccgatgcaacccatagctgatgcgggttctgtttccatgattattgatttcctccaaatccgcctcggttctgacttcggatccaatatacgatttaccaattttagccgttaacacatgctccccaagtccgcgatatttgggatgttgcggatttgatcgatcctgtttccactggtatctagggttcattttccatttcggccattaccgcacccttttaaaatagtgatcaccatcctcggatcccacttacaccgtatcgcttccgtttttaccactttcgctcattattccccacgcagcctctactgtagcaatccctaatctcttggcgatctttccagcgatcgcccctcaatcggcaaactcctccgctccgtcaactttgttcggacctatggcgatagtgcacgtggctgagatccccgaggtaagctccttgttactttttagcaattccctcagtcatctttggctctttggtgatccgattccttcttcccttctgccagcattctagggatcatcttttgattcccacctcccagaactccacatgctttttccttgggccgatgggtgatccggatcccaccgagtttatcaatgtgaaacagagaggatccctttcaagtagatcaaactagacttagctcaatggaaatcgactttcaggtcttggctgtctaggttgaaagggtacaagtcatggtacaagaggatggtggctgctaagcgatctcattgggaggaagtaggaatagcgcaatgcctggctttatctatagcaaacctgaaaaaggatgagcccctactttctgctatcggctacttctggtctgatacactgaatgctttcatcttgaggcagggacctatggctcccactttgcttgatgtgaagatgttaataggcctagacatcctttcatccattaatccttttgacgtggacattaaatgctcttatcaactgaacacgaagaagaagaacaatggctggtgaggcttcatcgtcgaccatcggaaaactggtccaatttcggatgaggaacatgctgccttcctctccctatggctcgagaggtttgctttctgtgggtctacttgagcactgactgcgaacttccttcattttgctgaagccctggtgagaaaggaaaaagttcctcttggccgatacctcctaggggcagcttattggatgttacatgtttccttagccaatattcttatagacaagccggtcagttacgggggcccttggtggttggttcattcagctgtggttgacaattcacaccaacaccgtggccaacagaccttctctgcttgaatcggccttccccacatatgactccattgatgatcaatcagattcccagccgtgcaagtcttatggggaagcagctttagtttaccctggtgtcaagccatctattgaaggctttaagacatggttcgacatattttacaacaacgatgctgccgatgttctctttgcctatgacgcctacaccgagtttgatcttccaatggatttagatctgagcaagctaaatgatgaagaagacctgttattgaggggcaattacttggcagcaatctctccttgcgttcttcctacagatgtgtctcagggaagaaaatctttctcttatgagttttatcacccaacatcggctgcaagacaactggggcttggccagcttcccatcaatcttcccttactaaaagttgtagactcaagatgtgaagtatcatcagtcgataccatgaagaaattgttagaatgcaaattcccagtctcagccgatatcggcgacttcaccctttatcagtttaagcatgtcaccttctacagttgatagtcggattggtcaaaacatctcttctctgctccatccgactattgtcttaccaagattgataaccgcatcaaggtaggccgcaatttacttctaactagattatgcccccctccccacgacctaacttgttttgctcccttttttctctctgcagatcttaaaaccactggcaccgaaacacagcctgagtgatcggccaatttgctatgcccaggttctcaagcattccagagggactaccaagatattgccctccccgatcatttcttctgctccgtcaattgaaacattcatgaagactcctactggggttttggctaccgatcgcctagattttggcaaacacaaggatccctcttcaggaattaccgggtcatcacccaagagggccaaggctgatggttttgctgggataagtgccgaagcgttagttgacaatattccgccttctctctcgttgtctccaccaaccagagttcattacgccattcgcaaggttgcattgcatattcgcaaaaaaacgtttatctccctcatggcctttttgtaatccgtctctttcccttttgtaggtgaaagcgtcatcgttgatagacctatcggcctcagcagcgcaagagctgtccccatcggctcgagctgctccgtctgtcgaagccgttaccgaggaaattgcgtctacttcctctaaggctaaggctaagctgcttccccacttctaagcttgatcatcggctaatctttatccgtgcctaatccatcccttcctacaggacctgtccaacatgttttcctttgacgtcaaataatttttgaatgaagatgaaggaaatagccccggggcaggatgaagttagggccctatcagtggagatcgccgatccgcttaatgcctcttaggacacccttgtaaccaactgtgggccaatcaaacaagcgggctttaggggggaaagcagtttcattcttctctctcaccctcttcccctcaatcccaaaggggtggccagagttgagatcaatgatcgactgtcagggcttggttttgggcggtttcggttgtaacttcctttgttggtctagtagtagccagtcatatttagcggtgaccgtagaggtggcaatttccccattagggccgggatttggggaaaattctcatgcgtgggtgagcggggtgagggcagggatgggagttgaccgcgggtgacccatggggccctgaaggtattagttataagttaaaagacccatttgacccattaagtgaaggactatataagcgaaaccttaatttttcccaaatccatacctagccgccctctctcctgtctgagtcccacgtctctccaacctagcaccccccagccaacctacctctttgtgcgctatccccagctgtcaccaccccgagccggcgctgctagacggtggtgcatctttgctgccatgcccagctggcgtctcgttttcgccgccgccctcaagcgatgccgcctcactgcagcgcgtcgcccccaaccgccaccgcttcctcacagtccaccgcccctagctggtctcgcctcctcacagcgcgctagccctacccgatgtagcctcttcgttgccacccctggacggtgctgcctcatcaccaccgtcctcagccgtagacaccttgtcgccgcccccaaccgtcaccacgttgcggtgcgccgcctcttgctgccacaataggtgccctgcagttgctatccattcgggtagtggaggaccccgctcacccgttgggtcctctgtgggggtgagggcaagtgaggttttccacccggtggccaatgcggggccgtggacagggaaaaagggaaaaagcaaggagcggtggctggccgggggcattcttgtccaacccaaccccgccccgctgccacccctatgtggtggatttggtgctggcctcttcttggctctgtgtaggtggtgttgttgtgtggtggtggtgccacccctatatgaccgattcggtgctagccttttttttcttggctttgtgtaagtgttgttgttgtgtggcggtggtttttttttctggctattgactttcggggttttagcgttgtagtttttttctgttatattaaataaattatcgcgttgtctggtgctgatggttcagaaggaatcattaaaattgtagtggtcgtgtgacagtataaaataaataagctataccactgcattggcgtaattttattgttgggttggggggttgaggacactgtatttgcgtcaaagctgagctacttcctccgtttcataatgtaggtcattttagtattttctacattcattaacatcaatataaaatgtgagaaatgttagaatgatttgtgaaacggagggagtagatgttaccgacgcaaaggtttgccggaagagacggttgccagcgctacaagaaattaatcggagatgaaacagacaaaaatgtcagcgtgtgttttgtcggtgtgttccgatctgggcaacgggcctacacggtcccatgtttgacgggaggaggatgatagaaaaaggcactgcatgcaaacctgattttgtttgactcttttcttggcttttgctctctttgtttacgtatacgttgcttcacaaatcaagtaggcagactggtcatatttcagttctcatcacaggatcgtttggtaatataaatatatataaataaataaataaataaatatatatatatatatatatatatatatatatatatatatatatatatatatatatatacgtcctgcctaactttagtagatctgtaatacataaatgtaatttgttaggctggttatttagctgatgatcaatgtggcatggactcatgtctaagatcgaagtcacaatgctgatgttagggcatgtacaatggtctttattagcggttactttttattgtcatgcaagaatatttggtgacgtgaaagagagaaaaagaaagaaagagaaatatggttgctacgcatgacaacagcatagagttgactcttagcatttattaggaaattttttgttgcattgagtctagtaaaggaaagatgactagtaagaaagtggagtattttggtatattaatggttagagaccgtattgtcttaactattataacgtgatagcctttaattaatgtagaaaccataccgatctctacctttgtacttgcacttactagctggcgaacagcgcggaagaaggaaggaaagttgctttgcctcctagccaagatggaaaaggttggcacatgggaacatcgggacagcgtgaaccgggcggtgcggcggtggttgggtcctctgtcgatcgaggtggtgctgttctcatcatgcgttcttgcatgcatccaagggattagcaggattaggcctgtgggataactaattaacatttctccgtgaattaaatttgcaccctcgatttcgtctctcggggcagacgattgaggagccgtatagccggtccatatgcgttgcaatgtcacctcaggtaatgtttgtccgcgtcgaacttcgctggtgtggacgtgtggtgccatgcggctgaactcgttcaattcggttgcactttagagttggaacaggtagattggatgtttctcaaatctcaacgttgtcccaatgccacaggtgcaagcacagtattacctctatcccattaatctagtacgggatatatataacatataactagtactagattaacttattttaggcagaattagtatgtaaggaatgtattttcattccctgattggcaatcaacggctcaccttatttcttatatattatgtaaataattataaaaatgttaaaaaataaaacggtactactccatgaaaatgcaaattcaaatttgactctataaattataaaagataataaatataagcatgaatgcacatgctagtttgagtataatttgtttttttaattaacttatagaaggtgaatttgactttgcatattctttttaagttactcgtcattttagctttgttttagtcaaacatttttaacttggaccctcaatttcttaaattttatatattttcacatcataatatttgtgtttttaaattcaccatgagaaaaactttcataatatgtaattcacatgtaattaaactatatgtataaagttaataatgtttgagttcaaacaaaactaaaacgataaagtaatttgaaacggatgatgtacactctttgtcactacataactactgtagcatcgatggcaaagggcaccctttcctttcctttctttctttctctttttttcttcctttctataaaggaaaaagtacgaattacccttcgaactatgacgatagtatgaattacccctctgaaccataaaaccggacattttataccctgaactatctataccggacgaataaccccctcgacccaatccaaagcggtattgtcctacgtggcaatgtagtcagcattttttttaaaaatggtggggcccacctttcatactctcccacctctctctctcttcctctcaatctctctgtctcatatgtggagccgcgagttggtggccggcgatgggcgtggcgggggcgcagtgggcgtggtggagagtcgggcggcgtccggcggccggcggccagaaagccactgcgggcggcgggcgccatcgccctcgctcaccactgggagcagctccagctccacgcgccgtcgtgctccagctctacgcgtgccacgggcaccatgggcacggcggggcgcgaggcagcgttggcagcgtcgtcgtccacctccttgcgtggtcgagctccagctccatgcgcgccctcgcggacaccgtctcgaccacctccagcgcgctctccagctccgccacgtcgcccagccgcgcccgccgccgccgctgcagccgcctccgattctcagtccacattatgaagaaagtctgttcactactagaattacattatccattaacttcttcagaatacgaaacacaggtgatttgaagaagtaaatcagtgcaaatctgaagccaataaaatggaaaaacattcagcaaacagtgcaacttttggattcaaatgtgcttttgtttgcacctccactattctactgttctacagcgtttttggctccttgcagggtgaagctgtgtatcagctgcgtcaggctttcatacgaggagcctcctttctccatggctctgcaagctttctccccgtactccttcgccttcctcctcctctcgccgccgtccatcagttgtatcaccacccacgcgacgtcaccccgggtgaccgccatggcctcgtcgccgaacaacagcacaggcgtcatcacgccgacgccgagcacgtcgacggcgaaccgctcgttcaggaactggtcggagaagtgtggccacgtcacgaccagcacgccatgggcgatggactccagcatcgagttccagctgcagtgggtgacgaagcctagccgcgcccgcctccgctcgcctagccacgcccgcagccgcctccactcgcttgagtgagagagagaggaggaagaggagaaataggaggggagagagtaagtgggccccaccattaaaaaaatgctaactagagtgccacgcatacgccgccacgtaggataaaactgccatgtattgagttgagggggggtaattcgtccggtattgaaagtttaggtgagcgatgtctggttttcaggtttagggataattcggtcgaccgcgataatttgaagggtaattcgtactttttccaactttaaaggtggggaagtgcactcaatgttgaacgctcccatggcaattacagaacactagtggttgggctattttattttcaggggcagaaccagacctgattgggctatagcccagaggactataatttctatagtacatggtttatccagcacagcagacttgagctgtttcctggcccatagtaggccgtagctcaagttccccgcgaccagcgtatatgttaggcccaagggcaaggagtcatctactccttctatttcaggatataaaacgttttgactttattcaaggtcaagctattctaagtttgactaattttatagaaaaaaatagtaatatttttaaccaagattattatattataaaaatttattcaattatagatttaatgaaactatgctggtgttgtgaatattaatatttttttctatagagttagtcaaacatagagtagtttgactttggcgaaagtcaaaacgtcttgtaacctgaaacggagagagtagacaaaaggaccctgtcaagccgcaggtaccagataagacaaccgcagcacaagactaaggccctgtttgttgcaagtaaggattattgatttagattacttaaactggattataataagctatagtagaataagctattagttgtttttttctctcgattattagagtatggattattcggtttgaaaagctaatgtttataatggcccagttattgtagaatgggaggaggataagacggcggtggcggcttggggaaggatccggggtatagggtgtgggcttggggaagggtttgcgtgcggctagggagagaggaagcgaatgcacgcgctgccgggggaggcgctggattcacgtacgacctgggagagaggaagcggatgcacgcgcgatcaggggaggcgccggattcacgcgcggctagggagtgaggaaggagatgcgctggatctgttgggtttgatggcagtggtaggtaatttacatacaatttataaaagtagtgggtctttagccacccaataatccttaaaaaacaagtttagaggatattaccagattatattattcttacttatagattataataatatatcataataatctgtctgtttgtttcagattagtaattaaccaaattaaaataattctaagctaaaacaaacatgacctaaatcatctcactagttgcaacaaggtaataaataacgggaaatgaaaatcgagagcgctcccggttttgtgttatcatacgacgtgttcgacagccatccatccatgtcttcgttctatgggagcaacaggcttgactctacagcaatggcattaaagcgagaaacctgcacaccaccaaccatcaaaactaaagattttggtttcactggcctattctttttttaagcaatagaattgatgacttatatattttaaaccactagaaaaaatacccgtgcgttacaacgggtgaagtttattttaatcttattatttttatatggtttagttaagatgaaattcatcgtgggaggtcgcttggatatatatatttttagaaaatcatgagatgcagttaggagtccgatcatcttaagttagcatgcgagcttttttaaataaatttcttatatggttccttctgtattaccaaatgtgaacgatcttaaaaccgactcaaatatggatatgcattttcaaaagtaaacgaacttaaaaaccgactcatacacagataacgtaccaaaataccggtaaaaatattttcaatttttataatagtagagatacgaaatttattgtgagaattcgcttggatatatatttttttgaaaaatcatttaggaatccgatcatctcaagttagcaggcgagtttttttaaaagagatttcttatacgactcatgtatttttaaaagcagacgaacttaaaacctatctcaaatacggatatgtatttccaaaagcaaacgaacttaaaaactgaatcatacactgatgacgtaccaaaataccagcaaaaacatctttaatttttataatagtagagatatattatttctcactttcctttttaccatcaagctgtactcaaaatacacgataaaacgagtccaatattgaatatattcaaacatttaaagtaattaacttaatctaaaagtaatttgcttaaatcgtagaagtaacttagctctgcaatagaagtaactacctatgtagcattggaagtagttatcctatgtagcattggaagtagttatcctgaccaatcagttgatgatgactgagatacgaaaacgtggatattgtacttaccaagatacagagaaacgataccacttgcccttgcccaggaaaagaggaccacatgatttgctagttgtcatctcgattcatgtgcatgttactgaggctaacaacactagtatattttcttttctatagaatctttgatgacctatatattttagacgtatattatttttaagatccatttgaaccgtcagactctacttaaaatatgtgacaaaatgagtcaaatattgaatatattcaaattatattttttctcaactcctccagaagtgtagttacttatagaagtgtagttactactaatgccgtgacgagttaattctccttagctgtacagtcacttctaatacctttaagagttatttctatttttttcatagttacttgtctataggattttatttacttctaatattacgaagagttacttatatttctttaaaagttactttgctccagtaatggagttacttttaatatcgcaaagagttactttctatatgacgcaatattttatttaaaaaacatagtgattactttaaataaagaatatatgtatttacttgaaaatcttctctacactttgcttttcctgtcgatttactccacatagctttcttatttcaattcactcataatgtaactacttctaatgctataaagagttacatctattgcatagctacttttgcaatttaaataaattacttttagattaataaaaattttaaatatattcaacaatgaattcgtttcatcacatattttgagcggagtacaatggtgcaaaaagatcttaaaaataatatacggtttaaaagatataagtcatcgaagaggtttaaaagaaagatacgctagtgaccaatctatataaatggttgttgccatttttagatggtaaaggaggatttatatgtcacatgggataaactggtcgctggtttggataaaccagcgaccgtgcattgtgtagtcatgtccaataaataagtaaattatccttataccttgaaagctcacacaatatctctcatacctttaaaatttacccgattccttctatactcatgaaatttcaacttatccattccatactccatccatcagttaactgtctaatttgtataaaaatgaccattctacccttacacttgggtgaacaaagaaatttatgaattacattattgaaaatataaaattttttcgcatgagactattatatttatgatttcctgtgcaacacattattttaatttattgcatttggtttatttaaaaaaattatgttaaatttttttattaattatttaatcttattagtttcataaaatgcacatactgtgcacccaaagaattttttttagttttccaagcctatattgaaatttacatcatcaagggcattaaagacatttgtaatcaaatagtgaaatgaaggaaaatgtaacggcaggggcatggaatggatcaaattgaaatttcgggggtatagaagggatcggttaaatttcacgggtatgagacggattgagtgagttttcaaggatatagaaggaatttacttggggtgattatacctgttagtaccagattctaaaaatttgtgcaccaaatgtttttttaagatgattagtaaatagtaagatgaagaaaaaatcgatatactaggtgcaatagtacctaagagtcccgaatgataaccagattcagtattcttcaatgaaacattctatgattgtgattgattgtggttatggtacaaagatactggatatttgcttgaaatacaaggatgagtcttcttacgagatgagtatctggtaccgttcctataaaagtgccagtactaactgacctacatgttttatgattcaagttgtagaaaaccatacatattttcacacttgacacttaagtacatatatattttggtagtttagtttcacaaaaccacactatcgaataatggatttacccgtgtgatgacgtgattgttccatctaggatgatgacgtggcatatcctattaatttcgtgcgatggctgataataggatcacacgtcctcgtcctatgtgaaacagccacgtcatcccgcgggtgaatccattcattgatagtgtggttttgtgaaactacactaccaaaatatatgtacttaagtgctaagtgttaaagtgtatgtggttttctacaacttggatcataaaatgtgtagttttatgaaatttactcttttattaactgaacacttggtttttttcttcttaaagaaatcactcgcctcgagctagttgattttattcatcacgtaagtccttccacgagcgagttggctagttgtagttgttaacgtgcctttcctttcatcttgaatattaatactccctctgtcacttaatataagagattttgatattttgcttacattatttgaccactcgtcttattcaaaaaatttatgcaaatataaaaaacaaaaatttgtgcttaaagaactttagataataaagtaagttataaataaaataaataataattttaaattttttttgaataagacgaatggtcaaacagtgcaagcaaaatatcaaaatcccttatattaggggacggagggagtaaatatttggatgtaataaatagtgtttatagcatgtgctagagctgtaccaagtgatagagctgtaccgctacaagatagcagcctggatgtagacttaggctgtgtttaagaagaggagatagagaagattgggaagatacgcaaaacgaggtgagccattagcacatgattaattgactattaagtattttaaacttcaaaaatagattaatatgatttttttaaagcatcttttctatagaatttttttgcaaaaaatacaccgtttagtatttcgggaagcgtgcgcgcggaaaacgaagcaaaactcactaacaatcacccagatcacctaggaaagaacacagccttagcgactgctattttaacttagccggttgctatcgcatctgcagttcaatttagcaggctgttatagcatgagcctattttgttagttgattttctgccaaaacattatatgatgtaacatccaatgactagaacatcatgtctgcttttaatttaagttggaacaagacatcaactcttcgagtgctactaaatctcaacttatcttcataggttatacatatattgatctatcattaatttatttctcagttgctttgttaatattttataaagtcattactcataattagggctagacaaaaagctcgtgactcattagctcgctcatctcgtcactagcttggcatgactctgttaacagtgaaatttggtaagcccggactagtcattggcttagagccagcatcggctttgaagtcctgagattagccgatgagagttatcaagtcgtcagttgtcggattcttgctatattcggttaaggaaattgatctactaaagg

SEQ ID NO: 25825 - DNA, 7311 bp, Oryza sativa
attcgaatagccgtgcccgcggttatgggcggtcaaccagattcaccgtgattagtctcaccctagtgtaatcttttgaatttggatagtttaggtggatggttgggcctgttgcaacgtgggataacgttggacagtggatagttaatactaattaaatattacaactgtttaatctttcaacttctgtttataaatgctcgctttatgcaaatgaaccactccagctcttctttgataattccctgcatcatacccctattccggtatgacttgctgagtacagtgggtagtactcagtcttgctctatttttttcccaaccccagagctcgagtatgtgtcagatgaaggtttctccgaggagtaggctttgtccgtgccgtcgaggatgcctgtggagtggtggtcccgctgcagttctagtcaaggcttagctcctgttgtctttcttttcttccgctgcatttgtgtaagacttttatgatgtttgtaagacgtggatctgaatgtcaacattgtcgtttgtgtaccccggccggtcctggacggggattttaatgcacattctgcttggaattctactcaggaatttctgggcgtgacaagttggtatcagagccgaacttgaccgtaggacaagccaaatggaaaaacctaagagccctccgaatccttttcattgcatatgttctttgcaattggatttgttccgggaaaattgggatctgttcttgtggttcaaggggaaaaatcttgatcgctcgtttaagtgagatttgtcaaaacgagtcagtctagggttttagtaaaactattgagatttattcgtcagtcagttgggatttgatgggtgaaatgcattaggtcctagctcaggaacatgggttgcaaggtatttatgttattagtgttattatagtatgtatgtaatttccccactattttatcgttatgtgagtctgtcttctttattcgctctcatgcaaaatgatctatgcataaaatttcgctcttattcgattctcttattgagtcttttattgctttatttaaatttggatttgagcatgcattgatcctactcctttgtcttctctagatggccggccaccccccccaaccaccgtggagaaggcatgatcgactttgtggcagagttggcacgcatgacgctggtggtgggctaccccaacgcgccagagtacacgactgttccaccactcagtggcgagcttcctcaccgtgttcgcctggaggtccacggctacgtgggtacctgtctagctaatatggtggttgaggcatccggaggcacagcagatcacgcctgtcaggaggcaccatacctgatgatggccagactacgggagcgccacaactacatcttccacgacacggcgtaccgatttcacccttgtcgagccagcggtggtgatgtcagtactttccgtccgacagccggcgagaacgacaccacctttggtcacatgtgtgctgtgatgaggggattggataggatgcactcggacctgcacaaggcgaccaaggccttgaatgatgggaagctcatgaggatcgtcgctctgaaggacgagatagcgcgcctgaagagggagaatgctcagttaaagagtcttcccgcgccaggaggagtccggatccgcactacaccccgcaagacgacgacggcacctgtgcgcatccagcctgcgcccaggaacccacctccgcccgcagttcccgcacctccagttccgcccgcagctccgacagttcctgcagctccagcaccagctccagctcctgttcacgtgtcagctcccacgtccgctctctccttcgctccagcatcagctgccaggggtccagccagtggcaacggaggttggttgtctgctactcccagtggcagccgcgatctcagcagcaacagctccagtagctcagagtcgggcagcggcgagacttatctgccaggctccaggagtcgctcagagggacctggtgacgagcaggaggacgccttcgactccaccgaccgcaggagctgttccgagcattaggctcgttttccattagtttatcgactgtctagcttctgcttgttagtttgtgtgtttaggttgcttgtttgggatcagttgacggtcgatatcatgtgcctctgatatggctgtctaaataaggatttttgcttgctctttaagtgttttaattcagatcagaacaattgcagtttaaattcctatgtaataaagcttagttcctgagcatctgtttttcttctttcccccgtctgcttttccctccagatggtctacaccaggaatggtagccgcgcaacaggcgagggcagcaacggcgaagagcgcactgatggggcgcatccccacagcgattccggcaatggtccgccaccacttcccgagaatccgacgctagcccatgtaatggcacatcagacccagatgatggcagccatgatgcaacagatgcagcagcaccagcagatgcaccagcggatgctgcagcacgccgaacagcagcatcagcagtttggtccccctccccctcagtccaagttgccagagtttctacgtgtcaggccacccaccttctccagcaccaccaaccatatggaggcgaatgactggctccatgccatagagaagaaactgaatctcctgcagtgcaatgaccaggagaaggttgctttcgccacacaccagcttcaaggtcctgcgtcagcttggtgggacaatcacatggccacccgcccaccaggtactgaagtcacttgggcagagttctgccgtagcttcaggaaggcgcaggtgccagacggggtcgtggcacaaaagaagagggaatttcgggcactccatcagggcaacgggactgtgacggagtacctccatgagttcaatcgtctcgcgcgatatgcacccgaggatgtccataccgacgccgagaagcaggaaaagttcatggcaggtctggatgatgagctgaccaaccaactgatatctggagactacgccgactttgagaggctagttgacaaggcaatccgtcaggaggatcaacgcaacaagatggacaggaagaggaaggccgctcagttcagggcacctcaggggagtcaccagaggccgcgcttcgcttccgggcagcagggtggacctaccaccatgatcgtccgccagtaccgcccgttcaaccctagcaactttccccagggcgccagaggcagtcagaaccaccatggaggtcagcccagccgcggtgcagctccacgcccaccaacggcaccggcacagtcaggcccgtccgcgcaagccaagaaggagactggaacaaaaccagggtcttgcttcaactgtggcgagcttggccacttcgctgacaaatgcccaaagcctaggcgtgccgggacaaggtttatccaggctcgtgtcaaccacgcgtccgcggaggaggctcaagcagcaccagaggttgtactgggtacgtttcctgttaactcaatccctgcaacagtactttttgattctggtgcaacgcattcgttcatttcaaagaagtttgtcgagatgcatgggttaataagagaggaacttagcacaccgatgcgggttcataccccagggaatagctccacttcggttcaattcagcccttctataacaatagaaattcaaggatcaccatttctagccaacctcattcttctcgaatccaaagacctagatgtcattcttgggatggattggctgaccaagtttaagggagtcatcgattgtgcgaatcgtaccgtcaccttgaccaacgagaagggagaaacggtagtgtacgaatcaccagacgcaccaaagcgaggggtctctttgaatcagattgaagcggaaatcccagtggacactgtggagaagaacttgaggaaattggaagatatacccatagtctgcgagtatccagaagtattccccgaagacctcactaccattgcacccaagagagagattgaattccggattgacttggcaccgggaaccgctccaatttataagagaccgtacagaatggcggctaacgaattagccgaggtcaagaagcaggttgatgagcagctgtagaaagggtacattcgaccaagtacttcaccttggggtgctccggtcatttttgtggagaaaaaggataagacgaagaggatgtgcgttgattatcgtgcactcaacgaggtcacaatcaagaacaaatatcctttgccgcgaatcgatgatttgtttgatcaactgaaaggagctaaagtgttttctaagatagacctgcgatcaagctaccaccagttgagaattcgggaggaggatattccaaagacggccttcaccactcggtacggattatatgagtgcacggttatgtcgttcggacttaccaacgcacccgcattcttcatgaatctgatgaacaaagtgttcatgaaatttctggacaagtttgttgtggtattcatcgacgacatacttatctattcaaagtccaaagaagaacatgagcaacatctccgcctggtactcgagaagttgaaggagcaccagctatacgccaagttcagcaagtgtgacttctggttgacggaagtcaaatttttgggccatgtcattacagctcagggtgtggcagttgacccatcaaacgtagagtcagttaccaaatggaccccaccgaagaccgtgtcgcagattcgaagttttctaggactggcaggttattaccgccgattcatcgaaaacttctccagaatcgcccgacccatgactcagttgcttaagaaagatgagaagtttaaatggacagttgagtgcgataagagttttgaggagctcaagaagaaattagtatccgcaccagttttaattctgcccgaccagatgaaagacttccaagtctattgcgatgcatcccgtcacggacttggatgtgtcctaatgcaagagggcaaagtggttgcgtatgcctcgcggcagttgcgtccacatgaagggaattatccaactcatgacctggaattggcagcagtggttcatgctttgaagatctggaggcactatctgattggcaaccgctgcaaagtatatacggaccataagagtctgaaatacatcttcacccaaccggacctaaatctccgacaacgaagatggttggaactaatcaaagactatgacatgagcattcactaccacccgggtaaagccaatgtggtggcagacgcgttaagcaggaaaagttactgcactgccctatgcatcgagagcatgtgtgaagaattgcggcaggagtttgagcatctcaacgtgggaattgttgaacacgggttcgtagccgctctggaggcacggcctatgctcgtggatcaagtcagagcagctcaagtaaatgattctgaaatagcagagctgaaaaagaacatgagggtcggaaaagcccgagatttccacgaagatgagcatggcacaatctggttgggagaaagattgtgtgtacctgacgacaaggaactgaaggatctaatactcaccgaggctcatcaggcccagtactccattcatccaggcagcaccaaaatgtatcaagacctcaaagaaaagttttggtgggtcagcatgagcaaagaaatagctgaattcgtcgcactctgcgatgtttgccaacgagtgaaggcagagcaccaaagaccagcaggtttactccaacctcttcaaatcccggaatggaaatgggaggagattggaatggactttataacaggactgccccggacatcatcgggtcacgattcaatctgggtagtcgtggatcgactcactaaggttgctcacttcataccagtacataccacgtatacgggcaaaaggttggcggagctctatctctcgagaatcatgtgtctacatggagtacccaaaaagattgtatctgaccgagggagtcagttcacctcaaaattctggcagaagctgcaggaagaattggggacccgtttaaatttcagcacggcctatcacccgcaaactgatggtcagaccgagcgagtcaatcaaatcttggaagatatgttgagagcttgcgctcttgattttggtggagcttgggacaaaagcttgccatatacggaattctcgtacaacaacagctaccaggccagtctacaggtggcaccgtttgaagctttatacggccggaagtgccgcacacctctcttctgggagcagacaggcgagcgtcaactgttcgggacagaggtattagcggaagcagaagagaaagtcagaacaatcagggaaaggttgaggattgcccagtctcgacagaaaagttacgcggataaccgccgaagggagctcatttttgaagcaggggattacgtgtatcttcgtgtcactccgctctggggagtacaccgttttcagacgaaaggcaagttggtaccacgcttcgtgggaccatacaaaatcctggaacgaaggggggaagttgcttatcagctagaacttccatccaatatgatcggcatccatgacgtgttccacgtgtcccaattaaagaagtgcttaagggtacctgaagaacaggctgattcggaacacattgatatccaggaggacctaacatacgtggagaagccggttcgtatacttgataccagcgaaagaagaaccagaaacaaggtcaccaagttttgccgaattcagtggagtcatcactcaaaagaggaagcaacctgggaaagggaggatgagttgaaagccgcccatctgcacctcttcaccagctcctccgaatctcggggccgagattccgtttaaagggggtaggtttgtcacaccccgaagttctcctcccaagcctaaatttaatttacaaatgaccctaagaaaataccggtgcaaagcaagagtaaacccttttaaatcaatgcaaataataatcgaaattggcatgtggaatttttcttgagttctacatgtcgaaattctctaacaggatttttagtggaattttcagagccctagaaataattttaaccaattaaaattgagcaagcaatattttaattccagggaaaatcctttttcctttttctttttctttttcctccctttttcgaatgggccggtggcccattctttccttttcttcccctcctccctgctgggccggccgcaggccgaggcccagacaggcccgcccggcgccttcttttcctgggtcgccgacaggtggggcccacctgtcgggt

SEQ ID NO: 25826 - DNA, 694 bp, Oryza sativa
ggagaagttgcttatcagctagaacttccatccaatatgatcggcgttcatgacgtgttccacgtgtcccaactaaagaagtgcctaagagtacccgaagaacacgctgattcggagcatattgatatccaggaggacctgacatatgtggagaagcccggtcgtatacttgattccagcgaaagaagaaccagaaacaaggtcaccaggttttgtcgagttcagtggagtcaccattcagaggaggaagcaacctgggaaagggaagatgagttgaaagccgcccatccgcacctcttcatcagctcctccgaatctcggggccgagattccggttaaggggggtaggcttgtcacaccctgaagttctactcccaagcctaaaatttaatttataaatgaccctaagaaaatgccagtgcaaattgagagaaaaccctactaaagtaatgcaaataataatcgaaactggcatgtggaatttttcttgagttctacatgttttggtgcattttgaactttttcattccggtcaaaaacatcgcacccacgtgtgccaataatggcattaattgacaaaagttcgccgcgcgaatcacaaagtgagtttttgccacgaacgtacccaatagactccaatatgtccaaaaatcatgttttggtgctttttaaattttttcattccggtcaaaaa

SEQ ID NO: 25827 - DNA, 4905 bp, Oryza sativa
attggcagtatatgacaatagtttcgccgcgcgaatcacgaggtgatattttgccacgacgcacccacacagtccaatatgtccaaaaatcatgttttggtgatttttgaactttttcattccgggtgaaaaacatcgcacccacgtgtgccaagatatggcaatatgggcattaattgacaaaagttcgccgcgcgaatcacgaagtgattttttgccacgaatgcacccaacacactccaatatgtccaaaaatcatgttttggtgctttttgaaatttttcattccggtgaaaaacatcgcacccacctatgccaatattggcagtaattgacaaaagttcgccgcgcgaatcacgaagtgattttttgccacgaatgcacccaacacactccaatatgtccaaaaatcatgttttggtgctttttgaactttttcattccggtgaaaaacatcgcacccacctatgccaatattggcagtaattgacaaaagttcgccgcgcgaatcacgaagtgattttttgccacgaacgcacccaacacactccaatatgtccaaaaatcatgttttggtgctttttgaactttttcattccggtgaaaaacatcgcacccactctatggcaatattggcattaattgacaaaagttcgccgcgcgaatcacgaagtgattttttgccacgaatgcacccaacacactccaatatgtccaaaaatcatgttttggtgctttttgaacttttttattccggtcaaaaacatcgcacccacctatgccaatattggtagtaattgacaaaagttcagcgcgcgaatcacgaagtgatattttgccacgaatgcacccaacacactccaatatgtccaaaaatcatgttttggtgctttttgaactttttcattccggtctaaaacatcgcacccatatatggcaatattggcattaattcacaaaagttcgccgcgcgagtcacgaagtgattttttgccacgaacgcacccaacacactccaatatgtccaaaaatcatgttttggtgcttttcgaactttttcattctggtgaaaaacatcgcacccacctatgcattggcagtaattgacaatagttcgccgcgcgatacacgaagtgatttttttccacgaatgcacccaacacactccaatatgtccaaaaatcatgttttggtgctttttgaactttttcattccggtgaaaaacatcgaacccacctatgccaatattggcagtaattcacaaaagttcgccgcgcgaatcacgaagtgattttttggaacgaacgcacccaacacactccaatatgtccaaaaatcatgttttggtgctttttgaactttttcattccggtgaaaaacatcgcacccacctatgccaatattggcagtaattgacaaaagttcgccgcgcgaatcgcgaagtgatttttttccacgaatgcaccaaccacactccaatatctccaaaaatcttgttttggtgctttttgaactttttcattacggtcaaaaacatcgcacccacatgtgccaatatcggcattatcggcaaaagttcgcccgcgcgaatcacgaagtgatattttgccacgaatgcacccaacacactccaatatgtccaaaaatcatgttttggtgcttgttgaactttttcattccggtgaaaaacatcgcacccacatatgccaatattggcagtaattgacaaaagttcgccgcgcgaatcacgaagtgattttttgccacgaatgcacccaacacactccaatatgtccaaaaatcatgttttggtgctttttgaactttttcattccggtgaaaaacatcgcacccacctatgccaatattggtagtaattgacaaaagttcgccgcgcgaatcacgaagtgatattttgccacgaatgcacccaacacactccaatatgtccaaaaatcatgttttggtgctttttgaactttttcattccggtgaaaaacatcgcacccacctatgccaatattggtagtaattgacaaaagttcgccgcgcgaatcacgaagtgatattttgccacgaatgcacccaacacactccaatatgtccaaaaatcatgttttggtgctttttgaactttttcattctggtgaaaaacatcgcacccacctatgccaataatggcagtaattgacaaaagttcgccgcgcgaatcacgaagtgattttcattccggtgaaaaacatcgcacccacctatgccaatattggcagtaattgacaaaagttcgccgcgcgaatcacgaagtgatttttttccacgaatgcaccaaccacactccaatatgtccaaaaatcatgttttggtgctttttgaactttttcataccggtgaaaaacatcgcacccacgtgtgccaatatatggcaatattggcattaattgacaaaagttcgccgcgcgaatcacgaagtgattttttgccacgaatgcacccaacacactccaatatgtccaaaaatcatgttttggtgctttttgaactttttcattccggtgaaaaacatcgcacccacctatggcaatattggcattaattgacaaaagttcgccgcgcgaatcacgaagtgattttttgccacgaacgcacccaacacactccaatatgtccagaaatcaagttttggtgctttttgaactttttcattccggtgaaaaacatcgcacccacctatgccaatattggcagtaattgacaaaagttcgccgcgcgaatcacgaagtgattttttgccacgaacgcacccaacacagtccaatatgtccaaaaatcatgttttggtgctttttgaactttttcattccggtgaaaaacatcgcacccacgtgtgccaagatatggcaatattggcattaattgacaaaagttcgccgcgcgaatcacgaagtgattttttgccacgaatgcacccaacacactccaatatgtccaaaaatcatgttttggtgctttttgaactttttcattccggtgaaaaacatcgcacccacctatgccaatattggcagtaattgacaaaagttcgccgcgcgaatcacgaagtgattttttgccacgaacgcacccaacacactccaatatgtccaaaaatcatgttttggtgctttttgaactttttcattccggtgaaaaacatcgcacccacctatgccaatattggcagtaattgacaaaagttcgccgcgcgaatcgcgaagtgattttttgccacgaatgcacccaaaacactccaatatgtccaaaaatcatgttttggtgctttttgaactttttcattccggtgaaaaacatcgcacccaccgatgccaatattggcagtaattgacaaaagttcgccgcgcgaatcacgaagtgatattttgccacgaacgcacccaacacactccaatatgtccaaaaatcatgttttggtgctttatgaacttttttattccggtcaaaaacatcgcaaccacgtgtgccaatattggtagtaattgacaaaagttcagcgcgcgaatcacgaagtgatattttgccacgaatgcacccaacacactccaatatgtccaaaaatcatgttttgatggtttttgaactttttcattccggtgaaaaacatcgcacccacgtgtgccaatatatggcaatattggcattaattgacaaaagttcgccgcgcgaatcacgaagtgattttttgccacgaacgcacccaacacactccaatatgtccaaaaatcatgttttggtgcttttcgaactttttcattcgggtgaaaatcatcgcacccacctatgcattggcagtaattgacaatagttcgccgcgcgaatcacgaagtgatttttttccacgaatgcacccaacacactccaatatgtccaaaaatcatgttttggtgctttttgaactttttcattccggtgaaaaacatcgaacccacctatgccaatattggcagtaattgacaaaagttcgtcgcgcgaatcacgaagtgatattttgccacgaatgcacccaacacactccaatatgtccaaaaatcatgttttggtgcttgttgaactttttcatttcggtgaaaaacatcgcacccacctatgccaatattggcagtaattgacaaaagttcgccgcgcgaatcgcgaagtgattttttccacgaatgcaccaaccacactccaatatctccaaaaatcttgttttggtgctttttgaactttttcattacggtcaaaaacatcgcacccacatgtgccaatatcggcattatcggcaaaagttcgcccgcgcgaatcacgaagtgatattttgccacgaatgctcccaacacactccaatatgtccaaaaatcatgtcttggtgcttgttgaactttttcattccggtgaaaaacatcgcacccacctatggcaatattggcattaattgacaaaagttcgccgcgcgaatcacgaagtgattttttgccacgaacgcacccaacacactgcaatatgtccaaaaatcatgttttggtgctttttgaactttttcattccggtgaaaaacatcgcacccacctatgccaatattggcagtaattgacaaaagttcgctgcgcgaatcatgaagtgatattttgccacgaatgcacccaacacactccaatatgtccaaaaatcatgttttggtgctttttgaactttttcattccggtcaaaaacatcgcaaccacgtgtgccaatattggtagtaattgacaaaaattcagcgcgcgaatcacgaagtgattttttggcacgaatgcacccaacacactctaatatgtccaaaaatcatggtttgatgcttttgaactttttcattccggtgaaaaacatcg

SEQ ID NO: 25828 - DNA, 698 bp, Oryza sativa
agacctcaaagaaaagttttggtgggtcagcatgaggagagaaatagctgaattcgtcgcactctgcaatgtttgccagcgagtgaaggcagagcatcaaaggccagcaggtttactccaacctcttcaaatcccggaatggaaatgggaggaaattggaatggattttataacaggactgccccgaacatcatcgggtcacgattcaatctgggtagtcgtggatcgactcaccaaggtagctcactttataccagtgcataccacttatacgggaaagaaattggcagttgtacttggcaaggatcatgtgtttgcatggggtacccaagaagattgtatctgaccgagggagtcagtttacctcaaaattttggcagaaactgcaggaagaattggggacccgtttaaatttcagtaccgcctaccatccgcagacagatggtcagactgagcgagtcaatcaaattttggaagacatgttgagagcttgcgctcttgactttggtggagcttgggacaaaagcttgccatatgcggaattctcgtacaacaacagctaccaagccagtctacagatggcaccgtttgaagctttatacgaccggaagtgccgcacacctctcttctgggatcagacaggtgagcgtcaactgttcgggacagaggtgttagcggaagcagaagagaaagtcaga

SEQ ID NO: 25829 - DNA, 6627 bp, Oryza sativa
ttctgttccttgtcgtcaggtacacacaatctttcccccatccagattgtgccacgctcatcctcaaggaaatcccgagccttttcgactctcatgttctttttcagctctactatttcaggatcatttacttgagcggctctaacttgatcgacgagcgtaggccgtgattctagagcggctacgaacccgtgttccacaattcccacattgagacgctcaaactcctgctgcaattcctcatacatgccctcgatgcatagggcattgcaatagcttttcctgcttaacgcatctgccaccacattggccttccccgggtggtagtgaatgctcatgtcatagtctttgattaattccagccgtcttcgtggtcggagatttagatccggttgggtgaagatgtatttcagactcttgtgatccgtatatacttcacagtggttgccaatcagattgtgcctccagatcttcaaagcatgaaccactgctgccaattccagatcatgggttgggtaattcccttcatgtggacgcaactgtcgcgaggcatacgcaaccactctgccttcttgcattagaacacacccaagcccgtggcgggatgcatcgcaatagacttgaaagtccttcatctggtcgggcagaatcaaaactggtgcggatactaatttcttttagagctcttcgaagctcttatcgcactcagctgtccatttaaacttctcatctttcttaagtaactgagtcatgggtcgggcaatcctggagaagttttcgatgaatcggcggtaataacccgcaagtccaagaaaacttcgaatctgcgacacggtcttcggtggggtccatttggtaactgactccacgttcgatgggtcgactgccatgccttgagctgtaacaacatggcccagaaatttgacttccgtcaaccagaagtcacacttgctgaacttagcatataactggtgctccttcaacttctcaagtaccagtcgaaggtgctgctcatgttcttcttcggattttgaatagataagtatatcgtcgatgaataccacaacaaacttgtccagaaattccatgaacactttgttcatcagattcataaagaatgcgggtgcgttggtaagtccgaaagacataatcgtgcactcatacagcccgtaccgagtggtaaagccgtctttggaatatcctcttcccgaattcttaactggtgatagcctgatcgcaggtctatcttagagaacaccttagctcccttcagttggtcaaacaagtcatcgatccgtggtaaaggatatttattcttgattgtgacctcattgagtgcgcgataatcgacgcacatcctcttcgtcttattctttttctccgcaaaaatgaccggagcaccccaaggtgaagtacttggtcgaatgtaccctttctgcagctgctcatcaacctgcttcttgacctctgcatcctgtacggtctcttgtaaattggagcggttcccggtgccaaatcaatccggaattcaatctctcgcttgggtggcatggtagtgaggtcttcgggaaacacttctggatagtcgcaaactatgggagtctcttccaatttcctcgaattcttctcctcggtgaccactgggatttccgcctcaatctgattcaaggagatcccttgctttggtgagactagtgatttgtacactacggtttctcccttctcgttggtcaaggtgactgtgcgattcgcacaatcaatgactcccttgaacttggtcagccaatccatcccaagaatgacatctaggtctttggattcaagaagaatgaggttggctagaaatggtgatctttgaatttctattagcactgaagggataaaactgaccgaggttgaactatttcctggggtatgaaccctcattggtgtactaagctcttctttccttaacccatgcatccccacaaatttcattgaaatgaaagaatgcgttgcaccagaatcaaaaagtactgttgcagggattgagttaacaggaaacgtacccagtatgacctctggtgctgcttgcgcctcctctgcagacgcgtggttgacacgagcctggacaaacctttggccggcacgcctaggctacgggcatttgtcagcgaagtggccaagctcgccacagttgaagcaagaccctggttttgttccagtctccttcttggcttgcgcggacgggcctgattgtgctggtgccactggtgggcgtggagctgcaccgcggttgggctgacctccatggtggttctgactgtcactggcgcccaggtggaagttgcttgacttgaacgggcggtgctggcggacgatcatggtggtaggtccaccctgctgccggtagtgaaacgcggtcgctgctggttaccttggttggaccggagctgtgccgccattctcttcctgtccattttgttgcgctgatcctcctgacagattgccttgtcaaccagcctttcaaaatcagcgtagtccccagatatcagttggttggtcagctcgtcatccagacctgccataaacttttcgtgcttctcggcatcagtgcggacatcctccggtgcatatcacgcgaggcgattgaactcatgaagatactctgtcactgtcctgttgccctgatggagtgcctggaattccctcttcttttgtgccacgaccccatctggcacctgcgccttcctgaagctacgacagaactccgcccaagtgacttcagcgcctggcgggcgggtggccatgtgattgtcccaccaagctgacgcgggaccttgaagttggtgtgtggcgaaagcaaccttctcctgatcattgcactgcaggaggttcaatttcttttctatggcatggagccagtcattcgtctccatggggttggtagtgctagagaaagtgggtggcctgacgcgtagaaacttgggcaatttggattgagggggagggggaccaaactgctggtgatgctgttcggcgtgctgctgcatcctctggtgcatctgctggtgctgctgctgcatctgctgcatcatggctgccatcatctgagtctgatgtgccattacttgggccagcgtcggattctcgggaaatggtggcggaccattgccggaatcactgttggggtgcacaccatcagtgcgctcttcgccgttgctgccctcgcctgtcgtgcgggtgccattcctggtgtagaccatctggaggaatagcagacggggaaacggagaaaaacagatactcaggaactaagctttattacatagaaatttaaactgcaattgttctgatctgaattaaaacactttaaacagcaagcaaaaaatccttattaaggcagccatattataggcacatgatatcgaccgccgactgacccacaagcaagcaacctaaacacacaaactaacaagcagaagctagacagtcgataagctaatggaaaacgagcctaatgctcggaacggctcctgcggtcggtggagtcaatggcgtcctcctgctcgtcaccaggtccctctaagcgactcctggagcctggcagatatgtctcaccgctgcccggctctgagccactggagctgctgctgctgcggtcgcggctgccactgggtgtagcaggcaaccaaccccctttgccactggcggggcccctaacggctgatgctggcgtgaaggagagagcggatgcaggagctgacacgggaataggagctggagctggcgctggagctgcaggaactgctggagctgcgggtggaactggaggagctgcgggagctgctgacggaggtgggttcttgggctcaagctggacgcgcacgggtgccgttgtcgacttgcggggagtagtgcggatccggactcctcctagcgcgggaagacccttcaactgagcattctccctcttcaggcgcgctatctcgtccttcagagcgatgatcctcacaagcttcccatcattcaaggccttggacgccttgtgcaggtctgagtgcatcctgtccatccccctcatcacagcgcacatgtgaccaaaggtgctgtcgttctcgccggctgtcggacggaaggaactgacatcgctgccgctggcttgacgagggtggaaccggtacgccgtgtcgtggaagatgtaggtgtggcgctcccgtagtctggccatcatcagatatgctgcctcctgacatgcgtgatctgctgtgcctccagacgcctcaaccaccatgttagcgaggcaagtacccacgtagccatggacctccaggcggacacggtgaggaagctcgccactaagtggtggaacagtcgtgtactctggcgtgttggggtagcccaccaccagtgtcatgcgtgccaactctgccacgaaatcatccatgccttctccgcggtggttgggtgggtgctcggccatctagagaagacaaaggggtaggatcaatgcatgctcaaatccaatttaaataaagcaataaaggactcaaataagagaatcgaataagagcgaaattttatgcatagatcattttgcatgagagcgaataaataagacggacttacatagcgataaaataatggggaaattagatacatacttataataacaataaaagcataaataccttacaacccatattcctgagctaagacctaatgcatttcgcccatcaaatcccaactgatggtcaaaacatctcaaataattttactaaaaccctagaccgacttgttttggcaaatctcacttaaacgagcgacaagatttttcccttgaaccacaagaacagatcccaaattttcccggaacaattccaactgcaaagaacttatgcaatgaaaggattcagagggctcttaggtttccatttggcttgtcctacggtcaaggacgatctgataccaacttgtcacgcccaaaaattcccgaatagaattccaagcagaatgtgcattaaaacccccgtccaggaccggctggggtacacaaacgacaatgttgacataaagatccacgtcttacaaacattataaaagtcttacataaatgcagcggaaaacgaaagataacaggagctaagcctagacttgaactgcagcgggaacaccactccgacggcacggacgaagcctactcctcagagaacccgccatcggacacatactcatactctggggttgggggaaaataaagtaagactgagtactatccactgtactcagcaagtcacaccggaataggggtatgatgcagggattaacaagggatagctatacaggttcatttgcataatactggcatttataaacagaagttgaatgcggaaacagttgtaataattaatcaatattaatcatccactgtccaatgttacaccacgttgcaacaggcccaaccatccacccgtactatccaatttcattacactaaactaggatgagactaatcacggtgaatctggttgaccgcccataaccgcgggcacggctatttgaatagttttactctggtcagaggtgtacaactgtacccacgagacacagccccacgacacgtttccgtgcgccgacatgccaccacgacataccggaaagaagccgtgacaggacccttcgcgcaaccccctctagccaagcacaccacacctcaggtttcacccccgtccccagcgggcgacaggaagtcccctctcgtgcctaggtgaatccggaagccgcataggccgtcacagggcccatccaaactccatcacgcccacccttgcctggatgcgtcagctagagaaaagctacactataagcccagccgttgcccacgctggcttgtggtaagcacgataaattcttctagggtttcccgcgaaccggtccttaattgctatgggtgcgactagcaaaaccatgtacccacagcccaccatgtgagttattttaattaaccaacaccaaagcggtggtactattccaatattttaaatgttatttccccattgtgtgctagtggaactaagcatggctaagcaattcctagtccaaagtctattcatgttataacccgaactaacaaaggagcatggtatcaaaatagcatggctgtaacaataggtaaacatcccatagtattattgcaaaacaaatgcagtatttgaaagaaaacattagaacatttgcaatataggatcaacatgatcaagtgacaagcatgacttgccttgctctgctgctggaggaacctcggcgactatttcgaagtacaccggagcgtcggaagagccggaatctaacgacatacaaggcaaacaatgcaaacaggctataagactattgaaacagagaacaaaaccatttttaatggattctacacatttttcttgatttacggagacttgaatgggcttaaacggagctcggatgaattagttatgatttttagaagattcactgtgcttattactataaaaaaaactttaatgaattattgcgcaataaagccttccagggctgacgtcaacaaggggttgggcggcgccgacaggcgggtcccactggtcagcggctcgggacagaggggaagggggcgcc

SEQ ID NO: 25830 - DNA, 3698 bp, Oryza sativa
  unsure (1)..(3698): unsure at all n locations
acgaaaaagatcaaaaagcaccaaaacatgatttttggacatattggagtgtattgggtgcgttcgtgaaaaactcccttcgtcattcgcgcggcgaacttttgtcacttaatgccattattggcacacgtgggtgcaatgtttttgaccgaaatgaaaaagttcaaaaagctccaaaaacatgatttttggacatattggagtgtattgggtgcgtttgtgccaaaaactcacttcgtgattcgcgcggcgaacttttgtcagttaatgccattattggcacacgtgggtgcgatgtttttgaccggaatgaaaaagttcaaaaagcaccaaaacatgatttttggacatattggaccgttcgtggcaaaaactcactttgtgattcgcgcggcgaacttttgtcaattaatgctattattggcacacgtgggtgcgatgtgtttgaccggaacgaaaaagatcaaaaagcaccaaaacgtgatttttggacatattggagtgtattgggtgcgttcgtggaaaaaactcccttcgtgattcgcgcggcgaacttttgtcacttaatgccattattggcacacgtgggtgcaatgtttttgaccgaaatgaaaaagttcaaaaagctccaaaaacatgatttttggacatattggagtgtattgggtgcgtttgtgccaaaaactcacttcgtgattcgcgcggcgaacttttgtcagttaatgccattattggcacacgtgggtgcgatgtttttgaccggaatgaaaaagttcaaaaagcaccaaaacatgattttttgacatattggagcgttcgtggcaaaaactcactttgtgattcgcgcggcgaacttttgtcaattaatgctattattggcacacgtgggtgcgatgtgtttgaccggaatgaaaaagatcaaaaagcaccaaaacgtgatttttggacatattggagtgtattgggtgcgttcgtggaaaaaactcacttcgtgattcgcgcggcgaacttttgtcaattaatggcattattggcacacgtgggtgcgatgtttttgaccaaaatgaaaaagttcaaaaagcaccaaaatatgatttttggacatattggagtgtattgggtgcgtttgtggcaaaaactcacttcgtgattcgcgcggcgaacttttgtcaattaatgccataattggcacacgtgggtgcgatgtttttgaccggaagaaaaagttcaaaaagcaccaaaacatgatttttggacatattggagtagtgtattgggtgcgttcgtggcaaaaactgacttcgtgattcgcgcggcgaactttggtcaattaatgccattattggcacacgtgtgtgcgatgtttttgaccggaatgaaaaagatcaaaaagcaccaaaacatgatttttggacatattggagtgtattggcacgctcgtggtaaaaactcacttcgtgattcgcgcggcgaacttttgtcaattaatgccattattggcacacgtgggtgcgatgtttttgaccggaatgaaaaaattcaaaaagcaccaaaacatgatttttggacatattggagtgtattgggtgcgttcgtggcaaaaactgacttcgtgattcgcgcggcgaacttttgtcaattaatggcatttttggcacacgtggggggtgatgtttttgaccggaatgaaaaagttcaaaaagcaccaaaacatgatttttggacatattggagtgtattgagtgcgttcgtggcaaaaactcaattcgtgattcgcacagcgaacttttgtcaattaatggcattattggcacacgtgggtgcgatgtttttgaccggaatgaaaaagttcaaaaagcaccaaaacatgtagtgtattgggtgcgttcgtggcaaaaactgacttcgtgattcgcgcggcgaactttggtcaattaatgccattattggcacacgtgggtgcgatgtttttgaccggaatgaaaaaattcaaaaagcaccaaaacatgatttttggacatattggagtgtattgggtgcgctcgtagtaaaaactcacttcgtgattcgcgcggcgaacttttgtcaattaatgccactattggcacacgtgggtgcgatgtttttgaccggaatgaaaaaaattcaaaaagcaccaaaacatgatttttggacatattggagtgtattgggtgcgttcgtggcaaaaactcacttcgtgattcgcgcggcgaagttttgtcaattaatgccaatatgggcgttcaaaaagcaccaaaacatgatttttagacatattggagtgtattgggtgggttcgtggcaaaaactcacttcgtgattcgcgcggcgaacttttgtcaattaatgccattattggcacacgtgggtgcgatgcttttgaccggaatgaaaaagttcaaaaagcaccaaaacatgattttggatatattgcagtgtattgggtgggttcgtggcaaaaactcactttgtgattcgcgcggcgaacttttgtcaattaatgctattattggcacacgtgggtgcgatgtgtttgaccggaatgaaaaagatcaaaaagcaccaaaacatgatttttggacatattggagtgtattgggtgcgttcgtggaaaaaactcacttcgtgattcgcgcggagaacttttgtcacttaatgccattattggcacacgtgggtgcgatgtttttgacccaaatgaaaaagttcaaaaagcaccaaaatatgatttttggacatattggagtgtattgggtgcgcttgtggcaaaaactcacttcgtgattcgcgcggcgaacttttgtcaattaatgccattactggcacacgtgggtgcgatgtttttgaccggaatgaaaaagttcaaaaagcaccaaaacatgattttttgacatattggagcgttcgtggcaaaaactcactttgtgattcgcacggcgaacttttgtcaattaatgccatcattggcacacgtgggtgcgatgtttttgaccagaataaaaaaagttcaaaaagcactaaaacatgatttttggacatattggaccgttcgtggcaaaaactcactttgtgattcgcgtggcgaacttttgtcaattaatgccattattggcacacgtgggtgcgatgtgtttgaccggaacgaaaaagatcaaaaagcaccaaaacatgatttttggacatattggagtgtattgggtgcgttcgtggaaaaaactcacttcgtgattcgcgcggcgaacttttgtcacttaatgccattattggcacacgtgggtgcgatgtttttgaccgaaatgaaaaagttcaaaaagctccaaaacatgatttttggacatattggagtgtattgggtgcgtttgtgccaaaaactcacttcgtgattcgcgcggcgaacttttgtcagttaatgccattattggcacacgtgggtgcgatgtttttgaccggaatgaaaaagttcaaaaagcaccaaaacatgattttttgacatattggagcgttcgtggcaaaaactcactttgtgattcgcacgacgaacttntngtcaataatgccatcattggcacacgtgggtgcgaatgttttgacccggataaaaaaagttcaaaaagcactaaaacatgatttttggacatattgcagcgttcgtgcaaaaactcactttgtgattcgcg

SEQ ID NO: 25831 - DNA, 5076 bp, Oryza sativa
  unsure (1)..(5076): unsure at all n locations
gcagcccgattntttgacatattggagcgttcgtggcaaaaactcactttgtgattcgcacgacgaacttttgtcaattaatgccatcattggcacacgtgggtgcgatgtttttgaccggaataaaaaaagttcaaaaagcactaaaacatgatttttggacatattgcagcgttcgtggcaaaaactcactttgtgattcgcgcggagaacttttgtcaattaatgccattatttgcacacgtgggtgcgatgtttttgaccggaatgaaaaagttcaaaaagcaccaaaacatgatttttggacatataggagtgtattgggtgcgttcgtggcaaaaactcacttcgtgattcgcgcggcaaacttttgtcaattaatgccattattggcacacgtggctgcgatgtttttgaccggaatgaaaaagttcaaaaagcacgaaaacgtgaattttggacataatggagtgtattgggtgcgttcatggcaaaaactcactttgtgattcgtgcggcgaacttttctcaattaatgccattattggcacacgtgggtgcgatgtttttgaccggaatgaaaaggttcaaaaaagagcaaaacatgatttttggacatattggagtgtattgggcgcgttcgtggcaaaaactcacttcgtgattcgcgcggcaatgtgaagttgaccctttgagggtgctgacacaaggaagggcaatgttggtgtcagaattatgcgaaatgaaagagaagacacaagatcagggagaaggaggacatgcttacctctggaatttcagatgagagtgccattgcaagctcggagaagctggaagaacaaagggtgaaactgcttggagttggcccctagaggggttgatggctaggaattgctacagtagaaggctgtggcggaaatccggtgggaaggcgaaagagctcagagcaacgggttaatatttgtgggtctaacggttaagatttggaaagcctcaatagtccgcagggtcagtcgaagcaaattctattgtactttcccaagtacagcggaattggggggcatgtgtgaatagaaaaatctggcagcagaagtcagatggacgaaaggaaatcaagacagattcggtgcgaaaacatgttgggttcaagattgaatcatgcatcggctaggaaccatatcggccagcaaccaggaccgaccaagtcgacagatggttaagcccgccatcacaatacgactcgggctcagcatgggcctaaatttggaacgaccgtcaatgccaattagagatgaaagctcaatgagtcagtttggttagttttggcaagagaccgccatatatggtcttgtctgtatcttagagtttgtccgtgatattggcccgggggcctgtggtatagggggaaagaaagcccttcccgtgtggcgcgtatgggcgagccccctccccacaaaggggtcgtgcccacgcatagggagcagcggcctgaaccccccccccccttcgggctcagggtacctcgtcatacctctcgggcccgaggggttgaaccgtccccgaggcccttgctcggccgccacatggcgtccatgtgggagccttgagcgggcgtgagcaccatccgccaggcgcacttatgagtggtgcggaaaccacccccgtcacatctaatgcaacgtggcgtggcatgcggcgcaggccgaccgacgtgcgcctgcgaccaccctgtgaccggtctatgaccaggcgatggatggatgggacaggcggaattgcaccgacgcgctgacttgtgtcaggcggtgaggggctaggtatgccctgtcccgtcatgtgcagtaggaagcccagcgtccctcgcccagttgacagtggctttaaccggtgatgcatgtccggatcggtcctcccaatgcgcgtgagcccacgaagtcaccaaacatttaataaggaatgatgggggatgtcccccgtgttagccggagggattcagtgggggccacccgagattagccatgtggatcgcttccggcccaaggcataagatgtattttaatatagacaatgtcggccctctcccgatgggagaggacaggagcgacgcgtgtggtatccccttcatctataaaaggaggtccctgccccacgagtagagagaggttctttgaaaaaccggattctggacggaaggctggcctagccctagcttgttcacccagaatctagagtccttgtaaccatatgaagatcatcacacacataggagtagggtattacgctcgatagcggcccgaacctgtataacccctctctctctctctctatctctctctttctctctctctctctctctctctctcgccttccaccacgtgagcccgatttccgcagatccatcgcgattgcgagaaaggatactcctcagcattgctgtcacgccctaaaaatcgcttaatttaaaaatacattgtttaagtcatctttagaaattaaattaaaagcctacaagctaaaccctaataatttaggaaaaatttcaacataaaaataagctagataaaattttattaaataatttgcttgttcctctattttctagaattttctgggaattatttgagcaagggaagtatttttaataattgaaacaatatttcacaaattattttcattcaaaaagtccaaaaatcccttccttaaagccgttgggccaattttggcccaactcctcccgtcagccgcgcggccgagccggcccagccaactcagccggcccagccagcccgccagccctccccctcctgtggagaccgacaggtgggccccacctgtcgggagctccttcaacctccggccggccatggagccgagcccgagccgccccaccgcgccactttgccgcttcgaatccgcctcaatccggcctcgattctttcggatttttgaggggtttttatcctctcgttctcctctatctttacccccaaaaatcggagcaaatcgttgagtattttatccgagtcgactcgttttcgagtttatctctaaaaccgagtttttgattacccgagtcgatttcttgcgggaggagtccgatctcttccatccaaggctatatataggaccccctagttcccctctttcgtttgcccctattaccaagccttcccgtgctccgtagcttcgtcgccaccgccggcaagcaaaccggcgcagcggtccatctccggtgccgcgcgccgacgtcttcatcgtcgtcgccggtcggcgtcaccaccgttgggtgtgccgtggtgaggggaaagctcggcaaccttccttttccgtcaccggtcaccggagctccgctggcccgtgcaagccgagcccgccgccgccgcccctttgtcgccgccgtcgtcgtttgtcgtttgactcgagggtgagtaccgtcgggttcgtctcgtcgccctctacgtgtccgtgtcctccaaattcgcagccgaccatccaatctccggcgagcttgtcatcctagccggccaccattgatgatgtcatcatgacatcatcggtttttctttttcccgattttctaatagattaaatcttcagaaaatcataactaaataaccgtagatccgtttcaggtggttcaagttgctaaatttttctaaaatcaagatctacatgttaaaaatatccacatgtactgtttatgcttgtttttgtactgctttgttgatttttgtttaattgctttagtttccgacgttccggaggagagtgtttccgttgaggaaggttccgaatcgtttgcggaagctcaaggcaagtcacatagatcccaaacaaccctttgagcatgttgaacccgtttaaagctattattttatttcaactatgcattattttcgaatgtcatcgggtggtgaacctttcccagttaattattggccgaagatgactttattttcctatgggttataatttgattagcgtgaaccttatatattggattggttcaggtaaatgctatatgtatgtttgcttagccatgcctagaaacattagctaactaaaggggttaaatataaattatattatactgtgattattaatgatggttataataaatggtagctcacgatggtgaatcgtgtgatgttaattaattgataattaaaacctggttaaggtgggttgtgagcatatggtgttgatggttgtgctcatgacaattaaggactggttcacgagctactgttgtgaaacatttatcgtgccaaccacaagccagcgtgggcaacggctttatcttttgtatagcatgattcattatagtgtgccagactgtgaagcggcgagaagtccgtgggggtcgctggggagtccattgcctctggttttgagggggagattatgatccaggaacggtgcattgtggtgagttgtgttgtgcgaggggtattgtcacagctcttttccgaggtaccgtggtggtactaaggcgcatggtaacatgttgtgggattgtgtcttgtgggtacagtggtacacctctgatcagagtttaatctattcgaatagccgtacccgcggttatgggtgagttgagcaatgtttttcgtgattagtcccatattattaatcaatggtaattgtgataattaatttgactcctggtttggaatggtatattcctggtgtggaggttgggtttgttcaaccggggttagttgttcaaatgaggttgggcctatgcaacacgggtgtgttgtatggtgtttatttaatattgattaattatacaactgttttactattctcttgaatatttattaaatgttgtttatgcaaatgagctatattatgccatcctttgttatcctgtgcacttgcatatttgctgtgtggcttgttgagtatgtcatatgctcattcttgcaatattcaatcatcagaggaggagtatctcagcgaaggtgatgacctggaggattaagcttgttcttggttaagatgcctgtggagtggagtagccatagctgttccgtagtttgttttagttttattttttccgctgcgtagaat

SEQ ID NO: 25832 - DNA, 38831 bp, Oryza sativa
  unsure (1)..(38831): unsure at all n locations
tgtcagagaggattttcgtggtgtcgacattctttcagtgtacaaaaatagtccaaacaaagaaacattacatctagggcattaggcttggctctgtcttgttcaaactgacccttcccgatcaccacatgctccaacctcaacttgccaaatgctttcttgatgatccggccctgcaacatcattaagatgagcaactatccaacaggtttagccgacgtctgaagataaaggatcatctaacatacctcaacagaatgtgatgttgctaaccgatagacgtgaactgggcgtgtttgaccaatccggtgacatcgatccatggcctgcaaatccatctgaggattctgcagaatgatggcaaaagtttaacaaatcacaactaaaccagctaatagaaagtaaagttacagtaggcaggagcgaagaagtcactacatgcctacattccacccattcaaacaggcagttagctaattttaagtaaagttacagtatgcaggagcgaagaagtcgctacgtgcctacattccacccattcaaacaggcaggcggcgtgcaaaaacatcttgtaatgttcttgctgtaatatgaatatttagcctgaagaaatacaataatatcaatagggaattacccagtcactatcatataggatacaggtatccgctgaagtaagattgataccaagcccgccagcccgtgtgcttagaataaagatattcatgctgctgttcaagtcattaaattctgctatctgcaagagtagtgcacaaaatggtgagaacagtattagactaaaaatggatgttaaaaggtaacatggcgaaaaatgagaatcctaattgtattttaggatagtatagtcaacgtatatgcgtctagaactttacacgccaagtagtaatcagtaatgcactggcacagcctgctttacctgcctcctcctctcttccaacttaacactcccatcaattcggcaaacctgaaggccttttgtttccaagtagtactcgataatgtccaaaacttttgtccactgtgaaaatattagaacctacacaaaataccggttgaggtctagtttttttccttaaagagttcgagctagcatttgcattaatgtaatccctgaattaaacagaataggagagaacaatataccttgtgcttccgtgcaagcagcaaacttagcaatctgttcaagagctgaaatttgccgcactgttccaagagcttctcaacaggtggatacagacctacagaaagacaataaagcaaataagtgttaggaaacgagcatgtgaatcaattgataacagatgtccaatgtggaacaacctgatgagtcatacgcagactccagaagatcaggatggttgcaatttttcctcaactgaattaacagattatttagctttgccttaatgccaggtttccgcagaactgcaatattcctcagcacttgtcagattaacttgtcaagcctacaggaatgtgtgtgtaggagactaggtgtacaagcatccataccaatttctgatttttcatgcaggtattgatcaaatgtttgttcaaccaagtgattctggatttgtttctgatggtcagtcatgttagcgtaaatgattatctctttctttcgtggaagcatatgctctacatcctccttcatccgccttagaaagaacgggcgcaatatggcatgaagctttgaaacaacatcgacttttctcttctcttcactatcctcttggtcttcttcacctcctttcgcagaaaagtcaaacctgtatggcactcgtaaggccaatgcaggcaaaacaaatcaattttaatgcatagggtacctaaaatgcattagtatattctttgtagcaaagaatgatcaaacatgttaatcgcagcaaaatccatctaaatagtcaatggtagacgcaaaagtaaaatatcatgtcagtacaccatagaaatcagtaggtgtacagcataaatttctgctaatattcaaaagacacattagcagacaccacatacaaaataatatgcatactcacaacaacacatagggcattcaactttacacttcataagtaaaggcaatgagaaaaattaaagcaatgtcttaagagtagcaacaaactaatggaataacatatatatagacagggttagttgatgggaatataattgaaattgctgttaagcagtttaagaggttcttttacattgttttgaccaaattgctagccctcaaggacccagacagatgctgacaaatgtctcgacttgagaaaaagaatatctgctctgctcaatgcatacacaaatgaacaagttgacaataaacagtcaggaaatgattcaaacgtgagactaacaattatttgccggaaaggttaagatggttataggaatgattgcatggtatgaaaatcttcagttactatcatatttgtatttcagtgctgagacgtgagactataaaagcacaaaccgcactagtgaaggtatatatggggaaagggtggtactattatcagcaaaatgaataataccatgactcaaattcttgtgtgaagagaatatatcaggcaaaatgaagttcagcagggaccacagttctgctagattattctgaagaggagttccagtcaaaaggagcttattatccattggcaggcgctttagctcccttaataataaacacttggaattctttagccgatgcccctggaaaaagccatcgaagtaaacatgtaaatacaaaactaaaacagaaaaccagaaggatgataactaattgcaaggtttctccatgtacctcatccacaataacatacttccacttatagtgagcaagatgctttgcatctgacatagccatctcataggaagttacgattaatggaaaatctgggccagtggttttgggcatgaattttctccttatctctgcccgggctgctttgtccccatgataaatcagaccagtcatagatggaacaaacctgaaagcaagcagcttcacttaagaatatcaatcaaggataatgaaagaataatatggatatgttaccttgagatctcgttcacccagtttgagagagtggataggggagcaattatcaggtatggaccatcaagacccttccccttgagatgggcaagaaaaccgatagtctgtattgttttcccaaggcccatttgatcagccaatatcccattaagcccattctgccaaagtgatattaaccacttaacaccctttatctggtaggacttcaacttcccgccagtcattagaggaacaagtctggcttgctctttttcccacctttcttcttctgtgagagtacaatcctcaggtgagcaatcttcatgagatcttgtaagcatgactgccactgctttcttggcttttttctgaacaatattttattttgtcggttagaaatgaaatggtttgcttgaaattttgatctatgtataaaacaagttgccacattcatacagaacactgagcaagctattcacttaaataatataattgatcctacgaaaggatctgaaattctgaataagtgtgcatggttctagagaaatttgaaacaagcccaaaaatataaggcacaagcaaaagttaatggtttttaaacttttttccttcatacggtgtccctctatcttcagcattcatgaataaacaacctctaattagcaagatagtaataacatatataaggtgattttcctctgacactcactagtattgagcattttactctggtattttcttgcttctctaacctcctggttcactatctaacagtcaaaagagcctatttgattgatatactaatcgctaacatttgccacaaatttgtgccccacattcaaacccctaaaaatatcagggtaccagaagaaggcggttgcaaatgtgttatggcgagtctttaaacaccccttctaattatgattttctaacaatgtactacaggtggaaagctatttagtaaatattgaaaaactggcaacattagtactatttgaaatccagatgagcaaggtcaacataagcatatcccattaatttagaatataggaaaccaaattactccatgtatgaagctagaactcacatcattgtactttggtgcagaagtagctttcctctttctgccacgcccattcttcttctcttctactggctcctcttcagcatgagtttggacgccctccaccttagccaacagcacaaccatcaacagaaaaatcaaataaagcataggaagaagcaaaaagagtcatgtggcgcgtggagaaacaatacatacatcagcgatcgtttccatcttctcaagtagaaattctgaatagagttgtgtctgtgatagtagctcgtccaacttgttaaaacgtgcatttggatcaaaagcaagtcttgcagcctcttccctcttccgtgctacctcttcttcttcagccttaacccgggcgtcgtgcaacttctcttcctcctccttcatcgcatcagtgatgagggatgcatcaccattcttggcctcaaggtcaatcggtagagatggaactgcatccacaaaatcatcagctttttcctccttgacaggctccaataactgaccttcttccttcaccggcacagtgagaggtgacaaatcactgttgttagccgcaggttccacattcagggaagaacttgcatccacaaaaccatcaactttctcctcaataagcacatcgagatgatcctcctcttgcttaatcgcctcggtggtatccaagacatccccattcttacattcagaaatcttctaacaacaacaactcaacgtcaaccaaaaaaaacccgaaatgcggaagcataaaacagaaatagagatatctgaaaaaaaaaaaggcattcacaaataaatcacctcatcatcctccagaacggatgtcggggaatccacggtggcagcggcggccgcggccggggatgcttccaccttcatcccagggacggatctaacttccgacattgtgggggtcagatgaaccttcttaaaccgcccctccaaactttttggagaacaaacaaaaacaagccgttagtactcgtattaatgttaaggcaaatcaataggaaacgctagagaagctagggtttaacgcacgtgaactcgacactccaagaaaagaaaagatcgagaaaaaaagtgggcgagagaaaaagagaggatgcggaatgctcaccagccaggattgtggcgggaagcagcaggacgacggcgcccctgccgcgctccctgctcgcgaggagatggagatcggcggccggcgcggcggaggcggaggaggggggagacgagatgggaggtttttcttttgaacgcatataggggacgggaatgaaggggaaaagccgtgttgcgctcccactttgggacctgcactgggtggtgggacccactccttcgggagatggcgtgcaacggttcaaaaattgaagtgtgtgggcccaggccacactatctgggaggtgagtggctacagtcctgtgtacttgaggctgtttacccccccccccatttaattcaaaggaaattttatccctcctcaaattcctatgtttttcctgcggctcaatcaaacggtcattcctatgtttttttctatgttttgcaatcctctattttacacttgtattcctaccagaattctatgtttttcctattcctccgttttttcgttcctgtgattcaaaggggcccttagttcgggggaaaaaatgtgatgtaacatcgtatatttgaaaaaactaattcataactcgtctggaaaccacgagacgaatcttttgagcctaattaatctaccattagcacttgtgggtatcgtagcacttacgactaatcatggactaattagactcaagagatcgtcttgcgattccccccataactgtgcaattagttttttaatctatattttaatgctccatgcatgtgtccaaagattcgatgtgatgtttttagaaaattttgggaagtaaaccaggccttaatttgaatatctatgtccttgggtcaaaattttaatttggataagaccgtgttcgggagataggcgcacataaaatagagcgacatatttttttcaattaagtatttggtacttttataaatttaattaatacttttgtatagaaactatttctttgcgaaaaagtatcgtttaacagttttaaaatgtgcgtgcggaacacaatgaaggtgagttgggaatggtggggaaaaacacagcatgttgtccgttgattctttttggatagagagagtactcttttttttctataataaggctgtgtttacatcttagaggtaaaaaattttgccgtatcacatcggatatactgacacacatttgaagtattaaacgtagtctaataaccaaacaaattacagaatccacctgtaaactgcgagacgaatttattaaacttaattaattcgttgttagcaaatatttaatatagcaccacattgtcaaatcatggagcaattaggctcaaaagattcgtctcgcaaattagtcgcaatttgtgaaattagttattttttagcctgtatttaatattttatgcaggtgttcaaacgttcgatgtgacaaggtataaaatttttgtgttggaactaaacaccccctaatacactttttttgacaggagaataatactcctcccaatatttaggtgcacaaaattatagacgtatgcgtgcattcaaaattttgctcttaatactgtacaaattttctcacaaaagaaaaaaaaagaagctaccaatacatttaaaatgttaatatgtggtacatatataatttcatacaaaaatatgctcacataataattagacaacacataaatgttcaaaatgtgatacaactgatacattgctctcttacaatacatgaactacagaattatacattggaagttctctttatggcatgtttagttccaaaaagtttttcccaaaaacatcacatcgaatctttgaagatatgtatggatcactaaatgtagattaaaaaaactaattgcagatgaatcttttgagtctaattattccataatttgccataagtgctaaagtaacccacatgtgctaatgacttattaattaggctcaaaagattcgtttcgcggtttacagacgagttatgaaattagttttttcattcgtgtccgaaaaccccttccgatatccggtcaaacgttcgatgtgacacccaaaaaatttcatttcaccaactaagcaggcgtatagtatgttttcgtccgtcgcgcaagtgtccgcttcgctcacgttccaacctacccctgcgtgcccttcgctcatctctcccaaagaaacgaactgaatcagacacacaacatacagtaacaaggcaataaagatgtaaccaaagaaatgaaccgaatcagacacacaacattcagtaacaaggcaataaagatggaaccatgaacatatgaacaaagctaaccaaaaatccctccccaaacccaatcttatgaacaaattagggctaacacacatgttctgtttatggtaagacaaattgaatccaagaaaacgaagagattttgagttggagaaaagacaaaatcaaatacagatgaaggtgtcataaatgtaaactgatccagccaaggtggaaatcaccttgtcatctttaaagattgggcatcattacgtccaatctagacttatctgtgtagctggcactcgtcaaataaggcctctcatgcgaataaacacattgggtgagccagcgccccacgtggtcccacaccctctgatccacacactcgtcaaacaaggcctctccgatgcgcaattgactggtgggtgacaatgaccaagtgagggagggaaccaccttcaccgccgtcatgcaccaacttctcttaccctccccttctttctatgttgcgagagagaaggcaagatgagacgaggttgggttggggatcggagtcaccgctcaagatagtgcaagtgggaatagaaggggtagggctgcgatattcttcatgtagtgccgatgaaaaacaatggatagcactataatctagaatctagtgggaattagaggtgccttttccccgctttgcactctagcacaatttttcagaactattctgttccgcttcagtttttattgaatctatactatgtttaattgaactccagcactatataagttaaatttattagaagcttgcgttatactccctccattacttaatacaaggcgtaactgttcacaacacagagaccaagaaatagtataaataccaattgcagtgattaatttttgtctcatttacgcttcattcactttgcctgcaaccaatcgccaacactgcttgttgacccgatatcttctgcatgcataggaataggagaggagatgatagttttcaatgcttgcatgcacatcaaacgggagcaaaagtaaataccgccctatattctgaaacgttaataaaatatagctacgccttctatttaggaatagagggattaccaaacatatccatattttataaaatactctgaactacgtagtcacgagctcataaagagggtggtcgcgtttcttcttccatttttaattagaacaagaaaaatacagaaaggagaaaaacaaaaagaaanagnnnnnnnnngggggggggggagatgcgctaatccacggacgagctgtgacgagcttgaccgcgagtccgcgacgcgtgggctcgggggtgagacatggcttccccggcgccgccgcccaccgcccggctccggccttctcaggccgccagcagtgcctcctcctcctccttccctacatccatctgcggccttggctcgctcggcgacgcctctagggtttcctccgtctccttccggcggcgtccaccagcatcgcctctcgtccggtgctcccaagaccctggcaaggtagagcggcttcttttcgtttcgtttactcggtttttaatcgaacggtgctgcgcgggttcgctttggatttggctagattgggaagaatgctctcgctagctgtattatcgaattttctgtgtgaactacaggaaagcgaaatgtgggtcgttcgtcacacatagggtcatgccagttgccaaaattgatgctgggcgttcgttttaggctcatgttgttagtgtaaatgtggcacaccgatagagatgcggaaaagggttattctgtagaaatgggagtatgggttggtcctgttggacagggttagtatctaattttctttatatcaggaatgattctggcagtatatcaatgtaggcatcattcagttattctgcttttgaaagaggaaccacctgtcagaaaaaaaaggaactggtgcataacaagggaaaaaaaagtagccgccaagaaaatttgcaagcaaagttaggtttagacgtaaaaccacagtaatggtctctggttgactttactaaaaaagatgagtggtcttgttgtaagaacgttaactgagaattttctatataatgcttgaagcaagcacacacgtgttggctgcttactgatatctgaagatgatcattctggcatttgtgtggtgaagctaaaagaggatttatgttgcggtgagattagaggaaatgttgattgctgaaattagttgcagttttgttatgtgcagagaacagcttgtttataccttcggaatatggaagtgcattttcattttacaaacttatctagccaatgtaacactggtgcaatgggcttattattattctttttttgcaaatctaaatacataattatttaaggaaaaaaactattgggcatgaactcttagtgtaaaaaagaaacactggttaaaaaacaacttttgaggttgagtaaatgtgattgaaataaaaattaacttggctgcatttccttgttagattgaagtgtttaatactgaaggaaccgagcagtcacaaggaggctccactggtatgatgtttgcgctgtgcacttattgggtgtgtttggctggccaactacaacggctgtgcagcgctgctgctgcagcggctacagtagaaattgtatattgctactgtagctgctggctgccaagtcacaccgaataggcccaattttattcttcaacttgcatgtgttcttttagagctgaactatttttttctgtcgtacaggttcgataaatcatggcaaatactcaacaaggagtttctcctctaaagagtattcacagctaactgtaaatccaatgactaataatgataccactgttgttcgctatctaaatttctatggcatagcatttaggcacatttgtttcatgaaatgcaatgtctcattagaaattttggctggagcttgcactttgcaccaaattgtattgcatgagtgaatacctcactgaagtcgatgatcttgggtctatcttgcttcttgtgattataagcaacaatctgctgttaatgtttaattgaaataactgttggcagaaggaaacaccttacagagcttatgagcaaaacttgtattggcactgggttaatgatttcagatgcaaactggatatagaagcattttgcatgcacacttcttgttgagaatgaaactaatatatttgaaattcaggctttcagatattttcgtgaattatgataactgtgcttggaatggcatattcattttacagtgctaatattacaacttataaccattatctacactgcttctgtgtcagcttgcttgaaagactaaagaggtatggtgctgctggtgttttgtcatatggactactaaataccgtctattatgtcacgacatttttattagtttggtaagtaagtcagtgattggtactgtgatggatcattaatttttatcttggtgttacacatctggaacgttcacctgtgtaagaatgttggtcaagtgtaaagtggttgatatgttggtcatgagaaagagggttcagttggtagctcagcatttccacagggtcaaacgactgcacatttattcgggccatcagatggaaaagagaataactgaatgacttactttttcaggtttattttttctcctgctcctggtaagatgggttatgctgcggcagtagagaggtaatagctgcaaccaacccccatcccgcgcacgcatgcacgcaagcacgtgcacacagggttttctgatcttaattagttttgtgttactaaaagcagattcctcaagttgatggcaatggtatgggctggcagtcaagttactaaaatttttcgagcaggagggtgagtttactttcataggactggtttctaaaactcagcaaatttagtgatcatttataggattttttttctggatcagccgagtatttttttcatacttttcaatattaccttgaattacattctcagatgtcagatgtaccttttgaaattttatagaacatgtattgctgtcaaaactgactagtttctgttctgagagatgacttgtttggtgtacaatagggcacttgcattggctccttttgttgatagagggctaagatggttcacagtcaggttcaacttcaaatcagaaggaaaggtaaaatactcatctcttgctttgttatcccaatggggagcagttaaaccgggaacgagaggggaaactacatgctagatttaagatttaaatatcagtcttctaatgtctgttgcttcatatttatcaccatgcaggcatttgctacaattgttgggttctgttttgcacttgctgctctactgttctttggattaacaatactttgggcgtaatacacctgtcgctgctgaagaatcacatagaagaccaagaacactggtgaaataaaaagattgggttcctcctcacattgcggaagtgaacctttatgcaatcagtaatgtggcttccactttactattaattggcttagctcttcaaaactatggttctctcggtaccatgtgtttgtttttgaaaacaggtttccatgtattcttgtatgagtagctattctcaattctcatttacataattcacctgcaagtctgcaacctggtgcttcattcgttaatcgttcataatctggaacatcttcagtgtacaactgtacatattcctgtaacatgatccttggggagttgtgtgtgttttcatgttccttggtgcgtgcagacattgtaaaacaaagaaagtttgttctggaatcttgacaaagaaaaccttttgaatcaatacacattgatgcttctggcgagcctctcttgactactgtaatttgtaagatcaataggctgttccacagccagcacgtttgtttcctctgaagaacttccttcacttcactgctcaatgcacagtcgtttctccgttaaaatcagctgcattgcctgcatttgctgctgtcacatggatgcaactatcaacaagctgatgatttccatggcttcttggagagggtgggttggaagctaaggtagtaacctccccattcccatagccatgaatccctctccatactcttgtcagcaatcttgcaagaatgggtgcctgcactgtagcttgatgccaatccctatctctgctgatgtttctgcccatccgatgatctgcagctatattggtgcagtgcatccaacctaacaatgttgtcactctgacctttcgtcagttggccaccctcgatttttctcaatttcgttagcatattttttaaactgataaacgatgtgacttttaaaacgggctcttaaaatcttatgacaatacatctgtattttttttcttcacgaatctgtacaggctgccacatgggctccgagccaggaggagcggagagccgtatccatccccgatcgccggcacattatcggtttcttttctcagagtgagtgcagcggcggcacattctccgtgattaaaaactctcgttgagcaataattatttcttgtctcctacacatcgtgagcttctactccatatcaacccaagaccaaatggattattctttgtaaaaaccccatatccatgtgaaccgcactacgacaaaaactaaagaaatttccactttgcgtgtcgactacaagtacacagctccaaagtaaacgctcatgcgtcgagttcaggtttcattcgttccatctgccagataacatgaggcggtaagctcgtgagaaggttcacgtttctaataagaacaggtcgaaaaccgtgaaatttcaagctttttcacgtgggacagaaacagatttcgaggcggagaaattcaaattccaaacaataaatttcagcaaattttgtttaaaatttatcgaaacccatcgtatcactaggagtcgagattcggcagtctataggcatttaacgaaaccatccctgtgatgactccctccgtttaaggcatttgatttcgtcctagataaattagacttctcaaaatttaaccattttttttaaaaaggggatattgacaattatgataccaaataaatacactgcaaactcataattcacagtggatttcaataaattaaatttgttgctttaaatgttggcgcactattatataaatttgatgaaaattcaaaaattttgatttagaacaaaactgattgtcttatattacaatactatatggaaccgagtaacactagtctacaactcccttcactattaaatacttacatccgttttttaatatatgacgtcattgactttttacataatatttgaccattcatcttattttgaaaaatttaagtaagtattttttttttcttttatagcggcttgatttgtcactaatggaacttcaagcaatacttatattttgggatttccataaaatttttaaacaagacaaatgatcaaagattttaacaaaagtcaataatgtcatagagatggcatataagtatttgtgggttgcttagacgggcccatttgagttcacgtgagatgaaatttaagtacgggcgcacaaaacaataaaactattagctcatgattaattaagttttaattatttcaaacttgaaaaatagatctatctgatatttcgtacgaaatgtaccatttagcatattgaaaaacatgctaacaaaaatctaggtaaaatttgtatcttaataaaaaactaaagggctagtaaatattgagattttaaaaggttaccttccaatccttccattggttgactaagaatgctttaattattgtatattagaatccttgtcaaaattgctatgtactcatggagcgttgttcgttatggtgagggctaaagaggatgaagaataatttcatactataatatatgtgtaataaatcctttatattttctcacacttgattaataagtactatattcggttatgttttgagtaatgatacaatcttcaaaatatatctttcactatattttttctattacaatatatatatatataataaatatatttatttttcctatagtactttgtaagataaatctactaaataatttaatcttatttttatccaaaactccaaaaatcatgaaacggggagtagagaacaaaatgaaaccgcgtccaaattgcaaaggcgtaaatcacccccgccgtgtctgaccgtttcgcttcggtgcggctcccactacgcgcctcctcctccttgtcctcacctctctcactctcctcccttcacttcccaaccaaagcgagctccattaatgacgcctcccctaatctagccgccgtactcgcctccttcccttccgagaccacgcgcgaactgccccatgacactccctcctcctcctcctcctacttaactaggaaatcttcgcgcgccagctgatcgtataccacgtacgtacacatgggctaccaccagcccgtacacggcggcgccgcggccggtgccggcgggagtggcggcggtggcggcggcgaccacctgcatcagcatcaccacccgcggttgcacagcccgcggatatccgggggcgggtcgatgacccggcgtgccaactcgttcaagcgcggggagatcgagctccagatcggctcgccgcgctcgccccgcggcgacggcgtcgggagccccctcgccgagtcgtcgtcggcgtccgaggcgtccgcgggcggcggcggcgcggtccaccaccaccaccaccagagccagcagcagcagctccggttccgcctcttcaagcggccggggtccggcgccggggaggtcgtgctcgggctggggatccgggagaggaggcggattgggaacctgctgttcctcgcgttctgcggcgtgtgcctgctcctcggcgtcgccaagatctgggcgggcggctggttcgccctccccggcgacgacaaggacgctgatttgcaggtatggaagctataaattcctttccagttttagactttctagctgctattttggcaagctttcttcttcggagtcaacaacacgtgtagtttgaggaaagttgcatgatcctctgaaatgttctgtccgtacatttcttaacgaacaaactatatatcctgctgttacttaattcgaaggtctttgaagactatgaaatcatgctagcttgctaatgttcaactgtaatttccgcacgaacttctgatccttggtgttccaatttgtaagcatgcagtttggccatcctatttgttccataccgtaactctgcaatttcatgttctggagtctggacaaagcaacaagagttgaaaacagaaatgtttgaaatcttgacaggtttttagacagttgaatgtgatacttggggaaaaaaaattgtggtggaagagatgttagaatggagttactgcattttagatttgcatggaccttattgaatagggatattttacaggagatttagcattttaatttttaggacagtgtcttacttgcttggtatgtctataccaactaatttactacgaaaacgcttctttggtgcttttggccattggcagttggatgcagttaagttttggatcttacgaaatatattttgtttgtacgttcaatagtttattgtagtagtcaggcagtcaacttgagtttattgtataaaaaatttagataactcgagaggttccatactccatttgttaccaaggttaattataagggacatcatgtgggatggagatgggattcagagcgctgcaaccttgagctagcttaccagccaaccgtttgtcattgtttgatcttcccaagtaggatgtgttgatctctttatctcaagtcagtaatttcacttctagtttttaccatggtgccctctctatctctactaataactcaatgtctgaatcatagcattgcatcgacataatttagttaatccttttagtaacattttttctattacaagcttattttgctgttctaacatttcacgaagtttgtatctacttaccttgttgacccaaattgttgatcttacagtgtaatttggttttgtgctgtccatgtttctaggatctctcaatctcattctccagtgatggagggtatcaatttgatagccactttggacatgttggagggaaagagagtgacaggatgttgatgacagtgggatcagaagacagtgttcctgaggctagtaatacatctctgcctcgacctttttggttcacacattaattagtggaacataacatttattttggctggtgcttcatgtaggcccccgatgtctggtcccagccaagcagcggaaagttcagacaatgcattatttcgaattctcataaaagtaagttggtctgtattaataccttttggtctcttcaatactcctttattaacaaggtatggtcttctgttcttaatttgtagaggaagattctcacacaaatggatacattctcattaacgcaaatggaggtttgaatcaaatgcggtttggggtgtgactcctgtcctactttttgactttaggttaccattagtgtgctatggtctgatacatttttcatgttgcagatatgcgatatggttgctgttgctaagatcctgaaggctacattggttctaccttcacttgatcatacatctttctgggcagatgacaggttgtgctttaacatagtttcttcatccataatctcctaaaaactaaaggatctcctctctttctcaaaaaaaaaaagatagaaagaaagaatagaaaactaaacttttcaatcaatgtgtggccataatgcctattctgatttcctcatttctgtagtgaatttaaggaccttttcaattggagacacttcattgagtcactcaaagaagacattgatattgttgaaatgctgcccccagcatacaagcatattgagcctgtggctaaagctccaatatcttggtcaaaggttgaaactaggtttttatctataatttacattaatatatgatggatagtcggaaacactaactagtgttttatcttgtgcaggtgaattattatagagatgaaattctccctcttttgaaaaaacacaaagtcatttactttacgcatacagattctcgccttgccaacaatggtcttcctagttatattcagaaattaagatgccgagttaactataggtctttgaagtattcccaaacaattgaagatcttggtgctaccttggtttcacggatgcatcaggatggaagcccatatcttgctctccatctaaggcaagttcggtgctcctaacattgttgtaggatgcttctctctgcactcattactttcgttcttctgtgcataataatctaagttaagtaaaggcaaccctgattttcttaattttgaaggttttccacaagctgcagcttctattattttgaacccgagcaagaactgtttatctctaaactattgagcatatgtgagctagatatggctaactttgtggattgatagattatgcatgttgtttataatgtagatgcttgtgtagatgaaactatcaccgtgccctttgaaataaggctcactgaagcaggggtgtaattttggtgaaaatttgcaggtttgagaaagatatgctagcttttactggttgcagccatagcctgacatcagaagaagaagaagaattgcgtaaaatgcgttatgaggttagtcattggaaagagaaagaaataaatggaactgagagaagaagtatgggtggttgtcctttgactcccagggaaacttcgtttttactcaaaggattgggtttcacacgaagcaccagaatctacttggttgcaggtgaagcttttggcaatggaagcatgcaggcgctgatggatgattttcccaatatatattctcattctacccttgcaacaaaagaggaacttgagccctttagaaatcaccaaaatatgcttgctggtcttgactacattgtagctctccagagtgatgtctttctttacacgtatgatggtaatatggccaaagctgtacaaggtcataggcgtttcgagaacttcaggaagacgatcaacccggataggttacatcctttcctccttggaaatgctctgtggttatatttgttgcacacaagacgacgttgaatgccaaatagctgtctttgacatgtgtttccttttttttgtaatgtcttattctttgtattgcaggatgagtttcgtgaacctgatagatgaatatgatgaaggaaggatgtcttgggatgacttcagctcagaagtgaaacgtatacatagagatggagagcgaataggggctccatatctcagggagcctggggaattccccaagctagaagagtctttctttgcaaatccgttgccgggctgtatatgtgagaagcttaatgacgagtgaatatgtatatatttgacgattctttaaccatctacgccacaggtcaggagttcaggatatatagtgcccctctgctccttgacagtgggtcagcagcaatatgcacaattatttagtcatgatcacttgaccagtgaattcgtgctgatgagagttcagagacgagacaccaattttcaggttcatcccacaaaagtttgctgcatgaagatcatcagatattgcaaatacgaaaaccatgtgagaagtctggcagctgctaatcaattttccagcagccagagcatgccatctgagaaggctggaacatcagagcaactgcaatcagtatacggaaggtaaataccgcggaggagattacacttacggctttgtattgccaatttgccatatcataggttttttggtgcacatggtgcttcccaatcttgctgttgctaagctgtattttgtgtagactcaatacaactgaattttgtcacttgtattttatctggatatattgaattaaacgaaagagattttgtctgaggctcagagtcagtctggagcccctgctgttcctgtcccagcattttttcctttaaaggcataacttattccattgatttactgcactgttttgcgtgacatcttttgtttttatgagtagcgccatgcgtctctttgctttgacactaaatcatctgcctatccaatggcattctctgcatttttcaatccacagattgtttctaataaaaatggggaaacaatgcacataatctgagaacttccacactgctgccaaagtacctttttataatgagtcccactccggtgctttctactaggagtagaaaataatttgaaccgttaattgtatatgattgaacggctcagatatatttctactcccaccacatttaatggtagtagaattgtggagggatatttttgtcccagaaaaattatttgtggagaggtatttgtccttttcactttctaaacctagctacactcactcgtctctcgttctgatccggcacgcatttgcaattgggtaagcaaaagctccgccgtctctggcccaagtccggcgacgactacctcctcggctcctcttctggtattctcacgtacacccgtcgccgccatgcacacaccctctctcgagctgctcgtctactactacgtgtacacgtataagtgtactgatgcacgtataatatacgcggtgacatgatggaggagttccacaaggagatgcggcggctagccgacgagctgctggagttgttcctcagggtgggcgctaggtctcaccggcgttgaggcggagaggaggatcgccaagacgatgacggcgacgatgcactggtaccagaggtgcccggacctgcggcaagctctgggactcatcgcacacaccgactccggcttatgctccagagcattgtgtcagggctgtagctattccggcgaggactagaccggtgggtggcggtgccggcgatcgttccgggcaacttcgtcctcaacgtcggcgacctctcttccacatgcatactcaccaacggccgcttccacagcgtataccaccgcgccgtcgtcaaccgcgaccgtgacaggatatcgctcggatacttcctcggcccgcccgccggacgtcaaggtggcgccgttgacggacgccgtgtcgcccggccggagcgccgcctaccgcgccgtcacgtggccggggtacaaggccgtccgcaagaaggccttcaccaccggcggctccgccctcaagatgatctccaccgccgccgccaccgacgatcgaacacaacgacgtaaccgacgttgtcgtgatgtcaaatttacccctaatctgtcttagtactttactattgtacccttaagaataaacggttcagattagttctacttgtagtataatactttcagtataaagcaccggagcgttgcccttttataatataagtagtagaatttcgcactacactgtatcttcgaatgacctaaaattactataagcatgcaggtttctgagatatttgtaacagaagaaacaatatatatcccttcgaggcgacatttcctgctaacccaaaagactgcttcagacaaacgatggcactgtctggttcaagtgatccgactttatatttcttcagcatttcataaaatgtgccggctaacctaataaccgtctgctttgcctgcataataaggaaaatagtcaatatactgtttatgcagctcgccacaacagatataaaaccagaggtaacaaatatgtgaccaaaagcacatttctgcaaactgaacaacattcagcagaagttagtcactacttaaaaattgtagcagaagcatgcatagtccgaaggagcgaggaaaatatcatatgatcctgttgaagtgtgttaacattggattccaacaactactttctgattctagtgaagaataatctaagatttcctatgtcgagtcacatgaaaaattgacttggacctcagtgcctattactttcattgtcaaactacaagaggaatcaagttgtatacaccaatttgacattatggctatgtttagatccagggtgtaaagttttagtgtgtcacatcaaatatacggacacacatttaaagtatccgtctaataagcctaattaatccgtctaataagtctaataacaaaacaaattacagaattcgtctgtaaaccgcaagacgaatttattaagcctaattaatccgtcattagcaaatgtttactgtagcaccacattgtcaaatcatggcacaattaggtttaaaaagatttgtctcgcaatttacacgcaatttgtgtaactacttatttttttcgtctatatttaatactccatgtatatgtccaaatgttcgatgtgataggatgtaaaattttgccaggggatctaaacaggcctatacttatgaaaatagttctcttttaaatacccatgttcaggctctgtattctcaccatgccaccatgctcatcacaattatcaggctctgggtaatcccacgaaaactaaccgatcaacacacacagagaagtttgacattatattcaatcaaatggggacactcgtgccgattcgttaaaaaaaagtagtttgaggttttggacaattattaagttctgcctcactatgctgcatagatatctgaaactacattatggaaagtaaaaattcaaatttcaattgaccattttgtaaaaaggaagtagtttgcaatgcaggctatcactgtctgactatgtagtatgagtatgaaacgctggataccagggagggacctggtatcgattatattaagagggcagcataactctcagtctggagccatactattgtgcaaactcaaaagtaaaatataacacaaaatgcaacagcaacttttaaaaccccacaaaaggatgtaatagaatatcatttcaaatcaaatgtataagatggaaatttcctaaataatattaactacatttacctttaaacaggatctgagcttggggtgaagctcttttgtattttagtaactcactgagcgcatcctcattagacattaggcatttatcaccatgagtaacagatattgtgcgaagaagacttgctttagagagaatcagctctataaaagacatttcatttggaagccaactaattctcgttatctgtacaatttgaaggttggcgcacatgccaccagtccactctgcattttggaacaccccatttgcctcaactttctgctcgttatcagtgatcttcacaaacagaaataaaaaattgtaaggagagagagataaccttcaaacagtgcacatatattcaacttgcgaggcaacattcaaccttaccattattttgagtttttcgagattcggagcattccttagtaagcaaaaaatcgttaaaatcgcgggcagttcacagaagtccatgtataacttcaagctcttcaagctcttcaagctgtcaaaggtgcatggaagtgtctctagtatcttagctccatttgactgaaagatatgaagaaaacaggtactccatcagaacttaaaagttgaaactggatggatagaaataatcaaaggacatattatgttttttttcccttctgtccaaacaagaccaaaaacacatatccctttattgaaggaaatgttccacattgttaatttgtcaaggagaacacaggcccacagcccacatatccaactaggggataaaccttttttctagagcgaaagtaaggagtctaatgtagcaaatcagaaaggtaaaaggccatcggactaccaagttggaagacaaatgagttactgaaagcatacggatgccaatatatattcaccataagaatatgtgcacaatcacataatcccttgtatgacagtaatatctacaattctttgtatgacagtaatatctacaattctttgtatgacagtaatatttacagattaggagacagcacagaaagtttgctacgtttatgtcacccagcaaacatgatcctaatatcctatccacaagaggttatgcaaccaacaacagtcatgatcatataattgttgtcgataaatcatataatttcacatattcaactctgcagtttaatcagcgagcaagtattttgattcaacctaaacatcaaccattttaaagtaaaatgatcacctattttttttagaggaaactaattatcaactggcaagagaaaaacaagaaacatttggaggcatcagaatgtaccggttgataggacacaaagaggtgaagcttcctaacatgaagaagcttgccgagaaactcggcgaaatcacggccaccaagataatcccacaaatcgatgacggcagaacgcaggcgtggcaaatccaaaaggttccatccataatcgttcggcgaacaaatcgttagatgctggagattgggcgctcgaatcacccaatttatgatatcgtctccatcgatgaagattccagataacactagcatctcaagcaatggggaattctcgatgatctcctccagttggtactccccgcccgctcgcagccacacgtggtcgagggttaggctcctcaggttggggaatccggcgaaacccggcgggagcggcgggatgtcgcaggcgaagaggttgaggtaggcgaggcggtcgcaggagaagacggaggagtggacggcgaggtggttgtggatcggcgacgcgaggtcgagggactcgacgccgcggcgcgcgaggacgaggatccagtcatgggcgcggcgggtggtgagcttgtcgacgtatgcgctgaagctccggacgcggccggggcaggcagcggaggaggacgccgtcgacggcggccagcgccgcgccctcctggtgcgggaaggggaaagagatgtcgagggacgggagggactcccaccgccggcgccaggcgcgggagagcgcggaggtgcggacggcgtcgcggaggccgagccgggtcaggacgccgtcgaggacgtccggcggcagggagatcagcgcgtccttcgcctcctcctcctcctcccccccgggaacagcagcctccgccgtccgacacttcttgtgacggtgcggcggcggcggcggctccattcctccggcggtttcgaggcagtgcactctttccgccgacgcggtggaacaaaatggcgcgcagctgggtggggaaggaaaaaaaagcgcgggaaaagagcactcgcgtcgcgccggcgagatcatgtgaacaagcgcaactacgggccacaccacaagcacataagttttccggcccaaaatatcccgctttccaaaatctccatgtcaaatattctagttgaaatttatcagaatttctagtttttagtttgattttcgtgtttcctactaattaaagtgggatattgattattgaaggggtttctgttcaattttctcttgacagctgaggcatcaatatccatgtccagaacgtattcggcaattgattattcgcgcatcaatatccatgtccagaacgtattcggcaattgattattcgcaataggacactgtttaattaggtcccttttaaaattattaaatcactagaaaaaataccagtgtgttacaacgggtatatgctatttaaattttattgttgttatatggtttagctaggataaaatttactgtgtgaattcgcttagatatttttttcgaaaatcataagctgcaagagtccgtatttcatctcaagttagcatgcgggtttttttaatgatatttcttatatgtctccttttatatttccaaaaacaaatgagcttaaaatacaatttaaaaacggatctgtatttctaaaagcgaacgaacttaaaaacctacttaaacatggataacctaccaaaatactagtagaaacatctttaattatctttaatttttataatagtagatatagagaaatctcgcgatcgcggtaacataattgtcgaggctgtgaggaccaaagggaggagccgaggaggggttttgtcgagctttgcttgaaggccgccaatggcgagcagaaggggcatccccgagctcccatgggagcttcaagacgccatactcgcgcggctgccgctccgcgacgccgcccgctccagcgtcctttccagcagctggggccggtcctggcgccacctcggcgagctcgacttcgtctcgtcgccgccgccggcggcggcgtcgttgccggtggcggcggcgacggcggtggcgtgcgacaaggcggcgatcgacgccatcctgctgcaccagcacccgggccccgtgcagcgcgtccgcctgagggtcaccgacgagctcctccccggcgtgcccgcctggatggcgtccctctccgagaaggggatccagtcgctggacctcaccgtgcgcgccatgtaccggccgccgccgcaccccatgcaccgctccatcttcgcctgccgcgcgctcaggcgcctctccctcggccgcttcgccctgccggccgcgccggagcacttcgccgggttcccggccctcgcgacgctctccctcaccggcaccgcgttccgcaatgcccgcgacctggaggcgctcgtcgctatgtccccgaggctggaggagctcaggatgtgctgcatcgccgtggacgtggactgccgtgaacatggcggcgacgggcgccgcaaggtgaggatggtgtcgtccagcctccggttccttcggatcgacgggatggggaacgtcgagttcgtgggcgcgcgcttgccgcgcgtgtcgcaggcagacttcgcgcaggcctcctatccaagcgccccaaaccttctgtccgccatggttacctcgcttgagacgctcgactattactattatgccttgccgttatcgccggtatgtatgtacttttgttcgaacactatctaaatcatcgttaaaagaatctcagaaaaaaaattgatagcattcataccatttaaataataaaacacattgaggaattaaacaaaagacaaactcagacgtgaatagaatttgtctttttcgtttatcaatgtgcagatcgaatttggacatgatttttttggagttatagatcttgctatactctatattaacaattttttaaatacttttttttacaaccatttgcattgattttgagagaaaaaattacacgaggaacacatctcctcgagggatcagaaatcctccccattttgtttcacttcaaatttcgcccgtatctacttcctccatttgaaaacagaagggtattcctttgtttcttacatttacaaattttgactaacaattaaactaaaaatatagtatatgtttactgtcatgcatataattatcatatttgacaatattttcgtactatatcaattttatacttacaaatataatattttcattagtttacatttcagtgccttgtcggttgcccatattatggcttattaggaaataaatgttaatttataggtaaaaattttatatatttgttcgtagcgacttattagccaatgctaacaagaaattatgttgaaaatattttaaaatcaaatttcagcttattaggctaaccgatggggctctaagaacttatggatatagtatactttgttgacattactcaatgtcatgtttcagactaaattattgaagggactaccatcttcctacaaaaatttgaagagattgaaagttcatctagacttcaaccatgctccaccgattctgtctacgcttaacttcctaaggaccgctccaaacctgactcaacttgtgattcaggtaatttccatattcctcttctttaatgtagttttggaaacttcctacttaatttatatataattcctccgattacataattcttaatgttttgaacaacaccatggtcttaaaagatatacatatctattatgaatgtataaaaagttaatatctagtttatttaaaatactttttagaacttgtatatacattgtgttctagtggttcaaacttgatattttagaagttattaatttaatcttatccgtgacgttaaaaatttgaaattatgaaaccggagagaaaatcatgtatatttttgtattcatgctttcgattattgtcagggatatgtcctgcctttttctgaataacatttttcatctttgtaggactttactgatgactcatatgcacaatctccataccctttggcagcggagctatatggaaatttatgccccagccttctttttctccaaatgtcttatgtcacttcgcagaacaacgaaatggatttcattcgtctgatcttatcgaaagcgagaatgcttcaggtaatggaggttaaaatgcgaagaaacagcagaggcatagaaatcaaggaagaaatatgtggatatgataaagtatctccgcgcgctcagatccgttttaaaaattagtaaccattcaccactctgcagatatggagtatcatgtccatgtaatttttaggatcctcgttgagtagttgtcatcaatagcatctctaatagtcctccgccgtccggcgcttcttgtgacggtgcggcggcggcgccattcctccggtccggtgagagggagagagcgcgcgccgcagagagcgcctcgagggtttggagggagctctgtacaggcggtttcgcggtagtgcactctttccgccgatgttgtggaagcgtgcagcttgggtgataactggttggggagggtgcagtcactacatatgctattatgttgggaaatttggtgcaagagaaacaggcgggtttttaaagatatagagctccaaatcccgcagttagtgacaaaaattctagacaaaattcatgtatggtcagcgtgtggtgcaaaaaaacttgcgagaatagcgtcttagtttcctccatggaggtgtaatttttttcttttgtgttgtttcttctcctgtcaccgttggtgacctctgtaaagtgcttttcttctaaatataaaaccagctcggctggcttaggtttcaaaaaataactggtagggggaaggaaaaaagcgcgggaaagtgcactcgcgtggcgtcacgcgggcacaatcatctctctcttctcttctcgatgagggttaacaagcgaaagtacgggccacaaacgcataagttttctggcccaaattatccccctttccaaagttatagatggccataaggcccgcccggtacagcccggcctaagcatgggttaggcacggcccgaggcagtcgggccgtgctgtttggagggatgtatgaaatgatagtagatgtatgaaatgccggcccgaaagtatgggcggcccatcatatcttctttgaaataagtttattttccctcctccctctttgggctgtgacatatatatagctaaaataagtctattttatgtccctactctttgggccgcgtcatataatacgtctattttgtagacaagcagacaattaataagaggtatgtatgaaataatagtggattaatactctacctgtgcatataggtgttatatttacacttctttttacttgtcacaatatttacaaattcatggtgcggtgtttatattaggatggatatgtacacacactaaattgttacatgagatagcttttcatttgcttgaggggccatcccatcgtttgttgcataccatctaaatagtcaataaattttttaaaacaattaataaaatatatattaatataagacgtatatcgcttcacaagcattgacatataaggtcaaatttgactagtacaagttgtgataaaaagaagcaaatctggacccgaagcaggcttatttgaacaccaacctatccacctacatgtactacacagaatagtcttcttgcatgatctcatacatgggataatctccatctccatcgtcttcattggaatcaactatcgttccttgccgatgaaaaattggagtcctcggcgccctaggcagcgtatccaatggctggcagccgttattctcctgaagcttgttgacaactccggcatgattcagcaaagcccagacgatggtcaaaagctcgccgccggtcgccagcttggaggcgtgcacagacgctcgatcagacggcgcgatgtacagcaacaggtttgcccagaaatgggcgagcaccttccacctctcctccgcatccttctttcggtccacaagattgagcgcgagcaccgctccctcgtacagcagagggcatcctgcttcttgctccttccaaccatcgcgacccagcttcatcaacttgtcatacttgtcactggttgtcctgcattctgcgaggtatgcgtgtgcatcctttagcacacggcaagacagtagctggcttgtgtaagtcccatctggtatgagatccggtgcgaaagctacgaggtaggagcagtatcccgagagcactgtggctacttcgtagtgatacctcaactctgcatcagcctgcgccatgtcaaacttggactccccatagcagcagatgcttgtggctatgtgccataccaaaatgtagggggcgtatgttttatggctaaagaggtcgtaatccaggtctcggtccaaaatgccattctggtgtagccaccttcttccatcggtaattttgccattggtaggtttcagggcgtccttgagggcgcacaggacggcttgcttcacttgcggtggcaagacaatggatgacgccataatccacgggtcaagcaactgaagtgtcagagttgatagcaagagttgcacacggtatagataaccagcattatcaagcagggagtactgattaatggcattcttccagtatctggagacgttgaaatggcacagcaccttcaacggagtgtcgacccttgcacggtgccatgacacttttagcacgtactgacacatcaatttaaccttgtgccaatcggacaacaccaacgaaagaagctggtatgactctaaaaagatgtagagggcaacgaccagacgagtaacaaaaagatcaaggttgaagctatggatgatgatgtttactttggctgtagtactgggtcggtagtgaagaagaacggaagagaagagggtgaaaaggctggtaaccatggtgagcaaataaaggatcaaatcgaaaacgagattatctttcaaggaaggataccgagcatagaagaaatcaaacaggaagcccagctcagcctcaaccacccgaaaggctctgtcaagatcgcgatcatccgagaggagcctatcgacgacgagagttcttgataggtcgttattagaatggaagttgagatcaccaacatggtctgccccgaacctcaggcgcatcagcctgaagagcgcaaaagagaggcacaagtctcgccgcctcgccgcgccgcggctccctgcagatgagctgcagctcagcagctcgcccttgcactcccacaccttatcaacgctcaccgtgtcaggcgcatcgtaccgcaagtgtatcgccatcgacgacgactcctcttccttcccatcgacgaggtagatgtactccttcatactggacgggtcgggatcgtacttaccgacgatggagccatctaacagcttgtgtttcatgtactcgaacacgatctggttctccctgatcagcccgttatctcggctcgtcgtgcggtacgcgttgatcctcagaaccaaccgcgcgacgctcaagctccagaggatgaacagggggaccttgaggttcatcctaagctgggccttgtagtacaggatgagaaagagcaggtagatgatgtggagtgcttggttcatcatcgacctggcgtgttgctgggtgtcgttgaagctgaaggccgtcatcgcgtcggcgctgccgaggaggaggaggaggaagcaggcccagacaacgaagagctcgttgcggacggacgatgactgcatgaggccgatggtgtaggagatcaccgggtagttgaacatgaaggccgcccacacgaggaagcccaggaagccgttgctctgatggcgccgacgggagttggagaagacgaggatgacgacgaggaggcagctcagtgtgaccagcccctcgatccgggcaagctgcccaacagagctcgcggcgaattgcttcgcaacctgggtgacattccccagggcaacaaatccatccattctaattttaattcctgtctctctcttactcgctcggtgtgttctttcttctatacgagttcttctatcaaccactccgccttatatattatactccctccgtattttaatgtatgacgccgttaactttataaccaacgtttgaccactcgtcttatttaaaaattttatgtaaatataaaaatatttatgtcatgcttaaagaacatttaatgataaatcaagtcacaataaaataaattataattacatacattttttgaataagacgaaagatcaaatgtttgtcaaaaagttaacggcgtcatatattaatatggagagagtagcttctattgtgaatggatcaaaccacaataaattcatacgactctgctcttcgcgtctttgtgagtgctattatttgaaggaccgactctgctacaggtcatttcttttccctcttatttgtgaagaccaggaaaggtctttcttatctgttgctcaaaatgtcctaaacaaacacaagcgtgattgaactgctaaccatttcttttgaagaacgtactgttatttttagttgctgctgtaagcctgcaattaattatccatgcgaaaaattctgaccgagcaaccgtgcaggtcttgttagtttgaggattttttttttctataccaattgaagtttgcactcagccgggatctatttgacactaggaattcatggtattgccaggtcaattcatggtattgccaggtcacagctactgcccactccttgtagaccaaattactacatgtcaacgcataagatacaatgtacttacggatgttatgagcttcacgggaacaagttaaacagggtgatgctctaaaattttcatgtagactagccacttagttgtgcggtacgcaactttgtacccgtttataacccctatatatatatatggaccgtaatatttaataaaatttaattacttttttattaaaaaaaatatgactctttaaaacaatggtatgttcctatgttgcatattttatgttctgaatttgtgattttttttcgatgttttaatccttggaacttaatgtttcatacattggacgttgtgttgcagtcaatatatatcgagtgttgagtcactttgaaacatttcatcaagggagctaaaataatataggatctgtaatgccccgcttttcgcaagacgataaatataagttaataaaatcctatttgcgaaaatttagttcttgagtgtaagtctaagtcgtgccatggatctcaattcaaatatatccttttcccctctcatcgacataaaaaatcgccacctcgaaattccagctccaaattgaatatacaaaaatcaaattccggaattcaatctctcccggtgaaatcatcgccaaatacttgtcctgattccaaaaaaattaccaaatttccaccttgaatccctccctaggctccaccttgaacccttgagtacagatgcccaatttgatttcaaatccaaactccaattcctctccaattcaatttctctatagaagtctaaatcgccttcctccttattgggctgtttttcttcccgggcacatctctctcgctccctttccctcttgggccgcaaccgtttcctggcccatcaccccagccgctctcgctctctctctctctctctctctctctctctctctctctctctctctctcgcttcttgccgcgccatcgccaccgtctttgccttcaaaattccgccaccgccttcgtttccttcacgccgcgcgtcgtggccgctcggaaggacgccgccgtcaccctcgcgtcactccgcctgtcgcggcgaccgccttgcctccgctcgccgccaaactttgcaccgcctttttggcgacattgccatcgtcatccatggtccccgccgcttgtagccaaaacccggatgccggtcgtgcgaccgcaccacctcggcatccacccccacggctccttctcctccaagccccggttcaatccaccctttaaagcctcgccatctcccatccttctctccttggttccaccccacccgagccgtgcttgccattcgtcctcgctcggccagtgtgcgtctcatcgtcctcgcccaccgcgcgtcacgctgggagtgccgttgtgatcatggtgcaacggcggacgcttcttccccttctctagccttgctccttgccaaggccggaaccgattgcttccgcaccgatggtcgaccgcctcaacgccttttcatctcggtagccctccgtatttttcgcggcccaaccacctcctttaggctgctagctagctggccgccgctccgtgttacgcgaagctcaccgccgctcgccacctctgtgccgatgctagatcgccgccgtgggtctccttggagccgcgtcgtgcccccgtgaagcttgaaatgagttcgtgaatccttgaagtagcacgagctccgaagaatcgagccctcgccgctccggcgaggttgccgttttcggtagccatctggcgaatccgagccgtaggctcatttttcctcgccccgctcgtcattcaggtgcgcttccctcgtagcgccgtgcgccgctccggtaaacgtcgccgccgcccgccgtcggatccacggcagggtcgtcttcctccttgcaccgtcccgcgtggctgccacgtcctcggctctcccctctcccgtgcgcacggtccgcggttagccgtgtggctgcacatgggaccgccgcattccgtccacaccggtgcaccaatcgccctccccgtccaccccaagccctagcgccgccgcacgtgcacctggttctcgtgaaccttgtagctagtaggtgggtcccacccaggatcccgcgcggtccaccggcctgcctcgcgcgcaccttgcctacgtgggccgtgcctcgcccttcggctcgcgcgtgcacgttcgcgcccgcactttgctctgggccacgcctcgtgctcgaccaagaagtttaatttcggtccctcgttcccatttcctttccagggaattctttaattccttttcctattagacataaaaacaaataattcttaggaaattcatatcacttgatctgcagctttgtttgacctcattcaagttccagtatcctctaaaatttagatatatctaatggcactattagttagtctaaatatagatatatatatctaatggcactattagttagtctaaggcttcgttcgcaagtgccggatcggagcttgacttttgggttgggaacatgtagtactgtagaccactgtagcagtgtcagggcgtcagggacggagggaaagcggcagcctggacgccgtctatggccgacactttccgtcgccgtgccgtgcgatgccgggcaggggctggcagtggaggtactgtagcatgcgaattaatgggtgtttttttgcaagacacgggtgaaagaggtatttgctacgcggcaccaattgtgaaagaaatatttgatatgcacacacatgtgatttctttaataataattttcataatatgtgaagattcggacataaattttgcaataacaatgattaattttttgtctgaaataataacgcaagaattaagaaaaaaatgaattgtgaaacaaataacgcaagaatcggtgcatcaaatttgttgttaacgttataaaaataaatggtaaaccatacaatcctgaaaattgaagtactgaacatacgacaagcattatggataacatcacctacctaatggtagttattgtacgcatcatcagcaatacagtcacgcaacatgctcatagcggcctcgctatttgttgcgtaatacatatggtcgaatgaatcgttcagcagcggcactggattgccgttgtagagagcattagtgaaccgataggtcggatctttactatccaacctaaagttctgtagagcgaaagctgcatgaatgatgcgtgcagggatgtcctcatctcggtaataagggatttctttcaatattttccacatcttttttgcgatgccaaattgtctttccacgatccctcgcaacgtggagtgtcgatggttgaaagtctcttcccgtcctacgggtggcggggctccctcgaccgcaagttgatccctgtggtaccgtacatgtgggtacggtgcaaggaagcccatcctggtaggaaatccggagtcgacaagtaggtacctgcctggttaacggcgcataattaaatattagtgcacatgtgtaaaattaaataaaatcaagacatttggcaataaaaaaagtgtattgaccgatacaactcacctaacggtacccgtgggaaatcgtaggggtaagcctgcactgcctcattgagaatcctttggtcgtgaactgatccaggccagccagcatcacagaaaataattctcccatcatgatcacatattactagaacatttctggttgttatgtggtgacggttcctgtgttgcatagcgctagctgcattaggcagaactggaatatgtgtgccatcgacagctcccactgattggtagaaaggcttgaaaggattctcttgcagaatctgagggttgtaatctaagaagttgggatcaaccggtttcaatattttcccagcgagatcattcatagcctgcaaaacatggtggaagtgaaccgacactgtcgagttggagcggacccaccgattgttcgcgtctctgattggacgatttccacccatcgtgtacaagaaaataccaagcttttccatggaacagacccctgctgttcctacaagaccaaaagaagtgaccaatagatcatgcaaattgtgtatctcctctgcagtaagcctgaacattgccctgcattggcttcgatttgccatcgtgtccatcatccaactgacaccggtttgcaccggtattctccttggtgccctctcattgaaatcaagggtagcagccatgtactcaatgatggcatcttcttcttcgctgcttgtgtgaccgcctccattccaactcgatccacccgcgccgtaactcatcgccgatttcctttaacatatgagaaccgaagaataggcaatgtttgtcataatcaaaaggatagaaattaataatggcagtgatctatgcaatcgaagaattatttggatataaaagcaatgcaatggaatacgtagttgctcgaattggatataaagccgcaaatgtttagggactcacagaatgtaaaaattgttagcacactgagttctaaacataaataatggtttatttggaaaacatcgcacatcacaactcaaagtaaagtacagtgcacaaactactaggtgccaccagatgactgtccagtaccaccagtgcgtataaattccaagcgcctagcagcgtccttgagtcgaacaaagcatttgcaggtcaatgggtcacggaatagcgcacaagcagcataccacacacttcctccaatttcatggccatcattttccaccaactccatgcacgcatcaaggcccatagacttctctgcttccatctgagcaacacgactctggtagctctgctgtcggatgtccgcaatcctcnnnnnnnnnnnnnnnnnnnnnnnnnnncgggacttcttggaagaactccctgaggcagtagtgtttgctgctagcctctttcccttgccccggtctgctgccgttgggggtggagttggaggtggtggtctataagcagcagcgagctgcgccatgtcgatggtctgccactgaactgctccttgcggtgcctgtggggctgcccctgcgacggcggagtggtttccgacaactgtgcgcccactgaataccgcgtggtgaaggtcaatgtgcttcagaggatcattcctgaagcttaagacacctttattttgctgcaacataagtagacagtaaaaataagttagtacaaggcaagtgcattaggcttgtgcaaacattgaacataatgaatatgtgcagtccaatgtgcattactactaaaatgctggcagtaaatgtgcacattggtaccaagttatcaaatataatcaggagtacatgttacaatgggccacacatctgacagaatgaaagaaagatagtttgaacattgtaaacataagataaactgcatatgttatattctttgtagatgagcacatttttgttcattctctctatatacatcacaaagaaggtgtgtacagctagttgaatatgtattaacatgttcctaaatgacttgtacaagatctttcctaatttactgatacactacatatagattttgtttatgcagagaacaaaacctataagcattaccatgttacattgactgctacattgcataagctaataaaatgctacattgtgtaagctatatccttcacaattaaacacatgtgaatctgttaaaatgcttttgaatgtcacatgtacaagatcatttacttctcgcaatcattgccaatcagttcatggtagacagtgtaaacatcattttgttaacttaaatacaagggaatggcacacattactaaaaacgacatgacagtaacaactatgaaacatatgtgagcacaatccttccattttactgcagctagtcatttgttggcacacacaatttgaacaaaaaaattattacacctcacaaaactgtatttataattgcatgcatgtactaaatttcagataataccaattgtaggcaaaattgttggttcaaaatatttatggtcaagtgtacgtaccgcattcttgctttcccaccactcatcatcggcaacaatggctgatgtatggggatcacgacccagcccgcttgcatgcgattctagccacacccacctgttgtaccgcttcttacactgcccccaaatgtactccaattgagccttgttcaccttcttcttgcacttggtgtacatcttgtgtattaggttctgccatgcctgcggcttgggggagttggaggtgatggtgaacgctgccatctcctccaagcagctctcaagaaacacacgaacctccatatcggtccaccggctacggccatcgcccatctactccgtgcaagtcaaatactccctccgtttcgaaatgtttgacaccgttgactttttagcacatgtttgaccgttcgtcttattcaaaaacttttat

SEQ ID NO: 25833 - DNA, 1204 bp, Oryza sativa
ataagacgaacggtcaaacatatgctaaaaagtcaacggcgtcaaacatttcgaaacggagggagtaaaattgaatcggaaatgaacaaattaatacaaaccaataccttagatgactcttcctcgcggacgacgtcccaatcaatcgaacggccgacggtggcagggctcactcttcgaacaaagtcgatgacggctctaggagacttggcgcaaaccttgcagagggcatgcgcgatatgaagcacgtcgtcgggagcagccttggcgctgccagcgtcggaggtgacagagtcggaggagtcctcgccggactccagatcggcgccgcggacagagatctcccctgtttgaggggagtgggaaatcgtcccctcctcttggatcgacaatagatcccactctcgcttccgcttcttcgctgtcgtctccatcggaccacgcacacgctcggcctgaaatagagctggctcctcaactccgccagcttggatgccttgatgacactcttcaggccagcactgtctgacccgagaggccgacaggacgagcacacaggcagccagactgccaaagatgggcggcctgatgggcgccgatgcttgctgcttcacagcgagcacgccggccagcttttactcccctcgaggacgacgcagacagctcgacaggcgtggagctcttccacttccccccgattttgagcaccttgaaccgaccgctgccgcaagacgacgcgcggacgagaatcgattggggggggcacgggcctgcaagccacagtcgaaaggggaggaggggggctggcgagaatcggggaggacgggagcctgcagcggaggggaatcgattctccgctaggcctgcgtcgcatcgacgaccgcggaagcaagatagcaacagcgagaggaggaagaaagagggatcgagagcattggatgccctgactctgacggaaaagccgaggcgcaacggcaacttctcacatccgttaacgacgttaacgtcgcctcacaagccgtccttctggtactgtgtgcgggaccacgcttccagtgcacggaacatgaaccggatcaggactcgcacatacgaacgaagcctaaataggatctttcttttggtcttgtataggtctttaattggttgtgtatagttgcgtatagttgcgattgtggatttctgttcgagcccggatttcaag

SEQ ID NO: 25834 - DNA, 18232 bp, Oryza sativa
  unsure (1)..(18232): unsure at all n locations
ccgagtcaaaatatgcattgtttggaagagctgtggatttaggagaagctgcctaaataggaacaaaatctgcattcaaatattgccaaacggcatgacgcattttagttttagtttccatgtcaaatttgagcaaaccgaagttaatagtgattagtgtactaacaacgcgtcgtttttaagtgagagtgattatagtgataattaacagcagcaatgaaatggaagtgaacatgtcccaggtggcatatagagccgtgaacaaaggctccagtccagccaccggcggcacgccggcgacaccaaccaccagcccaagcgttcggcagcggcgacgtcggcagccacgcgtacagtggttggtcccacagccgaggattcaccccaagacgcgggatccactggaacaagaggccggccgtcttcttccagtccagctaccctcctgcaccggaagattccaccgagacacattcacctcgccagaaacggacatcccaagattctggtccacacacacagctgcatgcttggaagccaagcaggcaggcagacaccggccagctggcagtagctgacgtcactgctgctctcacagcagctctgccgttgacaacttggcattgcttccatcacanagatctaaaacaaggacacaggttgtagattctgctacagccttctctccacaatatctgggagaagctggaactaccttggaaaagactatacactgtttttacttttacacattgcagcctcctgagtcaagctaacagactccagacagcagaacagactccccccagcttacagaacttggtgggggtgtgagtaccggtttctgcagctgcgaagaattagggctgtatttacaatgaattgaattaggttggacaacattgtacaatgatgcggtggcgctgttaataaagaacaagtactgccaccgcctcgagctgccaccccgggtggcgagggcgaatccgccacggtcgtacatgctctgaatctcctcccggtaattggggagcgactcgtgaggaagggccggtgtcagctccaccacatcccccatgctgagcttccggttcagatcgcttatgggctcgtggttaaccttcggtcgcagatcttccttcatggggatgcggtagggactccatcttggagtgttggtcccaactcgatccatgaggttcattacagttgagtttgcttggaattcttgcacagacatctggaatcacagggacaaacttagtgagaactataatcaaaggcgatacggttgcaattttctaggaatgggtttaactggagactgcgctcaccttgtcatgttccagtaggatgacaaatatcggtccatcatggtcgcattgccgagtatatgagtaagggcagtcttctgaatgcatgggaaatggacagggtggcctaattgcatcactgtcgcctagagatgcaggtcgttctttgttcattgcttcacattgccatgtaagcacccacctagcccattccaccatctggagtacaaaggagtgcctacaggtgccttccttgtacctccagtgtgctgcgaatccatactcagcttgcaggtgcatctcttttgtacggatctggacttcaaatgggtggacattctcgctcatgacaacagtgtgcaatgatcgatacctgtagaaagcaaatcagtgcaaagtatagcagaaagtgaatgaagaatggtcatatcaatgttcaactcagcgtacccatttaattttggacgagatatgtagtccttaaatcttccaggaacttggggccatagttcatgaacaacatcaagtgctcgatagcaatcttcctccttctcaaacacgagacgcaggccatggatatcatggatctcatccattgtcaaattcttcctgataatgtgcgaagaccagttagcagaaagaaagaaaaatgtggttcatcgtcaagttttaaaaccgtaaataatgcaaacagaaagccttgtaacatactttagcatcttgttgtgaatactgtataggcttttgtgcctcccagaaagattgtgatatgagaggcctgcatccctcagacctctatctagtttgtccacagcagatgtgattagcacttcgtcaaaggatttggttagtttagatgatagatccttgtgctcttctggattcagatgcttgaagcaaagattttccaactggtctttccagctggcaatccctaatcgattagccaaaggaacaaagatctccatggtctccttagcaaatctttgttgtttaccaagaggtaaagcttccaaagttttcatgttatgcacacggtcagctaattttattagaactgcccgtgcatcagccattgcaagaagcattgtgtgcaatcgatctgcttcaacaatcctgcttgctgtgttgttatcacgagcaagtttgctcaagtggctcaactttgagacctgaacatattagatatcaaccattagttttgcaacaatacaatctattttctctgtacacaatgctatgacgtatttcactaaatatattgccaattgtcacaaattcatcatatgagaaataatgctacagagaaagtgaccttttaatgcactagacttagtacctaagctacttaaatcatatcatagaagtcgtacattgaccccaaatggaggaacctttattagtgagggatgtaaaatatagttgtcttacattagaaaaaatgcagacacatgataattgactttaagtatataaagggataaaccatggtaattcagatcaaataattcaagttggtcctgtcagcagcgtgataatccaaaataagttcaatgttcatattataaaactcattaaccgatccactgggaacaattatcaaaatccaaggaaactggaacacgtaccccctcaacgagatcggccacgccggctccgaacatgtgaaagatgtgatcataatcaatgaatgaatcgtcaatggtgtcgtgcagaagcccggcggagacgaccgtcgaattcccccaatattggccagaagcacggctgtctctacacaatgttgcaagtatggatcgccactcgcccgggtctaatcacaaatcacaaactgaacaagataagagactgatgcagaagcaattcaagtgttccaagaaccaatagctaaagattgtgtagctcgcggttttgacctggccacggtgagccttctcggcctcgaagaaggtcttcacgacgagctcctcgtggaagatgcggtggcgagcctgggcgccggcgaggagcttccgggcgcacggctcgcaggcggggctcgcctccgcgaggttctcgtcgagctcgaacgcgagctcgccgccgccgacctccgaccgcgggctgagtgccggggcgtagtcaacgcaggagcccagcgcgttgcgcacgaagccggcgaagaggcgctcgcggtcgcggtcgcggccggcgagccacgacgccggcgggctgcgggaggccgccggagaggacgacgggccctggaacaccgacacggggctgtggtgatggtggtggtggaggtcacgccacttgagcggcgaggacgagtagccgccgccgccgccggcgaaggcgggctcgtcggatctatcttgccacagcgcaccgagctcgtcgtgcggcggggcacgaggcggcgaggccgccgcggccggggaggagaagaggcaggacagcccgcccgcggcggcgggcgggcggtgagaggtggacggcggcgcggtggagcagggcggcgacgagccgcgggagctcggatcgaactccgacgagtagacggcgcccggtggtgggctggtgtacagggaaatcgccggcaacgacatggccgcctgaccccgagatccctccgacgagctcgaaacacgcgaactcgcaaactaaaaaaaaaaaatcacgaatttgatgtcttggcgaggtgaactcggcgcattcggggttcctggaccaaaaattgaatgaaaaatggccaaaattcggtcttggcgcgattaaattcggcggatttggatgctgcctctcgcgggacgagcaacggcaagggtaagaaagaaattggggaaatcttcttcgctcttgtgacttgtgagcgtgtggggttgcttctactgctgcgtttgcggtgtggatttttgtgaggaatctgggaccctttgctccccagttatagaaaggcggccggtttcgaaatgactctattgcccctgtccgcgaggaatcttcttccatcagtttattgcttgagcaattaacctttgtttaacctcacatttaacaaatataaaaaatgcatattcgtaaacaaattaattatcgggctaatcgattgcaaaggttggtgtcgcctggttagataattggcatcaaactctgtagtggtgttactgtaactactactttaggcctaatctttgaacaaatcgagatatgcctttttgttaaagttctgccctatccaaaacttgatgctccattggccaaagataattgtggttgatgcgatgccagttgcccaactgataaaccaagggaacacaaatatcatctcaaagtcctatctggaatgtactaatccactaagcccgggaggagctagtggtggtcattttctaatccatccagtatttttctccagtggcacttatatgcatgaaccttttattcgacaagaacattggcaaatgctttttatttcgtatgataaaattctccactaagtaacatattgggaaaaagattatacctaacactgtaatctttgtatagccttgtttaatgattgccactggaaataaagagcagttcgcggctcaaactgaacccaatcatcagaggccactatatatatatattccaaattatgtaatgctgttttagtattatttagtttgagctttcaaacatgtgcagaaccaatcgaacagcaggtgcggcactgtttgtaaaacgggcaacgcgggtcgcttacatacatagaattaattataacaggtacagctactgatagtgattagtacgatatttaagcgccgctgaaacggtgaccttctcatggcctttcaatagaagcttcttgcatgatcgtttctgctttctacaattctacgactagtccactttctagagcatggacttcagactcccaagaaagggaaaatcactataaacatctttccatgtagtagcacatttttttttctcacttattttaaactataaagtgggatagaaacggtaacataaaatttttaaccaatcgagtactctctcccgtaataggttgattattttttaacggagggagtattgttttataaattaatacttcctccatttcatagtatatcgtttttacgttttctctaatcaaacttttttatgtttgacaaaatatatagaaaaattagtgaacatctatattactaaattatcatatattttttttctacaaacgactaagaaaaaatcaaaacaacttataatataaaattggggaagtattttttttacctttttgattttatctgtatgtaaaattttaatttcttaaattcctttcgacgtactacagtcgatgataaatagttaaattagcaggtatagaaattccggaccgactagagtagtttccgacaaatatttttccgacgggttttcatccttagatgtaataaatgagatttgaaattgggtgatgcttcgtgtgcattaaccagtttttttctccaataaaagttagatgaagattaagatcacgtttttcaaattgctaaacggtgtgtttcgtccgaactttctatatgaaagttgctctaaaatatcatattaatctattttttaagtttgtaataattaaaactcaatcaatcatacattaataccacctcgttttgcataaaaaacttaatcttcattttcatttttaggaaaaaagaacatgtttcgatctttatttattctctctgttttgtctttacattaacaatggtttactccctccgtctcacagaaaaatcaatttagtaccgggcttgatatgcatatatctagatttgttgtattaggatgtgtcacatttaatactaggttatttcttatgtgacggatgcatgatccagaataatacttaatccagccatagggcttcgttcatttaaagaagtcctcaccgaaagataaaactactcctttatttattttagagtatatttcacagaacttttcaaactatcataaaactataaatttaaatatatatactttatataaatttaaatatatatactttatattaatagtgaaatttggtaagtctggagtaatcatcggcttagagtcagtatcggcttcagagtcctggcattagccgataagagttatcaagtcaccagcagtcggattcttggaggattcggttaaggacattaatctattcaaggaaccttatccagaagagaccgagttcaaggaggatgcggcatgatagtttatctattaattaggaatagtttgttagttttcttttatctttaggaaaatgtgtttagtgtccgataattgctttatgttttccttttatccttaggaaagtttctttcttatcctacaaggactagtatctccccatgggtataaatatgtacacccggggtcattgtaaaagaatctctcgatcaatacaactactctcgacgcattgccaccctctttaccgaggtttttacttatcattcggtagaacttggctcttgacgcggggctgcatcggctttcgatctccggcgaaggggtaagccctatgttccaccggtcctggtgaatctatcggctacattggtattgttcaaggctgcattgcttcgatctcttggatcgctctggtttggttgatatatttgcctacctgatatctcaattctatctctaattgcattgtgtttagagacgcatcggtttagttggaactgtctcggttaggtccgatcttctgtcttagccgatatatctctacaatcacaatgctgttctaaatagatttgttatatccatcacattagatagatcaatcagctcatcgagtattagattatcatatacaatctcatgctgcatcggttaggttcgacctactagattgttattgataatataagtcttgttaagccgataggttcatgctaatgttttatcggggtgctagccgataagttatctagacgttgcatcggcttataaggattgtatatatataagttagatttagccgatgataacaaatgtttcattgatctatctaatcttgtggattttatgacatcggaacttcagccgatgtatgctttaactttcggatcaatatttgttctatcatatcattgttagccgattagtttctactggattatattattgttatttatcatcatcagccgatcgcctttatatcattatctacattgaacatatagccgattactcaaaactctatcgttatcggctagtatcggcatcggctgggattgctctatcggcttgtcagccgatcggctatttgatctactgtttacatatcttgtcagttgtaggatcaaactgactggcacgcccgcatctcaccaagatttggacctgcactggagctaaacagatctccagaccagtgtgtgcttttcgcgtcaacacattatcaaactatcacaaaactataaatttaaatatatatgacataactacaaatttaatgtcaaagttaacacataactttagatgtaaagtatcatatcacaaaactacaaattttagagtttatatccataacatattaagatcgtaaaatttgtaattatgttgataaaattaatgttgaatctgtagttttctaatacgatacattaaatctgtagttttgtgaaaatatgatattaaatctgtttggatttttatacacatatgtttttaaatacatagttttacgatggattaatcaaattagtatgaaatttactctttaggaggaaccgagtgtcgctctcacatgctcatctcacgctatccgtaggctttgttgctgatctgaactttatgggggtgtgtttgatagagggaggatcaggtagtttgaaaagatacgcaaaacgatgtgagctattagctcataattaattaagtattaactattttaaactttaaaaatggattaatatgattttttttaaagtaactattttatagaaatttttgaaaaaaacgcaccgtttaatagtttgaaaagcgtgcgcgcgaaaaacgagtgacaatctcccaatgaacgaacgcagccctgaactgtcggcggagaagatagacacggccggccaagcaacgtggacgcgtggagcgggcctcgttgcctccggcggaacgatccgccggggcacgcgtcgcgcgcgctccgccccgccaggagcacgtggctgcagaggcgaaccgttctgcggttgagccgaggtggcggcttacggctgccgctggccgatggcctacccgtacatgcgcgcgccggtatttcggacgcatacgccgcgccgtcgctggcgggcgggattttacaggtgaaaacgtgtgggaaatgtgcgtacgacgactgggtgtgcgtatacgtacgtactagccgtttactttggcctggttactcacttgctccggtggaaggacggaaggtacgccacgctcggcgcgggggcgagagggacggatactcgatcgcggatagtgatacggtgggagctcgggccgtgcacgtactgcgtttctggtagatgcgtgcccccgtgcccggtttctggtttggtctcttgacccgtgaaatggattttaccgggggctttggttggtgccggtggcaagcgtacgactgttcgtctgttcctactccacgggcagagcatacgtgcacgataggatcaagtttaaaaaaaaaggtgagaggtgcaagaagaagaaacatgattaaatggttagtcttcaaaaatgaaataaaaaaggtcaactatgaaatagaaaaatgaattaaaaaatcttcagaaaatgaaataaaaaacagtatagtttttgggtttatgttgccgtactgccagaatgtcaactactccgtattttctatagcaaaaggtctcacaatgtttcccctgttgcacagggaaaataaaagtagtcaaatggttggtaggatacagaaaattaaacaatccacagtttgctgagtattttttccttgtataataaataaataaacaatagaaaaagaaaaaggaagcgtcaaagggagttgagggacgcaggcaggatactgtcgtgggccgcaaacttgctccaaaaactgtgttcgtttgcagccttgtagcatactcccccgttcaaaaaaaaaaattaacttgtgttgtttcagggcttgtttggtttggagccaattttttccctactaaaatttaggtagtactaaaacattggcaaattttggtactaccaaattaggtagtattcaatttaaactatggtgggtaaaatttggtagcaaaccaaacatccacttgctactattgaagttgccaaaattttggtagggtagtaaattggtatcaaaccaaataagccctcaattttatcccataaaaaattaatttatactattctacctatcctcaacatataaacaggaagttttatcccttaaatgtcctctatctatcaccattactactttttctaataataaaaaacattgatcatttttactcttcactaatttcactttgaaatgctaagaatggtcttattagggactctgcatatagggtatgtttggttcctagccacacttatagatggccatttgggccgcccgacacagcatggcccaagcctggctgtgcctcggccgaggcttgtcgggctggcacggcccaaccgactcaccgtgttgtgccgtgccagcccacgggcggcatatacgacccaatactactcggggccagctcgaaggcacgaagacccatcgtgcttgctctcagaaaaagtctatttttgggtccctcaactctgcgggctgtgtttaaatggctggaaaataagtctattttttatacctcgtgtcttgggtcttgccttacatgattatataagtctattttgcatccctaatttttttttatttgatcgggccgtgctgggctggcccaccccgtgccgagggtgtagcccaggcacggctcggctgttggatcaagccggcacgggcacgaccccaggcgggccgtgtcgtgcttgggccaggccaaaactgtgggcttcgggccgagccatgggcctcgggccatatggccatctatagccacacttgaccacgctacaatttatttttgttaagtatgtgttttgactcactatttcacaattatagtcttggcttgccacacttagtgaaggatccagaaaattagttccttgatgtcataatgtgtctatcagagtcatagtatactaattatacttaaattatagtattctaatttatggataaacagtttaaatataggttttactgaaagtcgtcagtgtcatctgacaccggcccaatacacggtagattcatccctgaccacacttttttaatagcatgtctcgtatatcatagatttaacttttttttaacacagtttgtgactaaaatttgctcaccacattttttgtgatcatcataacttatctaattttagtcgtggtaaagtgtgaccaggaacaaatacatcaataacgcggctttcaattaatagttacttcctccgtttcacaatgtaagactttttagcatagcctatatttatttagatgttaatgaatctagatatgtatatgtgtttagatttattaacacatacatacatacatatacatatatatatatatatatatatatatatatatatatatatatatatatatatatatataagcaatgctagaaagccttacatcgtaaaacaacagagggtgtacccataatgcggctttcaattaaaagctgagtctctgacctactctaaaaataacaaacacacccatagtatttcaagagcaaacctttacaaacatcgctcggtaacaagagcatcacttcgtgtagatttcgtcaacatcccgtaaaatcagaaacgtagtacaagtattacggtacacgacgactttacctctcccaaaccaaactcacactggaaacccagaaacaacaacgttcacagtattacgcgcacaaagcgatctccagttaattctccaaccaaactcacgtctgcctgtaactactccgtggccgcaggttgtacctccggccagccgacgtcgtgatggagttctcgccgacgacctcctccggcgaggcgcagtgcctccggcgaggagcgaccaccgccacctgccgctgctcatcccccggcaaggcgtagctcggatccgcattgctgtccacctcgtcggccaactcgtcgaacacccacgagtagtccatcaggctcctctcgctctccgcgccgccgccgccgtagggcagcatcttctcgccggcggcggcggtttcctccagcgcccggaccttctcgacagcgtttcggagcaggtgatggttgagtagttcgtaatccctgaagaaaagtttacaggctaattaattaccaggagattgagatgaatcacgaatgcatgcaaagatctgatcgtgatgaacatggactggatttggtggttacctgaatgtgaatatggcatgcaacatctgaacggtggcaagtgcaaggaacactgatctgacaaggaacaccttggatatgacccagaattgcttgtcgatgtcgtcagctccgagcttgatcaggccaatttcgagcagaagcgtgatgcacaagcctgccaggagagtaaaaagcaatagcaattgagcattttacaaggtgtaaatacaggtagtaactgctaatagtatgtgaaatatcctgagatgtttttttttttaccaaagtaaagatgtcccctgatgctgaaagtttgcttcgcgcttgtgagcatgtagatgagaaacacgatgcagcagtagaagaagaacgccttgatgaaacgtgactcggctaagatggcgttgtggaggatgtaaagtttgtccagagcagcaaaaatgttggcctgctttgctctgaactcttcctgcaggacaaaaggaaaaaagatcagttgaaaaagaagtcaatcctatgcctactgattgatcatggttaagcagtcaaacaaaaggaaaactattctcgtattctgatatgcaggaggagacaataacctgagcttccagtattgagtgtgaattatgaatcaggtgttcatgagcttgccggatttcttcctgcctggacnnnnnnnnnnnnnnnnnnnnnnnnccaaactgtgcaagtttttgcacagtctccctgaaaattccagtcaaaatcagtatattttacaatgaaataaaaaaagaataatggaagcgagaagttaaaatacctgctttcctcaagagcttgtgcctgaaagctgtacagattattcagaccgtccatggccttgctctgtccatccaaaagttgcatctgattctccaatgatttgccagccacactcccaatatcatttgcagtgctctgcaaatcctgcatcttggtggacatggaatcaccaacagttttgatctccctctgaatatcaacagcctcttccttcagcttatccatcccattgccaaggctctcatacgactcctgaatatgcgtcatgccggcatcgatcgtctccctcatctcggtctgcccttctctgagctttgcctgagagtctgcaatctccttggactgctcaaagatggccttggagtgagccagcacgtcgtcgatctggtctccgacattcttcgacgcctctgcgagatgatctgcctgcatttcgatcgacgagatcgtctcctgaactttgcgtgattcttgtatgatctggtctgacctctcctcgatcacctccagcttctcctcggctgacttggatgtccttgtcaggtcgttgacaagcctctccgtgttatgcttgaacgcttcagctctacacaaatcaacaaaacatgaaaaattcaagaagcagaagtgaattgcaaactgaaaatgggagaattgcacttactgcaattggtggcacagggtgttggtctcgaggaagaactcgaggaacacctggtcctcggagacgccgagcctcttgcggcagtgcaccatgtcggagacctcgccgcagcgagggaacggggggcggccggagtcctcctggaagcagctgctgaggtgccacgccagccgcgactgcatctccttgtcggccatgatgtcgccgcagctggcgaacagcctccggtacgcctcctgccagcagttgctcggcccggcgagcttgctcctcgcgttctccagcagcttcaccgccctcgggtcgtcggccccgtccatcaagaagtcggccaccgcgccgtccagctccagcatcggggcggcgcggctctcgccggccgtcggcggcgaagacgacgacgacgaggagaaaatgttccacgagaagccgctgctcctcccagggcacagccataggcaggccaagatcaacaacaggataatcgtccctgcgtgtctcctcatggtgaaatcggtgaactttgcaccgggcaagaagcgatcttggtgagtaaaatcacgggttaattgcagttcctgccaggaaggaacaatcaagaaggcaagaattaaagcctattcatttgatgcagattgttacgccccgtgttaataacattctgaaattcttaaacccaaagaccccaatcgaattgaatcaccgaattgaacagaataggaattaacttgcaaatttgttcagactaaaatatgattaatcgaagccagtaacaacctaaaattctaaatcaaatcgccggagcaagatgcaacaaggggcagtgacaaaatagctgcaactttcccctgcggtgtgaagggctccctgataaatagcacccggtgttccttagccggcaagccagagagatccagatgagcctgtcacatcacatgcaggggaagattaagagagaatcaccctaaactaaaccaaatgtttagaacttttgacaccgaaaatgacagcgacacgcacgcaaacacacggtgaacagcactgaacttgatattagtaatggcggtttacatttggaatgtgctagttatcttacacggttacaccaatggaagtgtggaaagctacttggatgccaagttgaatggtggggcacagatctcttgccgtttctatgttccgttcccagcaaggaagatcttgatcagttaatgacaaatcaagtcggtgctaatttaagtcggttgcatgcactggcttacaccacaagatactactccaagaggcgcaagcgcttggcccaccatgccagtgacagagggccaatcaaattctcctctcctataccttgcgggctatctttactgacatgaacactgaacatataccgcgaaattctgaaaagttcagaacgaacgaacctacaacgatggttcaattttgttgcaccggtgaagttcagagagaagaaagaaatctcgctgtattttgattcggaaaagagaggcaagagcagaggaaaaaaatggaggaagaacttactcaccggatcgcctgacgttggcagaggttgaaggcgacggagcgcgacgggaggcgaagctgtaggaagggagagcggccgccatatatgtagaggttaaaccggccgtgatttcactggcggtagttcgcggtgaaaacgcgcgccggttaactcgaaacggcgcgaacgggcgaacctccgcgtgagaaacagacggagatcaagaggcggcggcggcgctggccgtgccgtgtgccatgcacgcggttgggatgtagtagtacaaaaatttggcaactctttacgctcgttgagtgagcactgaattggcaaaagtttgaaagtgttcggtacagcaaccgtctgaaattggcaaagtttgcatttctgtttggagatgctacatcatgcgcaaaaaaaaagttggttcacatttctccaattttatttttctttcctgtttgtttgaactttgaaggatactaaactcgacaggaatttcacaggaacaagaaaagtcacccgcgttccaaatggatcatgaaacatccatgcggtgaactgaactgaacttcagagagtagagagacaagacagaggctgtgtttagttcacaccaaaattggaagtttgattcaaattggaacgatatgacagaaaagttgaaagtttgtgtgtgtaggaaagttttgatgtgatggaaaagttggaagtttgaagaaaaactttggaactaaacatggcgagaataataagagatttgaaggtcctccagtggtactaaaatttttagtataaattttctagtaccggaagtaccgagagttatcaaattttataccagaaactataatagatggctgtaaaatcactcgaataataatgtacacatgacccggaattttcgtaactgcactatgaaatatgaataggccattctgtcgcataaataggaatttacagccatgtaatgagtactctgaaaccccaattgctggattacctacacaaccatacaggagaagattacatgcactgggctaattcatgtccttatgatcttatattcacaagaaagtttcagtttctgtatacccatcttcatccttggacagaaaaatatattattgaggccaactaaattgacacaatggaactaatccgtgggcacctcatgcaacaatagggtaggatgcgcaagtagcaatacctgcataatttatatcaagtcaatattgtgatgcagtgcaatatatccagcgtaacaaatgcgatatcagttcatcgtagccatggacgtcaatatggaaaacttaccgcacatgttcttgcccatttccatcttgaagtaaccattgtcaccccagtctgcaccccatgagttcttgatgagccagtagggaacgccattttcgacaccatagccaacggccagaacagcgtggttcacatcctagtagtagcattggaactcacaattcagggtataattggacagtaatcatacaaagaaaaactcgacacaaacaaatcaaatcatatactgaaaaatgagctagatctcttgtacactcaccattggagaagttccacaatggtcacttgtgtaaactccactcttgtacatcctgaaaccgttgatcacctgaaggcaacactaactggacgaacaagtccaacagcattcttcagctcatcctcagcacccttaccagagcaataaccaaaaaaagaggatcaataaatcagaacagtatattctagatgctcccatcaaactttacaacggggttccttaccagggtgatgttaacggagtccaaaaccttgactccaacgttttcaggcttgtaatgacagatgccattgacacccgtgtaagggtaagcctcttcagtgtcaaggccaccattgtatttgatgtactcaaaggcctgagatggtaggcctccactgcatccgaaattattgtatgcagtagcacaatcaaccagctgctgctcagaaagagagacaggcttcccagtggcctgagtatatgctgcctcaagagaaccagtggtgctgccagaataagttaaaggtcactcaaatgatctgattataggaccccccccccccacccgtgactttccttttttctactttgtctgctataattgaaatgaggcaccttttctacaacggtcacactatataaagttataatcgaaagtaacattccaggaacattttcaacataggtttgtcaattggtatgtgaagcatatttgccactatacttgtggagtagcaagaatatatgccaaatggacgaaaagtaacagaataaattcatgaaagacatatgataattgaattgtatgcttatttgagagtagtgacagatacctctccgtccaaaaaaaaaagtccaattctaacgataaatctggacacctatttttgggacggaggaagtacaagtcaaatagacaggagatatgaaaggctccattatcagcaaccgaaacagattatgcaagcagcactagaggggtgttcgtcactactgccggttccaactttcccctctcgttttctgctcgcacgcttttcaaactgctaaatggtgtgtttttttacaaaaagtttctatacaaaagttgcttaaaaaaatcatattgatctatttttttttaaaaaaatagctaatacttaattaatcacgcgctaatggaccgctccattttccgcgtgcaccgctcttggttgggaacctctagtagcgaacacaccctagttagacaataatgtcagattctccattattttattactcgcatgtcacacgagtgcaataatttaagtcccatgcttaacattttcaaatatttttgtaatcgtttctgtggtgaaagttctccagttctcacctactgtactcgagagttagcaatctccagcttaaccgacatactgatctgccagtccccattcaacgtagtttaaaactatttaccaaaaagcagcacaattggaaagtgcatccaccccgattactttcaagaccatgattgaatcagagtttgcgagtcctgacgccagacaagcagactccaactggtacttcctgtctggtaagatagccttttacacgtaatttcgaaagttcagttcaataattatcaaagcaacccccgtttgttagcacactttgccgtaacttttttttataggttcagtagttcagggaagatatttagaaaaatagcacggattctttctttttcgttcgatggattctattgttattagcacaacaggattaccaatacatgttgcacctcaaaagatagtactaagtaattttatcatccttaaaaaaatactactccctccgtcccataatataagggat

SEQ ID NO: 25835 - DNA, 38391 bp, Oryza sativa
aaaaaatttgaataagacgagtggtcaaacgttacaagcaaaaactcaaaatcccttatattgtaggacggagggagtagtagatatcagtatatcacactttgtagtataaaatttggtatctttaagttagtaaatacctcggggtaaaaaaaaattagtgtaaaatttaggtaccttgaggaccaaaatttctcaaattactactacagtttgcatctagaaaaatactcacacagtttgcaccagaaagtagttacctgaaggtccaacaggaaccacagtgaccctggtctttcacggggctcacgatcccatcctccctccagtctttctgcagtaactaaaacaatcaggaaaaaaagtcccccaaaattcagtgctaaaacgtacaaaatgcataacctgatgggaccgattagcatgcaaggacacagacacacagtgtatggcctgatcaagcgacccaataagcatgtaacgacacactgtatggccggatcaagcgacacaataagcatgcaaggaccacagtcttgcgagtatgaatgccatactctcacaactcacaatcgcacctacaaatacgggcagaaatgctgtacactacagttcaacccctcataaaaaaagatggatgatttctatttttcagaaaactaaccaggcatagcaggctcgttgttcgtatcagtaactacatcatgtgcagaggtcacagaagaaattaagtggtcattaaaaaatgttctttacggggtatagaagccgcgaccgcgaggacacagtaacacgtggtagggacagccaatcgaatcgagcgaacgctgcagcgatgagcaaagcaaatcttgctgttccttgcaaagcccagagttcagatcagaaattaaaaccctctccgagcctgatccccagctcacgcatggcggatgatgcaagaattccccaagaagcaattcccacatgtgtgtgtgtgtggctacctaccgttactaccacgttactacagtacagagctttggcacttacggtctccgggagagcggcggcgtcgcgcatccggtggttgccggcgagcgtcgccgagcagttctgcgccgcgccgagccggctcgcctggaactcctcccagctcatgtccgcgaaacctgcaaaagcaccgcgacgggggtgtgtgagaggaggattaggaggattaggaggcgctcggctcgaggtcctacggttgatgccgaggcggtaggggaggcccctccggttggtggagcggacgagctcgaggctctcggagaagatccggaaccgccgctgcacctccgccgcgtcgccgtacctcttcccatgcctgcgcgtaggacgagatcgaacgagaggtcaggacgacgaggaagacgaatggccgcggcggcggcggcggcggcagcggcggtggggtgggattagggggaaccgaacggggggggcggcgccgacctgacggcgaagcgggcgaagcggagggcgtcgcgggtgcggccgagggcggcgatgacggttgactcgagcgcggaggcggcgtggtccgtgacggagcggatcgggttggagtcgtcgaagccggaggacgcggcggcgacggcggaggtcgcggcgacggcggcggcggcgaggaggaggataatgcggcggtgggccatctcgccggcgaaggtgacgatatttttttactggttttggtgtgagagtggacagtgggggcaggaagcttggatggatctctgggttttatatagggcttcgcagccttgctggccactggtatgacttggataactttggttgcgtctttttctgcagttttgaaaatttcagttagctatatttgaaatccgattaattagaaacatatttactttcattatcattttacaacttcttgatctacagtatcatgtacattagcattgggatcatgcatctctgctgatttttttaatcagttattactttataaaaaacaattcctagctattaatctagacatatatatatatatatatatacatacatacatacatacatacatacatatatatatatatatatatacatacatatatatatatatatatacatatatatatatatatatatatacatatatatatatatatatgtccagattcgtagttaggattgattttttttttacggaagggtatatcacatgactgcgatagaaaaatatacagtgcacaagtatgcaacaggcacgtgctaagtaagcaatgggggaacccgtggatattccccaaaattttcatgaaaaaacataatatatgtaagtatattatactgtatatatttatattcgaatgtgcctaatacttctttttcctcaacaaattcactcctgcacttctagtaaccaactgtctcaaatctcctaacactagtgtaccagatacctctatacccacctaataaatactccatccgtcccataaaaaaaccaacctagtactgaatgtgacacattctagtactggatgtgacacattcgtttttttggatggagggagtattgtcgtgttcgccactgtaagtaagtaagagtgacccaccagtaaaatcaatttttgaaacagagaatgagaggaaggaagtacgcatctgtcgaaaaaaatgatccaacaactttggaactgaaaatcctctctgatatataaaaaaggcaaataaaattggtgttggaaagtcatgttcatgcatactacctccatcgaaaaaacaaacttaaaattaaatgcgacatatcatagtacaacaaatcatatccaatccagattcagatttttgtaggacggagggagcaaggttgtgttattccctttcttttctaactcatcttcatcttttcttacgtgtatgcttttcacgctgttaaacaatttgttttttacaaaaaaaaagttttctatagaaaagttgttttagaaaatcataataatttatttttaaaacttttagactaatatttaattaatcacgtattaataggtaacgctattttccgtgcagggaggctcccgaactcggccagaaacttgtttgcttttcaagtttccatctcctcttaaaaaattaagggctgtttggatcagggactaaaattttagtctatatcacattagatgtttggacactaattagaagtattaaactgcaatactactgctagcgttctgcatctgtataggtgaacatccaaatctgcagcggaggaaaggaaaggtacccatgggccatgacgccacgggtgacgccgatcgatcgatcgagacgcacgctccgccggcgctcgctgattggcctccagcgtccagcggaagcttcagacaaacacggcgcagaccatgcaccaatgcagtgctctctgctctgatattttcgttctgaagctgagctgagtgagtagccgatgccagagcgagacgggaacccatcgcgtcgtgattggctgagcagatgagatgcagatgcggttggaagaagaagaatggctggcagtccccgatacgacagcagtatgcatggagtcatggagatccgtctcgggcacttcacttcgatctgcaagtgtccaagattgcagctccatcccaaaataaatttatttatggtttcttcgatatttgactgtccactttatttaaaaaaatataaaaaaatcagcgtaaagtattatttatgttttattatctaataacaacaaaaatattaatcatgaaaaagatttaataagatgaacggttagatgtcgaacacaaaaatctataaataaacttattttaggatggacggtgtatatgcctttgtctgtgtgcatatgtggacagtatggaccctgaattcatgcagactaacggttcattggatcggctgcatagccgtttggtctttttctcaagagtttttgaaagcatgcggatcacttttgtttgtaggtgacggtatatatgatttcgttgtggccgttcttcagaacagaggcaaaagtgtcaccgttcttcagaacaaattaattagcaaaattaaaaaaggtctgagttacctagccaaaaaatcttaagtgggctcatgttttctagtggacgtggatatatgtagtaggagaattgtagtatagtaaatttctgtttccttttttttttgaacgtctttgcgtttgatttacgagatagagtatgttgaaacattgctacctagcagtaaaactgtgcaagtactagctatcatgaacagcagtgcactaattaatctgtatgaagacatcaacaacctcattgtttccctttccgttgtttagagtttgtgtttagccgccgtagttttctaagcttcagcttttttattttgatttttcttccttccgctagcataagtcggtctggctgattgcattgtgtaactaaaactcttttcttctaatatattgacgtgcaatccttttacgcgttcacgaaaacaacctcattgtttcgcttctatatatgctgataagctaaaaatttaattttagagttcattttatgggttttttcatcgtagtttattttatagcatttgctttcgaatctctaagaacatgtatataaaaattttaccgataaattatttgttagttgctaataagccgtaggaataagcataaacataagcgaaacaatatggctgtaagcatggccgtgtctttagtactggacggtgcatacctcaaaactcactgtaacccagtgatagatgtaattttaaaatatagatggggtggcatctagtaagaggctaatctggatagccctagttggatgatggtgcaacacacataaaccatagtcaccggctcatggcaccggcacaatggagaatggcacgaacatcaagcaagttaacaacgaagatttaacagttgaacaaatgccagagtcacatagacgaggcaatgagtatagtcataaagatgagacggcgatggaggcctcttgtcaggaatcaggtatgaaaatggtagaacccaacattattaatttaaatatgatttacaaaatttttatatctagaatgtccattttattctcccggagtatttcgttggataactaaacccctgaaatattttgttctcattttactccccccctaaactattaaaaaatggttttctttaatgcttaatagtatttctcttcttggtttctctttatactacttgtatgttaagtgttgtcgaaacgacaaccgcatacgtcgaaagacgtggttactcaacagtggttgaaaaaacgaagtgtattaaattttgaatttcactcgggatccccccgttacatggccctagggggctatttatagccctattacaggttcttactactagggtttaggttatacaggggaatttacatgattacccttacgaaagggacatttacaggggtacatgatgatataggggctcatgggcccctgatgggccgtctggcgatcacctgccctattgcccctaggcttgatgggccggaaaggcttcttcggccctcgcggaggcgaacttgccaagtcgaagtcgtcttccttcggcagatagtcttcgccttgcacccttcgcctgagacgcctctggcctggcaaggcactcgtacgactcttcgcctcgcgccgttcttgctccatagccttcgccatgggtttcagcagatttggtcgaagggcctcatgccatccgccaacattaagtataatttttttaagtcataaatgacaccattatcaaagtgtcagaatattttcaaaattcttaacaaaatattaaagaggtaggttataatagatctaccaatcctaccaaatttagtttatatacgggttatatatagagagagaaaatgagaaatattgttagggagtaaggtgaaccgccttcaatagttcagaggtgtaaaatgagctaaaaattatttaaggggttaagtgctctgttaaaatagtttgagtgagtaaagtagacttttttaatgtgtatttaccaattagctatttaatttagactttaatatggtactaaaataaataaaaataaaatcaaattttatataaggcctgaatcagaaaggatcaaaatggtaccttaatactcattcggtcgtgaatttcataaataattttatccctaattgaaatacttgatgtatcggatggtttgatagtgggatgatgactaatgtgttaatctaggtatgtgaagtggcactgattgtagccggactggcaaacccacgctacccaatcaataggtgtgtccgtccctcctgtatccttcttgagaagtctgcccctgcagctgtttccttcttgagaggacaggacgagagattcagattctttcggtgaatattcacatgacaagtgcctcaagagatctttacttatatactgcctccgtttgaaaagataggaaatttctagctatatgtttagataagttacttacaaagacgctggaacaaatgaattgatcagcttaagttttgaataagttagttggcataactcaaataataaaatggattcatcagcacagagatatttatcgtgtagcaactggcagcacaccatcactcagcatctggagacgatggctgcaataacaaatagacagcgaaacggagagagactttcaaggcaaaatattgttgccttcggagtgtcaagtgtcaacatcaacctattattccccgaaaaaaaaatcagcctattatttatttgccagaaaagaaaattcaatgtgtgttttcttgagaaggaaaaacacctaaagtatcacatgcgggaccaaaaaaaaaaagataatgttgtgtgcttacgcacgagatgtgggcaggctaatgccttatgacattgatcacagctaccggatttgatttgatttgcaatagcaaaccttcttagaatatgtattcacgtgtgtcgacaaatgtaggagattccatctcggttggtactggtacatcaagaaaatgtcagatatcaatagagaacactattttactttctccagtaaacctgcatgacattagccctactagctaattcatcattcttctaattttgtaaaatattattgctacagctacgaatgatgaattataatatcatttatctgaaatgacatatttatggcatgatcgaattaaccctaaattttgtaggttaacccatgcagctttgggcttttgccccatactttgtcggctgggtcggttggtcggcctagcctacccacatcccaattcacggcccatgtaagactaactgcaggattgggcccacaaaagaacggaaatcctctctcagttccttgtgctgcggcccacctattataccgaacgaaggcgacagggccgtagccatcggccgagcagagcgggctagcgaggaagcctatgtgggccagtgaatttcggcccaactactgttgcgacctgtatggcccaggcccgtttgatgcatcgcaaccatcggttgcgaactcgcgatcctgtaagtcaaccccctgtgctggatcgtgtaccgtacttgcggtccatgtccttgcagataggttacgctgtcagtttagtcactgcaggccatgcttaccttgtggttcagatacgcccgtgtccgtgcgtgtgttaactgtcggtcactcgtttcttccgttcatccataagcatcatgtaagcaagcgtgtcacattctccaaattgagcttaatgatttcattaatcgcaagaaaaaactcgcccatcagtcataaatttaaagctcaacgcataactatctcatttcccatgtgcaagaacatttttctccccatgctctgaagtctgaacttcttctatttgcaggtgaaggcgtccaaaaaaattaataataaaattcagaagcaaaagaattgcatccaatctctgaatgactgaatccgccgtccatgcttggtatggtaagattaatcgaaaaccttaccaatccctttcacgatccacgtatccgtttgagtttttacggcgtgtgagacgcagaggtttccgtcgttttcgtctcacctaacctaatactgctgcttcagagttcagaccggacaaagattgaccgtgaaagtccagtccataggttgctaaagtatgcgttttgtgaaggtcatcagtttcgtgttctccttgtatggcggcgcgatcgatcattggcgtcattctatcttcagaactcgcgtaatccttcatcagttggtttcagtttttgccaaatgatccgtcactcgtgaaatttaccagtcacagcagtacagcacagtggtttcctgctgatcagatcattttttctagcaaacagataacttagatctcaaataacccaatctgaaattcgttcatatgaagatttaaactcaggactacttagccctcaaataattaaatctgaaattcgctcctatagagatttgaactcgggatcttagggtgctactcaggtcactgtaaccactaggcacagcagtacagctcagatcatttggaagaagaggaaatgaatcaacagtgacaacatttaattgaaaaaaaaatcagcacgaggcacaggaggaaattgaatcgattgacagtgagaacgtttaaaaattgacaaatttgcaggaggccgggcgctcgacgactgaattcgtcaatgagttatgagctcctaatcactagctctgacttgcacgctccatttgcacaactagctagttcatatgcttccggctccactaatccgctaaaagcaacagacgcgatcaagcaaagacggctgacctgggagtaaactcagcatgctgtcacgcccccgatcgcaaccagcggcgcgtgcaaatcgagccggaaaactgctgcaaggacagagacgatctcgtatatattcttttcttttgtcaatttgggcgcagggagagacacctatccatctacctgcagctgcaacttggtcagttcgttcaccacaggccggcgatctgctgtggttttcgttgtggactatgaaacttttgcacaagtcgcgtgttctgagctgactaaaaaaaaatggctcttgcatcggatattcttttttatttgtatatcatctggtcgcccaactacacgcacggcaatgctcgtaaatatcgtgaggctaatcaagctggtttcagggttaattaaccataacaagtacggttgcatcatgagcacgtgataaatcgtatataacaaattaagcagcatcaccacttgggtaagctgtttagtctctgattaattagaaaggtgcgaaaaaagatagagggaccatatactgtggccaagttgacatcttttttgcgcactgatttcgcatttctgtggttctgcatgccctaaaaagttatctcgactggagaagaagcagtctggatagctgactccattaagaacggcgagctgggtgattaaagagggattgcccagctcatgaaagcatgatgtagcatctggtcgaatggttgatccccccttgatcatcttgcttttttgctatggacctcgtgtcgtgtcaccacagtgccaaacgtgctaaattattacgagaaagcaacgcgattaattagctcgtttcgttccgagcaaggagactggctatgctactgtatgtgtgttcatcacagaagaaacatatatatgtgtgtccgtcacacacaagaaacatatatatagtccctccacagttataaataactgtcactattgatcagtacagttttaactttaaccataattcttttgaatgaatagatcatgacgtgtttttaaaatgaatagatcatgatgtgcgattgtttcatgactatattttaagatgtaacactccttgttaatatgatatacttttaacttttaattattttatacaatttttttaaaaaaaaggcggttaaagtttgaagataacagtatccggtgacaaatattttgacaatagaggaactatgtgatgtgcatacatacgtgtgggtgatttcaccagcacagttgcaagagtagtagtgcacactttgatgaacataaaagtctgaaagataatattttatttcttcttttttccatcgtaagaagccatttggcgggccagtcaacatgtacacgtcaccagagttggcaggaaaaatatctgtctattttatgaggtatctagcagctgatggtcggttgacaatgatgcatatatattggtgctaaaacttaataaactaccaatcagaaaagcgtatgctgcatgcatgtatgtactagcgaacccctagatatataaaacatattgtactagctagataagaaagaatcaaatcaaaaccgcctcaactcgaaacagggcgagagtacgtgggcgacaggaatatatccagtcctttttatccacacatcttcagaaacacagttcatcctgatatcaatatcagctgaagcacctcaggttgattagttttatggatttgatgtgttcctgggaatgtttttagtcaactccccatcaatcaaataggctaatttttttttgtcaacttatcagcctacaaggtagcaacgcaatgcatacataatgaatccatacatccagtagttgttaacaacaacgaaatactacatcagtaatactccatatgcagtatgggaaaaaagaacattaattgatctctagaagaagtagacggcctaataattaatttcttaagcctctcactccttgagcctctgttacatctatcttacgtatgcaggcaagttagaatgcggctggtcaagatggtgaatgcatatgcatcatgcatgatatattccaagtctccgtaccatttctcctgcgttaattcctcctaattactcgtaaaatcattttcaagatgatgaactggtgatgccatcctttcgtaaacttctgatgtgatttaccctctccaagaaaaactcaacgaagtctgcacatatacagtactctcttttaattatcactaccagtatgtcttaatgatccactactcaaagccttaaatttcacgccatgaaagagatttctttctccacggcgattttttggtctccacagatacagatatttcagtacccaatctgacgcgacaaagacgttatccagacgtcgtacgacgatttgtacttacacgtaagattaatctgcagatgagaggagcatatgcatcgatcggcttctcttctgaagactcttctgaaaattggatgtcacgtacatactacgtgaactgtgctgagaatattaccactcttggaagttctcctgatgcacgtatctcagattgggaataagttgagtatagaggataataagattgatgatgatttgcgaggaaatcgatcgattacctaacgcaaggcatggccaataaaccctaataaatgaacgagatcgaaaaggatgtccaagatatttgggttaggatatactgttaactactgtacataggtatggattttggggatatttttgggcgattatcttgaagaattgacagaaattagtaaggacgacggcgactaggttgatataagcgatgatgttaatcgcagtgtgagatctgaataagtaatggactgatcggcaacttggaggatcggcgaggcagacatgaagtacatatcgcggtacagaggtagctgcaagtttgtccaccgcattggttgatgactttgatctcggtgcaccacccaacgtcagaaatagactaccatgggtggagaaaaacacgttgctaattaattattcactaatgatgttcttccggaaaaattaattaactgatgatgatttcgtgaaggagttgatcgactctcggatagtcgctgaaaatcatgcgtgcataaaaagtccgagcaaatggaaagaaggaaagaaaatgaaatttatactgagcaaccgtgtcggtcatcgcctatcatcaaccacaccctgcacgtccaggtgcctcgtccctgatgcatccacctggcgagccatatctttatctagagaactattaatttacaaccctgttttgaaaaattccaaaacgagatattgtaaataaaaaaaatattggatttaaggtccatgaacaactgaacagtgattctagatgttagattctttttcacacttcccaagctcctaaataatacgttttataaaatattttttctaaagcaactgttcaacatattactagttaattcatctgtttatagtttcaaatagctataaaaataagcgtattcatcaatttcagttatcttaaatggggcctagcggtggatcctggtaataaaactttcagattttgttgtgaatttagcggagatctgttcaaatttcaaaatttctcaaggaaattcctcccaaatttaaaagcctctgtggcactcgccctagagcccaactgacccacgcgcaaaatctgcgcgctttttgtgtttgtgcgcgcgccctcatgcacgttcgctagctgcaccgcacgaccacacccccggcccgaccgcccgacccgacagcgacgacgacatcgctcggacggcgggccggacggcgccccggaggccacgtcgcccaacagcgagaccccggccgcttccaccgttccacgtgacgcgcccccgttcggcgcgcgcgccgcgagcggatgacgcatccaccgagatatcgcaagagcgattgtgaaccgcgtcgaggtctcacgctctcacacctgttgccgctgctgccgcagcgcacgcgcgcgcgcacgtacgtacgcgccggtgttgatgcggctgcggcttttttttgcctgcccttttacgccggcgcccacagcgccccgcccaccacacgtgtctccactcgctcgcctcaaactcgatcgcgcgtccgcggccacgtcgccgcggcagtggcagcgacgcccgaaccgacgaccgcgttagtacgtagtacaacgttgtcccgcaccgcgacatgtgtggtttcgttttcttttccggatggttgacccgatcctcgtcggcggccggtgtcgctgcgttgctcgtgcgatgcgacgccgacgacgccgtcggccgcttgagggattcggtgaaccgcggtggctggaggggggcgcgttacaggtgggcgtgggtacgtacgtggcgagctcttgcttctttgggaagagttgaatccctctgaattattgtgatctgccgtttcctggatcctttgtcaggcgtcagcatttgtgtttcttccgtttggccggtgcatccatctatccgtcatatccattgttggtgagagtgcaaaggttgacgtacaaatccatcaacaaatctggtcccatgcatgacgaaactgtacagtgcaaagtccagcgtgcgtgatgatcgtggctaacgtttaccataatcttttggagtgtaaccaagcatggtatgctttactgttgcaggaagacaaaaaaaaaaaaggcaaaacatgtcaccaaccaaacgtaaaattcccattaattgcactatatatgaagggttaactttttggaaaaaaaagaaatatatgtatttacacgttatatatgagggaagtagaagaagcatctagaagtggatatatacacagaaatgagtaaatgacacgaacaacgtacaatccaatccttcagggcgtgatctcaacctcatggtgataatcatttctattttaattaggacaccagatgagttgtgcaaccaagagactgaattccacgtcaggacgtttctttcatcacttgggcaagaaaaaccttgtggtttctgtcccgtttccttcagttttccccaagaagtttcaggaataaactaaataatcctctgtatcaggaagaggatagcaccgattagaataatctggtccgatgtgcacgcttcatttacaaacgtgtaagtatgcaaccgcctgaagatctttggagaaaattgaattgatcaaatggacggacaagacagctccgacacctaaacacagactgtttgggatggccccataattcaattgtctctgtagcaatcgacagcatgttctcctccctttggcctataattcatcagagaatttgtttgtggggtagttcagatacggtattgggcactcagatgcaatgtctttgggaacagaacagacgaacaattttcagtccctttcgttcagagaaggatataaaattagaaagatcctggaagcaaccaaagcagaagcatcaggttctagtagcaagtagcaagcagacgacacagagtcacagattgactgatagtatactgcacgtggacgatatacttctgtacttgcaaatgcaactcttctgtacttgatagttttggctgaagcccatgggaaaggagccaaagatctgctggaatcaaattcctctgcgctgcaactagtattaagcagcaaactagagcttctttttttttacacccaaactagagctattagtagtacttgtcctagcttctagtaatctaattagcctcctaaattcacctagggattagccttggaccattttgcaactgaagggcgtggatgactgagattgcttgtgagattattgtgatgttaacactacatcgccacgtgtcatcgtcttgttggatggggccccacctctctcgttttaacttataagccacctcggttagtatccacaaagtcaagttggagagtatcatatgcggttgtgcacaccaagcagcaagcaccaaaagttggagtctcgtaggacgtatggatggttaaccataaagctacttgaataaccaaataaaggtgcctttactaaggagagatcaaatccacggctgatgtcgtcgtgaaaaccacctgtaacaaaataagaacaatcctttttaatatttaagttattatcggtgccattcatcatcaactgtcatcagtccattcacatagaagggctcgttttaaccataatatttctcctaccgactaccagccactcatcgaacaaatccacaacacatactacgcgcgaccgctgataagatatcacggcgcggcggtttttatggagcggctcaactaactatcaaatatttatatatttttatattaagtgaagtaccaatattttctctttcttcttcttgctctcaactattgttttgaagtatgtgtagacaagttacaataaatattgattccacatacaaataaagaaaaaactaggttcaacaagtaataacgtaatagtataatagtggatagattcattcaagttcggataagcccctcacagtcctaattccatagttttaaaaatttgggtcaatttgatcagaaatgtaaacaaacaaccctggtttgaggattgccaccccaccaacaaccctctatcgtactagtctaatagaccagtattgtcttgttccatgtcccccctacttcccctgtttgcggctatcacatcaacccgcggtttttgccgcgaaccgcaatccgcccgtgcggcagccatggcgtcgcccacacttataaaagggccctgcctctccagctttccctcctcaaggctcacctcctcctcttccctctccggcatctccatctctcagctcctctgctagctcgagctgctcttcccggatcctagccacatttcttggttctgatctctctcgggttgttttgaaattttctttggttcaattgccatggccgcgcaatcttggaggtccttcatgtgctgcggcggcggcgctgccgtccacgacgacgacgactcggcgccgaggcggcggaggatcgcgcgcaggggggacagcccgaggtcgtcgtcgaggatgtcgttcacgagcctcagctcgtcggggacgctgtcgccggaggacctgtcgctgacgctgtccggctcgaacctgtacgccttcacctacgccgagctccgcgccgcgacgggcagcttctcccgcgccaactacctcggctgcggcgggttcggccccgtctacaagggcgccgtcgacgacggcctccgcccgggcctcgccgcgcaggacgtcgccgtcaagtacctcgacctggactgcggcacgcagggccacaaggagtggctggtgagtgcgaaacagagcgttcttggcaatgcaccagctcgatcgatcagatgataatcgaacacaattcagctaattgaatccacctaattgaattgcggatttgggtttgttcatgtaggccgaggtgttcttccttgggcagctgaggcacaagaacctggtgaaattgattggttactgctatgaagccgagcatcggatgctggtgtacgagtacatgagcggcgagagcttggagaagcatctcttcaaaagtgagtccttgtctttcaacttgaatcaggttgatttggtcgaatttgagagtacagtagttttttgagaccaaaaagttaaaaaaggagtacccaattccacatcttttcgtaaataaagaaagagggagtacgcaacttagaaatttgagcacgtatgggtgacatatggtcgtccacttacgatgagctgttcctgtctccctgcctttagttcctcccttttttctcccttttctcaaagtcaaggtctctaggtgagctgttatatgactcaacaaatataaaaactcatgtttcttttcaaaaaaaaaaactcatgtgtttttattaggtggtcacattttgtcaaaaaaaaaacagcttgttgaacaatgtggaggaggaaactgacttgaaacatatttatctcctgcagctgtcaatggttctcttccatggatgacaaggatgaagattgccctcggcgcggcgaaaggcctcgcattcctccatgatgccgatccgccggtgatctaccgcgatttcaaggcatccaacatcttacttgacctggtgagccaccctacaattcagttccaatgtagtgtaattgttattcatttattccaatggtagattagaacttacagttcaaagttcaaacaccacattgtcaagaaatgacacggtttctgaaatgtccctttcatttgggaacagtaagttcagttaccaacaaatggggtcagtcaggcagcacacgtcacttctggatgaatgcgaaattagtaaatgtttggggcccaaattcaaggctgccacaaacaaccttcgcaaaaaatgacttcattttttgatcgagaatttaaactttttgaccaattgaatcattccaatgaccgtgcaaaaatatccagctgcgccacacgtttctgaactatgcttgcagtggcccagttcgttatgggcaaaagccttgacttggctgattagaactttggaagatgcatgccaaacttcagaaatcctagcaatcctgccctcacatcattcacctaatcaaaaatatctagccgtcattatccacctcacccaagtagcccacggattattaatacatgaatagctttgcaagtgatatcttgatatcccacttccattcacattactaaatctcaacttgtgtgttttcaggattacaataccaagctgtccgactttggcctagctaaggatgggccccagggtgacgctacgcacgtaacgacacgtgtcatgggaacacatggatatgcagctcctgagtacatcatgacggggcatttaacagctaagagcgatgtgtatagttttggagtggtattgttggaacttctctcggggcgaaagtcagtggaccgctctcgacgcccgagagaacaaagcctggtggattgggctagaccatacctcaagtgggccgataaattgtacaaggttatggaccctgctctcgagtgccagtactcgtgccagggtgctgaggtggcggcattggtggcgtacaagtgtctgagtgagaaccctaagtccaggcccacaatgagggaggttgtcaaagccctggagcctgtgcttggcatggatgacttcttcccagttggcccatttgtcttcactgtcattgtggaggacgagaaggtggttaacatgaaggtggacatgaaggttgaggttgaggagaagaaaaacactcaccaaaaccatcaggacaggcatcgacagaagtacccagactcggcgattcacgctggcattgtgctgcatgaccgtgatggtgtcatcggaggagggtacaccggtgcgctgcgacgacaccggaggacggcgagctacaacaaggagaggggagcataggaatagaggtggggaacagagtaggagaaaaaggtcatgcatgtacatatgctggtgagggtgtggcagaatgccacatttgattgggtttagtttttggtgttgtcattttttagctttcttcttgatggtgacagtgggtgggtgtaagataatacaggaatgcaaaatagtgtgatgaaaagttaggcttggatttgcaaggattgttggatgttgtacgcaatcaaatggtctagttaaaaggatgccccatgcttctttttttttttttgccccttttcgttttcggtttatattggcaagtgtttgcaattgaaactgagaatccgaaaatataaaagaaagacagcaaactataaaatgtgataaaattgacactgtcaaaagttcttttctttgatgaagacattttcacaagacataagttgatgttgatgagtggattaacgacggcctcacatgaccccaattacccatcgtcaataacctatctaggccggggccgagggctgacacatcaacgattaatcatactgttacatcatcatttatctgaagaatttactgttcgctatctacactgaacccagttcagtctaaactacttaatttgttcgagacttcgaatcatatacagatcggtaatatcagtggaaagaagcttctattaacttattaaattaatagaagaaggagcatccacgtttgctttcatggtgtagaaatttttatattaatcggagaaaaaaaaatagagttcatatggaaataaaatttaaaaatagtacaaattcgaaattaaaaaataagaaatattgaagagcaaactagagtccatataagtaacttattaaagtgatagaaaatgagcctacacattcactctcatgatctagaaactcttatattaatcgaagaaaaaaaatagtgcccatatagaaattaaatttaaaaatagtataaattcggaattaaaaaataaggaatattagaaggggagactagagtcgtagaggtgtacaatttagagctaattaaaattcggaattttaaaaaataagaaaactaaaagtagatgttagagtccatataaaaatacaactttgaaataacaaaaattctaaattaaaaaagaaatattaaaaaagtgtctacagtccataattccatatatgaatataagttagaaataaataaaattaagaattaaaaaaaggaatattgaaagatgagtttagagtccatatagaaatacaaattataaataataaaaatttagaataaaaaagaatattgaaagaaaagtctagaatatgtataggaatttagaattaattgtaaataaaaaaattaaaagtaaagtttagagttcaatagagatacaagttagaaagaattaaaattctaaataaaaaaagaaaattgggagaagagtatacagtctacataagaaatttagaaataactgaaatttagaattaagaaaaaagaaatattagaagaagaacgtagagttcatacagtaatacaattttaaaaaataactaaaatttggaattaaaaatgaaatatcgaaagaagagggtagagtacatatagaaatcttatttataaataacataaattcggaataaagaaaaaattattagaacagagtttagagtccatattggaatgctccctccttcaaaaaatctaagacctatttcattctttggtttctccaaaaatctgagtcctatttgtagtctccatgtgctaaattaaattgatgatcggaaaccaagaaactattctactacatattggttgtatgttcattggttttgccacagggtgagtgagttaattgcttcttggttttgatgaaaaagaaataggtctcagatttttggaaggagggagtataatttagaaataaacaaaatttaggatttaaaaataaggaatatattatatctctactattataaaaattgaaatgtttttgccggtattttggtacgtcatccataaatgagtcggttttaaagttcgtttgcttttggaactacatatccgtatttgagtcggtttttaagataattcacttttagtaatacagaaggaatcatataagaaatatgtttaaaaaaactcacatgctaacttgagacgatcatccgtgtttgtgttggttacaaaatatgaaaatgtttccacggttcgtcatccgtgtttgagtcggttttaattttatgttttggttttaatctatatcttttctctactattataaaaattaaagatatttttaccggtattttggtatgtcatctgtctatgagtcggtttttaagttcatttgattttggaaatatatatccgtatttgagttggttcttaagatcgttcacttttgataatacagaaggaatcatataagaaatctgtttaaaaaaactcgcatgctaacttgagacgatcgggctcctaactgcgctcccacaatgaatttatcttaactaaaccatttaacaataataaaattaaaatatacttcacccgttgcaacgtacggatattttttctagtattattaaaaatgaatatttaaagaagggttcaaaaaaatataatttaaaaataattaaaattttaattaaataataattaataactatcacgtatatataatataatatgaatattacacattgtgattagtttggtcaagttagtatataatttaaaattatgatgctatttaatatattttaataataaaatgtgaacacatatatgctgtcatgtgagaaaaaaaatataatgatgtaagctgcccaatctacactggtcaccatactagttagcgaaaaacaaaaatttaccttcatctgctcgattccattccgaaaacagcccagacaccgttgaggtgctcgtcctggatcagggctatgtttagttcagcgcaaagtttgtattttggttgaaattggagatgatgtgattgaaaagttgtgtgtgtatgacaagttgatatgatggaaaaggactaaagtttggatcaaactttcgatctaaacacaagtcctgaacggaggcggagaagcacgactccagtggatcgcccgcgaggggcacgccgccgcgatctcccgctcctctccggcgcgatcgccggttcgccgttgcagatcgaggaggagagagaaacccaccgcgtttcgagtttcgactggggtcggagactcggagaaaagcgtggggagggtcggagggacgcacgtgacgaacattgcaggatgtagaggcccagtagagaagagcagcccaactgcccaagcgatattttaggcccattactgacggcccatactggatccaattcccgtcggcctcgttgtcgtgggccggtgtcgccgctggacttccctccgggaaagggacaacggagtccggttggaatcggatacggtttcccagtcagatcagataaaaggcagcaacaggctaatcccagggatgattagtcgatcgacagatccatccatggagagcggaggcgacgccggcgatcggcggtggccggagtcgcaggggaacgaagagaagtcacaggttcctagctccctcgatccaaacaacacggaggatgaacaccaggaggagaacaactcggaggacgaggaagaagagcaagaggaattcttgtacgaaatcgatgacgaccactatgtgccggaaacctacggcttcatgggctgcaagcacagcgacggatccatctacaggcccgactcccacccattccaccgccactaccgcctgggcgacacccgcgagactcgcctgtggcccaaaaggctgacgagtccgaccgatcgttgccgcccatgctggaacgcttgtgaggtacacgtcggctgccgcatgatgcaaatcttctccgtcaagatagcagctctgtccgccgccgccgatgacaacagcggcgctccggttcagatctacggcttcatggctgccagggacctatatgaaccactgcgtaactatgtcttcaaccgcagccgggatgatcccttcgttctgcccggccactactccgatcccgattcgctcataaaaatgtcgggccctaagcgaggcatctcgctgcaaaaccctgccttgatcgagtacgacctcaagatcaagaaaggggaggaggaaaaggatgacttgtagctcatcgacggggtgaccagcttcagcgaccttacaccattccacggggtgtatagccggcggatccatggcatccatggcaccgtagatatcagcttagcacttatccgcgatgggaaggaaggcactatacaagtcaggattctgaggctaataaatgacggcatacacctatccctctcttgcttagtccaccaaatacctgaggaaatcaagctcttcgatggcatcgttgctaagccatcatatctcggtgactttgtggttgccgcacccctacgcactgtgctaattctggatttcaagattacgccggtgggtgcggcggtggctgtcagcaaaaatgatgactccaagcatatccgtcgcttctgcaacttcaaggttaccgctcatttaggtactattgaacgaatccaccatgatttcgcaactatagatacggtgcttcagtgatcgaatttgatggagtaattcactagactagtggtgcttttgtcccctctgttcgtttcatcaattcggcatgtcatttaatcctcggaatattatctctaaaggactcatgacgaattttatcttcagcctgacaagtactatctccgtactatacaattggtcgactcacaaaatattattttagttaatccctgggattagcctgttgctgcctttttatttgatatgatgattgggaaaccgtatccgattccgtttcccggttttacaggactcgcttttattttcaattcctttgatgattggattaccacgtcagtatacttggaccaaaggcaacctgccacatcggcaaaaccgctttcaaaatcactggataagtcaatttgtatccgtttttgaagttgggagacgttatatctggttctgcggttgaagcctgagggatgtgattgaccgagggaagatataagggatgcacatagatttattcctatccacttcctgtctgtatcagggccgaatcaacagccgacacttcttggcgtcgtactttcggtccatatactagaaaataacacgcggcgttgccacgtgcaacactcgatgggccacgctatttgaccctattgagacataatgatcagtgcactgcaagttatagcaaaatactatattgcacatcatgattattgtagcagagtaaaaaacgtgaatattaagaaattgcctaataccaaataaatagaaggggtgaggctgcgaacccagatcagctagcccaccatcttgtggagctagccgaaaaacccctaggcgtttctcattgtagcagagtactaaatttaaaagattaatttatgaaactacagaacaaaacactgtggctatttatatacaaagattacttaacataagaactggaagtttgtaacactcatttgaagagtatgggttggtttggtttgagatctaaataggccttaccaaaatttgacaatgccaaattttggcaagttttgcatgactaattttggtaaggtaaagttgtgtttggattgaagccaaaatagcctaagttcactattgaaatggcctattttcttaggcatgccaaaatttggcttcaaaccaaatagacactaaacactattgaaattgtcaaatattggtaagcctaatttaggccttaaaccaaaccagccttatgtaacatattatagacatttgatctagagcttaaataatggaagattttaataaagctccatgtcaattttgcattagagtaattggcgagtaaatgagtccaagttcttgtcagtgctagatacaccaaaagtaaattggcttgtagatgagaagataacaagtgtccatcttggactctaaatagtaaaagtaggctatcttgattagagaagttatcaagtagaacgcttctttttatcctttatctgaatgaagccgtagtcagtgttttttccttcatcattttatatcactaatacatgtgattgcaggtcattgacctcgtcctcggcggtgcaggacgtgctcgccgcagaggtactggccacatcaggttccatatttactccaacgtaagaagattcgtgtcccttccggagacatcaggtggctttgcagtttttcattttactccaacgtaaaattgttttttatattttagtcctttttaagtgtgggagtgctgaaccacgccatgtcacgtgacaccgctaatcgttcgataatttgcatggatttcaatattagagatataggcctaccgtcgttgacgggccgaatttgccgggcggcgtggtgaagcaacggcggaaataaaaacattgagctcgcaaagctggctgacaggtgggaccccggctgtcctcgccgtcgcgcagcaaaagtcctcgcgaaacggcagccaattcgacctcaccctgtcagaaaaattattcagcgtgtatggctccatatcttcacggtctattggcgcttcaatggttcaacctcgtctcatagctatgaaaaatccttgaaatcatcatttctttacaggataaacaccatatatttatgaaagttcgaacttaatcaaaggcctaacaactaaaaaatacaagaaaaacaacaaccaaaaaaggatctagatcaacataagcaaccactgagacagcatgggttacgacaccgtgggcatcgacaaccctctgtacaattcttgcaagaccagacacacccacaggaacattcagggcacgacggtttcgggaggctgcagcagtgtccctcgcagcaggaaggctgcccctcgcagcaagacgactggcacttgcagcacgaaggctgccgcttgcagcatgacgactggcagctgaagcactgcgtcgtgcaggggcacttgcacaggctcgagcagcagccagcgcaggagcatttgaagatgttgaagcagctggagcaacgagggcacgagcaggagaagcagtccgcgcagcggcagcactgctcgccgcagcagccgttgcagcttggcttgcagctacagcaattggtagagcacgagccacaatcgggtttgcattgggcgcaagagcacgagccgcagccgttgcaaccgcagcttggaaggccacagccgttgcaaccgcagcttggacagccacaaccgttgcatccgcagcttggacagccacagccgttgcatccacagcttggacaggcacagcccttgcagctacagcttggaagggtgcaagtgcagcaattggggctagagcagttgcactgggacttgaagcatgaagggatcttgaagcagctgtacagggatttgaagcatgaaaagatgttgaagcaggtgcagctcggtttgcagcacgatgtatcgcagcatgagctgcagcttggacaggagcacgagcagttcggtttgcagcaagaaggggtcttgcagcaactgcagttaggtttacagcatgagcagcagtctggactacagcatgacccagcgcagcacgcactgcagtttggcttacagcatggctcgtcgcagcatgagctgcaagaacaattgaggcaccttggtcttttgcacttgggtgagcacttgcaacagtagcaaagacatgaaatgcagatacacaattttgatctgcagggaaaatattttcaccatgtaaaagctcagtttggcagtagtacagattattatgccaaagtttctacatgtaatttcagccgcaaaaaaatcaatgttaatgtaaaaaagcactagtttttccttttttagttttagataacaaagatgattacatccctggactagtttgctttttaaaatgcgtcaataatattaatgtggcatatagaaaactactgcttgtttattgacttttaacatacaaagggactagaggcactttcagactttcaattccaatagtgacgaatgcttttttttcgagggaaatagtgatgaatgttgaatccaacagaaaacattatagatatttgaatgttcttgcccctcagaacctgcgagcaaactatattggatcaaaacatacccgatccaccgaaaaagacggcaagatctgtgcctccttctctttctggaaaaggaaaaaacaatgtcaaaactcgtaaataaacagcgaacatgcttaaaatgggggaactgaaagtttagaggccatacgttggtattagtgggtcatgttttgtaccaacaaactcatttatcctgacaagtaatgtaagaggacattagcaacctgcaaaaggacataacttgtagtaatgaatacaaagtatagtccattgctcagacatttatatttgctttcactacagtcatgtgtccctcaatttgagcacacatgttcaaaacttcaaatgcgatatcggaatattacataattccaccacaaatatacaatgttaagctaacgtgataggttacttgttaaaaataatctgctttcattttttaaattgaataagaatatgtgcacatcgcatggaaagaatcggtgaaacaaatctcaggactgtgagctgtaatatggaactcaagcaaagaggacgtcatactactgttcaatatatttagttcaatataatttttttcaaattgttggaccagtgggccacaaaataataactgaggcagagttataggcaccactaggaacgttatgatgcaggtggggctgtttgataagtagctgtcaagacagcagttttaagaatttctgtaatggtacaagtacatatgcatttcaaacaagacttcaatgctggtttcctttttctttttcatcccaaggtaattttaacatatggtgatttgctaaggccctgtttagatccatttgaaatagcaaatggcaaatggcaaaagttttggtggcaaaagttttagtattgtaaaagtactagttggtgtttagatgcatcctaaacttttaccattctagcactaaagtgagagagagaaagaaagagagagtggttccaaagcactttttggcacaatttgctactatagactagcaaatgccaaatgccaaattgccaagttttgttactagtgtttagatccaaaatggcaaaaggttcttcaaaatggcaaactgccattttggaggatctaaacagggcctaagtgtgacatacaagtgcaacaagattttatacacataagtacataacacacttatacaagatttttccctgggggagaaaatgcaaccaaattttataaaacagagcataagacattagataaggacagcaataaaattaagctgacatttcatacttgacataagctcttcaaatttctaaaaacttaaaaacaaaatatctgtaatgcatgaagggcagtagtacatactctttaatgcatccagaacgagaaacgggctgagctccttcaaggaagtgaagctcatcctacaaaaggagctttgtgttagaccaatattgttctctcatgtgctagatgcaaacccatgaatttcctccttgagctagaaacaaacccacaaaagtttttctacctgttgaagtaaaatagactatgcacttaacatgagagaaatgacaaaagaaaattttgataattcagtactgcaggctgagtgaccatgcaccacaatggaaaataaaaactaaacttttgaatggagctggattctttcatgttaaaagacacagttgcagaaataaaaagtaaataaaggttgttacttgtaccaaatctgcggttaaaacttaaaacccattaatcaaagcctggagtaattgaccagtacgaacggtcccataaagattcctgctttactgtgtaagtgtaactttgatgttgcacaaaagcgagatcgggtaccaaagcagggactgaccttgcaagaaacgataaaaagatgtctaaagcgcatttgattactactacaaagaagttctctgatatctgaagagcttctgaaatctctgctccttaaaagcacagcacagtgtcaagaacaacacattcttccctccctcgttaaacacaaaatctagcaacatcaaaagcctcaaaccatggtggcagcccataacaccaacacggcaccacccatcgtgcaaagccctcatggccatgccgtctgcacgtccagtgtcgacgaagcaatggcggagatagacacgtccactgctatggctctccctgacaaggccactcaggtcagttgtccatgcccacgctcttcttttctccaacgaggagcccaaccaaacaacgacaaaggtagtacagccatggcgccacgcccaaagagggccaagcttgtctcgccagcctcggattgatggcgccgtgattcacctccgcctagaaacagtactacaagtactagaatagcactagctaccgcaattaacaacgccattactgtacacttcacagcatcctacttgcagtagcgggtagctccgtactcggccgcttgggttttgaaaaatgcgcggcgaatcggatctccttttttttaaaattaatcggtaaagtcaaaggaagacgaagcaagtagagctcgggccccgagaatttcgagcgagcgagtgtgaaagagaaacctatagagaaaaacgcagccgccgccgccgcggggcgctcaccttgaggaacgtgatctcgcggctcaggatctgcacctccagctgcatccgccgccggccgcacaggtccgggtacctcggcggcgacttgggcctcggcgcctccatcaccaccgcctcctcccccatctccacacgcagcacgccaacggccaactcagaaccacccctcgccgccttcactcatgggcattatagcagcagcagggggcgtggtgggtataaatcgccgcggcgagcggggggacaggggacagcgcgggcgcagccgtgcagcagcggggtgggggagcgagcgagcgagctggcgtacgaggcggatcgagctagcggcacggcacggcgcgcgcgcccgtgcgaggtgatgcgatgcgatgcgatgaggaggacccccatatagcagcgagcgtgagcgagaggaaggatggtggcctgcgtctgcgcgggcaataatagcagcggagatggagaggaggaggcggcgacgcggcgtgcgtggggtttggagagagaaagagagagagggaagagagagttcaacagcgagcggggggtggggttttgtgtctgtgggctttgttccactgcgacgtgggcccgagcctacgttggatacgctgtcgccgggccgtctcgagggatggatcatggctgcgtgggcccggtacttctccggtatggggccatgattccccagaccatgcaaagccgatccttcgtcccgtggtacagggatgaaatcacgcgttattttttgcacagttcaaattgcaaatcaaataggggaaataccatggactcttccagccccctttgccaatttgtttggattggcaaaaactacacacaaacacaaacagcacccccacccacgttccttgagctaaactccgggaagactgatgtgtgcaaagacagggcagtggtggtaccacagtaccactcctttcatcgcaagtttgtaccaactccgcattgactgccgcgtcctgagacggcacgtacagttgccgagcgagcgtgacggtgcctgcacgagatatatggcgatatggctatggccgcatcccgagcgcggagtacgtacgaaatgaaacagcaagggaataaattgagcagccggcagcgatggccggctttgacagggacgcgaccgaggtatgcgacgacgacgtacggctcgacgccctcccctcccccccgcgcagcggcaaccgcgagcggacaagcttccccggtgacacgtctacatcggtctcgcgtgccgggccggccccgcgcgtcagtcgtgataccgcggccgcgaccgcgatggatcgaaatgcccagtgccagcgagacgtgcagcgcggggtttggattgggggagcagggttgcggtgggccagagacggtcagcgacgcccccgtaccgtggcacgtgatggggtcgccccacgcgcgcagttacggtggagtggagtggaacgtcccgttgaaatgggtgtactagagtagccacgccgtccgatttgaaacgagttattaatgtgggcactcctctatcccttccactgccgcgctttctactactaccaccactgctgctactgcctactccgggtagagctgatagcgcgccgctgctaccccgggtagtatgcgtagtaactgtagtcacgaactggccatgcaggcagccagcgttcagttgagctcagcacgggcaggcggccaacttcccttctgcaaacagcatgcactgatgcacacatgaagatcgtataaaattgcactgcgacgacgtgccggtgtataggactagtgaatttgatgctactcctaccttaaactgggctctcagagtctcattcactgcatatgcgattcattttagctgtgtgacgggaggaacggcaggagagagtcgaggacggggggcgccaacgttcgactgtaccgtgggcctgcgacaggccggaacgtcacctgagcgctcatcggggaatctgggcccaactggagctttcccgggcccatgcgaggatggagccgtctgttcgctgggccctcgccgacgtggactggtcacaggagcgtgcaaatgggcccgtctcgcgcgcgacgacgacgccaccgaccgggaacggctcactgagagacgtgcgccggtcagggccggcagctggagctgcacgtcgcgcgcggttagcgtggcggattcacgtggactcgtgggcctcgccggtcgacgacgcccagtcacccgctaatcaccagcgcaggttttgtactagtgtacagtctcttctcttttttttttcttttcgaacggctaatttgctgtcatgcgttaggtctcctctcacaatcaccatttgatagagacggactgatcgataaatgaattgcaggactagttcagcacgctcctcatcgctcaaacagtcaaactccccgcggatttgctcgatctgttgtttcctttccatcgatggaaagctcgccgccgtgcgtctagggatctcacaccccgagagatgatggtagtagcaacatacgaggttcagccggccgggcaggcgatgggaccgggaacacacgttgtcaccagtatatgtcgctgcttttgttacccactttagtaccaagcttttccctctgcctgcgcagcggcagcgcgccggaggccggaccggcctactccagctagcaacggtgggggggcactgggtttggggctagctgtgttgtgtgtgggcgcgcgcacggtgcgacgttcacggtcggcagcggtgccgcgcttgccgtgggccgccgccgcgtgctggctagctgggctcgcagcggagcctgcctgatctagtggcagacgatgacggcagatgaaacgaagcgagaacaagtccactttgattccttctaatatgagtccacggataggatagtcccttaaaagcaatctaaactatagatctagtagtatttaaggatctctcaactgcaataacacatcaactattaaaatcattataatttaatttcctcggttgttttaaatgtggttttcgcttatgtggctagataaattggtctagccagctgagccagcttatggagcccacatgttagcagatctatatcaataggctgggtataatagctcagcaaggtcatcgaacttgttagggatgaatcggctctgcgcccttgtcagctagagactcttatcttgattatgtttctcaatacgtaggatgaatttgaacttgttttttatagtattagatgtcaacatactttatattgctaatttcccataactatttatattgaatttagaaaaaaaaaagtacacgaaggatattcccttatcatattagaacccattccccatcttattggagtggtggagttttcacagggaccatactatattggtttccatgaagaggtcaattataaagtcactaacaatgttctcagctcaattaattaaaccttcacccacactctttgactcttctaggcttactctaagaaaaagagaaagagaaagaaaagaatcagaaaagctttgccacacctcacaccttgtgtccttgtgcctcctacaaatagctcttgccattcagtttcctctcagcagcccaacagtcgtcttaaaccatccagctagaagacaacatcctcttaattccggccttaatggaggtagcactctgtgcatcctttgttgccattctgctaaccaccatgctcttcctaaaagccatctcgacgaggtgccgccgtcgaaagtataacctcccgccgggtcccaagccatggccgatcatcggcaacctaaacctcgtcggtgcgctcccacaccgttccatccacgagctctcaaggcgctacggcccactcgtatacctccggttcgggtccttccccgtcgtcgtcggctcgtccgtcgagatggccaggttcttcctcaagacgcgcgacgcggcgttcatcgaccgccccaggacggccgccggcaagcacaccgcctacaactaccgcgacatcacgtggtcaccctgcgacgcgtactggcgccaggcgcgcagggttgtcctcaccgagctcttcagcgccaggcggatcgagtcgtacgagcacatccgccgcgaggaggttcacgcgctgctccgtgatctgcactacgcgtcgtcgtctggcggccgacgagctatcgtgattaaggactacctgtccacggcgagcctgaacatgatcactcgcatggtgatgggcaagaggtacgtgcagggcgaggtggtccatgaggagccgggatcggcgcggacgacgctggcgcagttcaaggagttgctcgaagagctcttctttctcaacggcgtcttcaatgtcggcgaccagatcccgtggctcgagtggttggacctacagggctacgtcaagaggatgaagaaggtgagcaaggcgttagaccagcttctcgaacacgtcgtggacgagcacagtgagcggaggcaacgtgaggggaacgggtttgtggcaggagacatggtggacgtgctccttcgactcgccgatgattctagcctcgaggtcaaacttagtcgggacagcatcaaggcatttactcaggttagcgactgcatagcgtacatcgtagtactccctcgtccaaaagtctaggctgtttggatggtattttcagtacatgtcacatcgatcggatgcttaatactaattagatgtttaacgtattaaacgtagactattgacaaaattcattctataaccctgactaatttgtaaaataaatctattgaacctaattaatccatgataaacctatgtgatgctacagtaaacatgtgctgattggcttaaaaaatttgtcatgaaaattagctctcatttacgtaattaattttgtaagtagtttatgtttaatactccaaattagtgtctaaacatccaatgtgacagggactaaaatttagtcccggggtcaccactagtcctagcatggtttagtttccaactttttcttcaaacttctaacttttctatcacataaaaacttttccacaccacaaacttcttaacttttccatcacatctttccaatttcattcaagcttccaattttggcttgaactaaacacaccccaagactaagaatcaattaaatcactcacgttgtgacaaaaccaatgaacatgtaactaataagtactaaaatggtttcttggttctcatcaataatttaatttagcacataatgactaaaaaatagaacttagacttttagaaaaaccaaagaatgaaataagttttagacttttggaatgaggaaggacatatcaatcaaggggaatagacaattttgtcccaaatttcgtccacaggtcaatttggtggttgatttttcattttgtctaaaggagtcctccagatttgcgcaggaattaaggacaagctaatgcctaaccttatggtaaaatcccagtgaagtatattagtccctccatacttcctcaaatactccgtttcaatttacctatcacgttcaagatttgttttaagtcaaacattttgatctttaacttcaatttctacaaactcatgtagttttacatcataaaatttatacttttggattcatcatgagaatactttaatataatatataattcacatgttgttaaattatacggatttctaaatattaatggttaaagatagacatgtttgagttaattagactaaatctaaaatgataagtaatataaaatagagggaataatgaaaaggaaaagtcactccagcggtctcatctattcgttcccatcaggcttgctcaatgcaagaaggtgaacaacagtagccagtagttacatcatgttagggggggtacagcacacccaggaattatctgagatgttaattaaagtataagaacaaataagggcaaagttgaaaactcttttgttctctaatgaaatcatattagattacttccaaattactaccttcgtcccatattataaggtaataaggcatgtattttttacacggtctttaataacatactttgactattaatttactacatgttatgttctcaactatgaaattagcatcacataaaagtacttaaaaatatgaatctagtaatataacatgcataatataattagtacaattattaataaaaaaaattaccgagtttgattttctaaaaaaaacatatgtaatttggaacggaggaagtaagaattttccatgaggctaaatgttggttctagctttgctcacacatataacaaacttaaaaaggtgggaccacaggacctttctaaacctgcagatatagaattgtaggaatcattttatgaaatcccaaaagcaaaatgattacacggtaaaccttttgataggcaaaattaatcagttattctcctccaccaaaaaaaagttaattattctcccccaagaataagtcaagcaaataactggcttggaacgttggaagttcaaaagttcatactaatatgctgtgcaaatttagtatatgagttgtgaagtgtaaatgactgaaacatactacctccattttttaatagatgacgccgttgattttttctcacatgtttgaccattcgtcttattcaaaaattttatgcaaatgtataagatataaatcacacttaaagtactatgaatgataaaacaactcataacaaaataaattataattacgtaaattttttgaataagacgaatggtcaaacatgtagaaaaaagtcaacggtgtcatctattaaaaaacggagggagtatatatgaaactagaatttcttacatgcatgacgccaaaaattattggcttatatataggagtaaatatcactataggtcgccgtgcataatattttttacttcagtgcaccctttttttcatagttgacaaatactaatccatttttttgtcaaaaaatattaatccaatttgtcttcacaaccaatcaatcacatacgtggacaactgcagaaaatgcacattttttttcaaggagaacacattacaagaatataatcaaattaagatgttacctcctccgtcccaaaaaaaaaaatcaaaccctaggtctgaatctggatatacatatgtccagattcatatccagggtttgatttttttgggacagactagtaagtcgtttctgagttaactagtccaaaacggcatgtgtaggacctcattgctggcggcacggagagttcatcggagacaatcgagtgggccatctcggagctcctcaggaagcccgagatgtttgcaaaggccacagaggaattggatcgcattgtcggccatagacgttgggtcaacgagaaggacattcttgatctcccctatattgaggctattgtaaaagagaccatgcgccttcaccctatcggacctttgcttgcgccacgcctttcccgtgaggatacgtctgtgggtgggtatgacatacctacgggcacgcgtgtattcgttaatgtgtgggccattgcccgtgaccctacgctatgggacgcatcggaggagttcatgccagagagattcttgggtaagaaaattgatgtgaaagggcaagactttgagctattaccatttgggtctggtcgacggatgtgcccaggctacaaccttgggcttaaggtgatccaattgagcatagccaatctccttcatggcttcacgtggaggctcccgaaggacatggtaaaagaggatttgagcatggaggagatattcgggttatccatgccacgcaagttcccactagaggttgctgttgagcccaagctctctagtcacctctacaaaggtgattgatatatgtctctatgtcattactcatgtagctggtacataaaaagtatatgtatttctgaacaagaattctaagccctcaagagatgttctattatgtgtatgatacaaacagtcatgaaagattctaaaatatttgattatacagagtacaatgatatctacaactccagaaaatttctagtctaaactcaatatatatgaagcgggaaaaatgaaggcaatcttagttgtatgtatcattcctgccatgccaatataggtgtggcccttttttctatagaaacacggttctaacataggcgctcacaatgtgagtgtactcacccttatgaacacatagtctctacccctatgagcacctccaaaagtctaagtcagcacatcttgcgattgataaagtcaccgaagacgtctcgtttgtcaatgggtatgtcgtctaccactgaaagaataattaactgtaaatgcgagtacccatgtcaagtccaggacttgaacgtagacaatatagagaagggtgatgtgcatggcttcccttctttcctccatgtctttatgccagaatgatgaaccttccaagtttgaatgtttacagactgaacctacaatacaaccttgttgcatatgcaattaatgcaactatcatactcatgcgaatggcctatcatttggtccacaaggtatatcttttaggttttcttccacatttagagaggtatatacctctcctatttcaaaggtaaaaaaacaaatcagttgaagtaaacagaagacaagtttatgattagcaatgacatgacttctcttgttgttaggaggtacatcaaggtatatatataccacaaagtgtaagtctggaggtatataccttaaaaaaagatggaaagtcaaaaatatacttacaccatactctattagttttggtacttcctttcacaaagaggtctatattaaaaatgaagagatataagtatgggagaaacccttttatttttgtttttaggttgttgtaccatgattttttttcttgtttatcatgttaggagtatttggccttttgatggattctatgatagtgcaaactgtgtaatgattatgtacatcatagttagggcagagattctcccatcctatatttatagttgtcatgcttaacaatattacattagcatactttcggctagtatatatgaaaattaaactggaaatcaagatactaccactactggagaccccatctttcgtgggttggtaaaaaaccacaatagtcccgatttaactaaaaaccgcgactaaaaatcatttttagtcccga

SEQ ID NO: 25836 - DNA, 5091 bp, Oryza sativa
tgcactacgcgtcgtcgtctggcggccgactagctaggttaattacagactacctgtggccgagatgctcccatcctatatttctagttgtcatgcttaacaatatttcactagcatactttcgggctagtatatatgaaaattaaactggaaatcaagatactaccactactggagaaaccatctttcgtgggttggtaaaaaaccacaatagtcccgattcaactaaaaaccgggactaaaaatcatttttagtcccgatttaaaagtgcaacgagtctatatgatatttagtcccggttggtgtatctgcctcccatgtcctaactcggccacgatcttatctctctcgagaccaagcgtcttcatcttctctctcgcctctctctctctctctctctgtcctctcctctctcgcaatggggtcggcagtagtgcggggtgggcagcgggagaagaagtggcgggagatgcgacggcagccgggcccgtgccggtggcaggacaagaagccacggtagggtggggttggcggcgcctctctccgtcctctcctctctcgcagtggggttggtggcggccaggcccatgccggtggcgggagaagaagttgcggccgggctgtgtcgacggcgggagaagcagtggcggccgagctggggaggcggcggcctcgccctcccttccgccagatccggcaggaggggaggcggcggcggtggagcgactgcaaccagaccggaagaagattttttttttaggatttgcgatgaatttgtttttgagaattagtgatgtttgatctgtgatgtgaatatgtgatgtatttgtaatgttttttttaaaatttgtgatgtgatttttttgagaatttgtgatgtatttgatctgtgatttggagattatttggggatttcacgatttggggatgtagtgaaatcaatattcaagcagttaaaagcaatgaaaaaaagaaaaagaaactctataccaggactaaattaggagcactagccacctgtctctaccatcttcaccaactagaacttaaaaatagatctttagtcccggttattttaatcgggactaaagatagtcttggattcgtagtaccagtttgcaacttaggactaaaggggttgcaaaccgagaatacagaccacttgttcactggtgtttttttttgcttaatatagagtgaagaagtttgggaatctgtggattgaacgccggccttctcaggtccaggcggttacgtgttgattgatagcacacgaatcggtgcgagattacatgtatatatagcacaccataccagccgtgattatctaacaaattaacaattaactgcatcctaaatcacagccggcatagtatcctatattgttacaatacggactcaacatttcaggtagttcaacactccccctcaatctaaaccataaaggttaagattgtatctaaatacagctagctgtttctcattcaagggttttgtaaatccatctgcaacttgatcttgtgaaggaacatactctatttccaacaatttcctagatactctttcacgaacaaaatgatagtctacttctatatgcttagtacgagcatgaaacacaggattagcagagagatactttgctccaatgttatcacaccatacctttgctgtttttggtacttctatcttgatctctttcaacagagtttgcacccacatgatctcagctgtgacattagccaaagccttatattctgcttctgtacttgatcttgacactgtaggttgtttacgtgcactccaagacacaagattaggccccaaataaacagcaaagccaccagtggatctcctatcatctaagcaacctgcccaatcagcatcagagaaaccactgacaagtaaagaagaagactttcttatcttaagaccaagcccagatgtttgttgcaaatatctcagaatcctcttgactgcagcccaatgaactgtagttggagagtgtaagtactgacagactttattaactgagaaagaaatatctggcctagttagagtcaaatattgcaatgctccaactatgctcctataattggtagcatcattaggtccaagaacatctccctgatgtattgagagtttctcagttggtgacagaggcgtactcacaggtttgcacttatccatattgattcgcttcaatagatcttttacatatttttcttgagataacagaataccatcacataccctttgttgcttctattcctaggaaataatgaagctctcctaagtcctttaaggcaaaagacttattcaggtcctgcaaaagagctgtggtggcatctggcatagagctagcaacaattatatcatcaacatatataagaacaaatataatgacatcacccttgctgtagaagaacagagatgtatcagccttggaaggcatgaatcctagctcttgcagttttgtgcttagccttgagtaccatgcccttggtgcctgcttaagaccatataaagccttgtctaacttacatacatgattaatcaaggatttatcttcatatcttgggggttgtttcatataaacctcctcttccaatatcccatggagaaaagcattactgacatctagctgtcgaaggctccaacctctagagatagcaatagacaaaataattctgattgtaattgcttttaccacaggactaaaggtatcttcataatctattccatacctctgtttaaatccctttgcaaccaatctagctttatatctgtctaagctaccatcagcctttcttttaatcttatagacccacttgcaatctataatattattagctttttctgcaggaactaaatgccaggttttattacccattagtgcctcatattcagcatccatagcatttttccaatttttatcatttaatgcctcatgtaaattttctggttcaccagaagctgtaaagcaagcatatttaactgtaccatctgtgtataccttttctttgcggattccactctgtaagcgggttctaggccgaactatttctggttgatgctgctcagccacaggagagctcgcggcttcttcatgcgatgcagaggattcagagacatcatcattacctgccatcgtcgtggcagacggagactgatcactcggctcgttctcaacacgcgtgcctgaagttgctgcatgcgtgtcactaccagacctgcgcacacacaagggtgtcacagatcccggcgactgcggcgatgatggttgctgctgtgacagctgctgcgtatttgcttcatccacccagtcctctgcacctatatttcctgtatcttctgcatgctcaacagattgatcaggcatttcattaggagaattaaacatctgatcattctcaagttctcccccttgatgagacgtgtgaataatgagatcagagggcaaaagagagatctcatgacgaatacgtgcgccagcattgtcatgcaatttagaaaaaggaaatacactctcatcaaaaatgacatctctggatatatagattctaccagaagcaatgtccagacatttgtatcctttatggcggtggctatgaccaagaaatacacattgctttgaacgaaattggagcttatgtgcattataaggacgaagattaggccaacaagcacaaccaaacactctaaaggatgaatagtctggtgtttgtttgaagagacgttccaggggagactcaaactcaatgactctactaggaacccgatttataatatgagtggcagcaagaaacgcttcatcccaatatttgagcggcatactagcatatgctagaagagataggccaacttctacgatgtgcctatgttttctttcggcagagccattttgttgatgagtatgtgggcaggagacatagtgagatatacctattttctcaaaaaaggaattgagtttctggtactctcccccccagtcagtttgcatggaaataattttacgatcgaacaaacgttcaaccaaattctgaaaatcatgaaatttctgaaaaacttcagatttgttctttaaaagataaatccaagtgaacttgctataatcatcaataaaactgacataatatttcttatttccaacagaaactggagcaggaccccaaacatcagaaaacacaagttccaaaggatgactcgatatactcaaagatttagaataaggtaactgatggctcttggcctttagacatgcatcacaaaccggctctttattggactcatctagacaaggtaatttattcttgctaatgactctggagataatgggtgctgaggaatgacccaagcgactatgccatctctcaaaggatggcgtgacagcacaaactacttttgcagatgatggaggagatgcagatggaactggatagagtcctttttggcgtctccccttaagaaccgttctcctcgtggcctgatccttgatcaaaaaatgttttgagtgaatttcaagaaacacagagttatctgcagcaagcttatatgcggaaataagatttttattggcttgagggacatggagaacattattcagatgcaatgggcgagtaggggtatgaactattgaatgaccaatatgtttaatctccatacctgaaccactcgccgtgtggatttgatcatgtcctttgtagacgtctcgagcggtgagtttctccagttcccaggtgatgtggtcggtggcgccggtgtcaacataccagttggagtcccgtgcatgggtgtggatggcagcagcaactagcttgtcgtcggggacgaaatcttcatcaaatcgatgccaacagtccgctgcaacatgtccgcgtttatagcagacctggcacaatggacgattgtcatagctgcgctgctgctggttgttgccgcgtccacgacctggtgcggcgctgcgcccacgagttgcgccgcgtcctcgcccagggtttgcgccaccaccccgtgagccaccaccaccacgtccacctctgttcgccatgttcgccgtggcctgcgcctgcctcattgctaacctgttttca

SEQ ID NO: 25837 - DNA, 25462 bp, Oryza sativa
atcgatagctgtttcagccgttgaccaaggctagctctctaagcctgaggaaacctcaaccttccactactttcaccaactcattctcctccatctccctcatcttacccctaaaacttaaattgttcaaccactatcgtagtcattagactggtgttggagctccaccaacactataattggaaaattcgcctccccatcatattctttgagctcttacagtctggtctggaggtccaagagtagaagtcgactctttggccattggattgagacccactggccagggagaaggtgacttaaatttcccataatttatgttacctttaactagcaaataccttttttttaatacaagttagaaccaatgtgccgttaattgattttttaaagggtccattaatttaatttgactcgggcaatctacatgtacatgtccctttcaaatcggtttgtgctgcatcattttgcaaagagatgttagttagagctggtacaatagcaggctataagacacctataatcacgtattaagaagaaaagagaagagagagaagaaagcagatactgatcagctgcaaaacacggattccaagacgttatgtgtgataaatggtgtagtatatttttatatttaactgttgtataaatagactattagattagctataaatgatttggagttggctatacttaaacttgctcttagagtcgatcaggcgaaggcacgtacacggccatgtgcaggtcaggcagacttggtgcaagacagatatatatgtgtcccacgcactcatcacttctccagataggtttgtgctgctgcacgacaatcaagacgcatcatattgtagggctaaaattaagcaattaagctgatctgtcgacaataattagtggagctagtggttgcaaatactcctatatgcatatgggaaatttgagaaaatacatggagttattaggattttacactaaaaacctttggtaactcgagatacctaaatacctggagaatttctcccgatatatatttaaaaaacattaaagttaccctatgcatatatacttccagcttgcttgatttgcttcggataaaaggcatgcacatgttctgtgatcgatcgtgcctttgttaatccgttgctttcgtccttccagtgtcattattctgcctaattaaattaccagattcagagtagagtataatatgttgaatcgacgctatcatcggttgagaagttatcaaccccagatgagacaccatataattataagttattcatcgcgagagagaagctctttccgttctcgaacccactattgactacggcagtattactttgaccaatttttttacataatttcgttacgatgaataaaagttgcatagttatatttataagggtatatatttcaataatatatagcatatttcaagtatatataaatttttttttgctgaaaagacaagtattcaaaggttaaattcgaatagcagcggctcggttactcgataacagagggattgagtacatactatactatacatgtccatagggttgtgaatgagttgagctcgagctagctaggctacgtagctcgtcacacgaatgtatactaatttatacctaatatactagctagctcataaataaaagataaaaactacacatatgactaggcttgtgataaagctcgagctcggcacattaaaagtttgagacaagctcgaatcaaatctgagccgagctgaagctagctggagacgctcacaagcctcgagtttttttagcctcacatgtgcaggcgcgtattacactgtagtactttttataaaatcaacatagaggtagtacacatctcttttaaatagagattaaaaatattactcccttcatctacttttaatagtcatatttcatcttggcacatagaccaagaataaataattctacttatcatccatttaaatatgatactagtcattccttgtaaacaagcgattcattaatatttacatttctcaatgcccatgtagccaatcatgtgtgaaagaatggagagtcatgcattaaatccgagaaagtcattaagatgataggttgttgaattaaaatatgcctatcaaaaataaaattttcagatttggaaatatgactatcaaaagtagatggagggagtattagtgaaaaattcatgtggacataattaattggtttgtctgatcgaccaacatgtttttaatatatattttttgatcatgtagatttatttgagctcacatagtactccctttgtcttaaaacaacatccgtctcattcattcaaagtcccttatattttaaaacgggggattagtacattgagattgacaggccactgctttactgtacaccagattatttttgctacaaagtaaaggaaattaagccaaacaatttcaacgtgctaattaattagattgatatgtttcattttcatgagggacaacaggctatgtatgcatggctacacatgattccaccagaatttttattgaaatatacaaaataaagataccatattattgatgcacaccctgctagctatctttgacttttagctatcaacttgtgcacagtaatgacctcttagctaggtaactatatatatatctaaaagtagtcagctattgcagtcctatcctgtgaatcttcatctgttcgtccgtttcttcccgtgtatagcaagggaaaatcattcagcccccttcaaattgaatttcaagtaaactgtcaatgatgacatcattgagtacattattttttaaaaaaatacagatcatataaccccaccaatagttaaattagctatatgcaaccaccgttaacgttggtcatgattaacattttgtgtcttggactgccaattttaattatattaacctgacctagaccacaggtaacatgagtaggtactatgtagtatgtatacctgacctgtttgattatttgtgggagagatatatgactccattaataatgcaatatatgaatgaattattccagaacagccacgtatatatatgcttttgcctaagctagaggtagtataactaattgattatgattggagaagagtcaacttcacataacacatctctacgtcccgatcgcctaatgaagatattttttgagcttatccaagtgaccgacaactttctggctactgatcttgcatcatataaacctttgcaaaaaggcataaaaacattcaaggagaaaaatacaccacatcctaattacttcacatgcagacttgtctcgtagcatcggttgaaactcgaagattaatagtgcatgagaaataaaactacactggttaaacctcctcaattttacatatggtaaaaaataatgaactaattagctatttctctaaaacagtaatttatcctttgatgtaccatattttttttatatagaacttatatataccttcagatgctagctatctcagaataccaaaattttggtgcccacaagtactttctcaaggatcataaaatttctctaaaatttttatatgcatgcatgatgtaattaatttgtagacgttttgaccttttagttctgtttttgtgccacaaaagatctgtctaaataattaattaagcaaaagagaaagatgatcacatcatcacacatactctgactatatatactattgatgcaaaaataaagatatattctgtaggcctataccctccattattaataacaactggacccctgctgggtccaattgtaagatatactctcaccaagcataagcatattccatggaatagaacaatccaatgggattatttcaagtcactcgtagtcgacatatatcgcattctcagtactcgtcaatcgaattaaagctctattatcatataatctacttattttatcatttctttagcagatccggaccctttttcccacaccaatggacggctattacttcaactctaggcaacgaaaattttgtcaaaagatatagccgtatacattgaaatagctgccgcgatcatttcctatttttttttctttttcattttttgggggtggacggcactaattaagatcaactataactaaaattacatagtatataactcatttttgtttctttgacaggaactctcttcagaacgtattttgcagaaaatggatcaacctaattttacacaagtcaactactgcagactatctctgacaacagaaattcttatactgttgtactttaaatactaatataagacatggttaaacttgatacggtcttctaaactaatttttgtcttataatttctcatatattataaggtttgtagtaacaaaattataaccatatgaaagtaaattcaaatgtcaatccaatgatataatttttatcaagtaaaattcaattcatattgtagtagttgttggtcaaatgttttaaaggtggaatcttgaaatacgtggttggcttatattatgggatggagagagtaactttttagtcgtagaagagatgtctgtgatttaccagccatttcttggtttcaaaataaaagaagaaaccgcgtgtggctccaatttataaccaccgaacatacagtgtatgtgattatcccgtgatataaatcattcatgatgtgtccttttactagctagatctaccatactttgttgcatttagctctcgacatatcacttttgatatctctacctggcgatcaacataagccatacacatggtgacatggatatacatctcagcacgcatccatggcacatgcgtactgaattattgcccggccctagcactcaataacacacgttgtactacgagacgagcatatgtctatctggcacgatgctgagagagatggcatatgatggcaaacgatcgattaattggaatacggacgattatttagaaattggaattacatgcatggatgattgtacaattcaacactcacaagaaagaaatatgatgtatgtaggttatatatcttgattgattgttcaacttatatgtaggacatacttgcaatatccttcttgcccgattacacttgtaaaaccataaaattcattgttagtggatatatattaggaataatccgcagtccaaaacatatgagtgtagcaaaatgctacttgaaacttagtgccataatttagagtcgaacgtagctcaactagtcatgttttctttgatggaacaacctatccgagttcaagtcctatacttagatataggtgcacatatttacgactaattattctttcagtggtagacgatgaacttgtcgataacgagacgttcacagggactttgtcaatatcaagatatgtccatttagtcttcttgatgtgcccacaagggataggataagcgcgtgtgtttgtaagaaacactagttcatttgataagcttgtattttgcactcttgcatcctgatagtcccaaacataagaatagggtgttacgcaaatgaacgggccaaatctctgctcatcacaaggtgattcatgtgttccgatccagggtgcgggacatgcgcatgttggagaagatggatatgtttacaataacaaaaaaaaactatctaaccccatgcaggttatcttcatatattccagttagttccattcttagtccttactgatactatatgttgtgaagctacaccgttggaatcagcagggatcttttgttctactttggatggtatagctcctatataatatagttagtatagattatatgtgttttctagttgatatttcagttgggtgttatcaggagggagatgcggtttattccataaacttagggcccctttgtgaagcaaaggtttaagaaaatagaggaatatgaaaaacatgattctgatatgaattctactacaaaacagatgattgtaaaatataggaaaaatatataaatgattgtttgattgaatcacggaaaaaatgtaggaattagatgagagggatagactcataggaaactttccatgaggttagacctcatgttaaaaatccttcaaaacttatatggattaagacatttcttattagaaagttttcaatccatggtttcaaagggctgtatagaaaaaaaaacctacaaaataaaaatgctacaaaattccaataatacttttccttcaaatcaaaggaggtcataagtttcttatttattgtatgcctatggcagagatcgtagagataaacaattttcattattggaaagaaaatgcttaattagttgagctgctaccttcgacttcgcgcggctttatccggtgcggattcgatcctcgttcacgcaaacaaatatcccgtcccggttcatccgcacacgctctatcagcgacttgcactacactactcatctgccgacacaagacaaaaaaacccatgtggggcccacatcaacccaagtagtgtagtggtcggtgggcctgcacaccgtccattgtccgctcgcggcgtacgtgtacgtggatcggtggtactacgtctccatcgatacattttttatttttgcccaatgcccatctctctctctcaggacgaattaatcaataataataatgcagatggccatttcctttcatgattatatatattgttctctccgttctaaaatataagcatttttagtatagtaccaaatcaatcatttttaacattaattattaatagaaaaaaataaaaaaagatcaaccatgtaaaattaatattattagattttatcattaattaaactattataatatgtaactctttttatttaaaacattttatttttatagatatggttagttaaagtagcatcttaaagactacgtgaaaatctaaaaatgattatattttggaacgaagagattattaattaatccaagttaacaccggattagttactactccagtaagctagctttacgcctacggttactttagctctttaacggtggcctccgcctataaaagcaggccagtaggacgccaataagcaagcaagcaaagccacatcttattgtcacttccatctcattctcctaattgtcatcactagcttctagctagcttaattaattaattagccatggcggaggagaagcaccaccaccacctgttccaccacaagaaggacgacgagccggccaccggagtagactcctacggcgagggcgtctacacgtcggagacggtgaccaccgaggtggtcgccggcggccaggacgagtacgagaggtacaagaaggaggagaagcagcacaagcacaagcagcacctcggcgaggccggcgccctcgccgccggcgccttcgccctggtaattaactaattaattaaccactaattaattgatctaacgccgccttaattaatcaattaatttgctaagaaatcatcaagaagtaattaattaagctgattaatcgtggtgtgtagtatgagaagcacgaggcgaagaaggacccggagaacgcgcacaggcacaagatcacggaggagatcgcggccacggcggcggtcggcgccggcggctacgccttccacgagcaccacgagaagaagaaggaccacaagagcgccgaggagtccaccggcgagaagaagcaccacctcttcggctgatcgacctcatcacaacgtcgccggcggcggcgacgacctcgccgtacgtcgccggccgccgtgtcgtcgatttgtgtgtgtaataatttgtcttcttctgcatgcgtggtgttgctgtttttcacaagagtctccggcctcgaccagtgagaggctgacaggtggggccgtgagttcagcttgtgttgcttgattttctctgcagccttgccctctgtgtgtccaaataagtggtgtgcatggctctctccgtgtcatgtatcaatgtatttttatctgtactttgtacaagtgaagcaatatttatcgaaccttgactttctccattctatttgaaaaaccattaaagttgagtagattttagtgtgttaaattatatcgagaactacagaagtgctataggaatctatcagaaagataaccatctcttggggacaatcaattctccataagaggaggcaagataatcgaacaagaacgcgcatcgaaagatcaggattaattcatgtttaacgaacacaaataaaaatatcacacatatggtattcataattaaagtggttggtagttgaaattttgcactcaaattaaagattttaaagaaaaatcaaattaaagttgatagtgataagtggttgcattggaaaccacatggatccaatgttgacactgatgtaggagaatgcatttcctaaaaaaaattccttggaaaacaaatgttgtcttttttttctaaaaaaaaattgtttgtctgttggagtagtaaaatgccacaaccaaagctattttgctaaccaacaagtattacactcgcaaataaaaaaaaaagactaaggacagcaacatacgacaggtagagattttgctgagtagcaggcacaatgtaaaaaatttagtgaagagataagagcgggtgcgcatgggtaaaaatgttcacatatcaaatgggatcaacttttcttgctgtcatcttcataaacaaatcactaaatttatttttttcttaaggaaaataaagtcgcagctttttttctctactgactcatcctcttctttcccctcctccacacgcgcaatgcttacttcgcatgagtaatcaccagatgcaatgatttattttcaatcaccctcgctagtccaattcggggagcgcaatgcttacttcgcatgggtaatcaccagatgcaatgatttattttcaatcaccctcgctagtccaaatcgggggtggaaataggcgtggggcagttagggcttgagcttaatacctagctccataattctcattataatcttgaaaaatgttatgtaatatatgaaaatatttgaactcccattagctcagctttatgcatgaagattttttctaattctgccactactcctagcacttatccttaattatataaagagtgaagtacatatgtgggtggtccttaaatttgtacggagatttgtacggagtgttatgagatccataaactcccaaaatgcatttttgggactccgaacttgtcatgagtgtcgtatagatccaaacaagctccaacctgctttgtgggatgacgtggcatgccgccatgatgcttaagtgttagtggaatccatatgtcagtcacatagaaaaaataaaatttaaaaagagagggggagagagagagagaggagaaaaagatgtttttaattttgaaaaataaatgaaaaaagagtggagaaaaatatgttcttaaatttttctatatgtgaccgacatatgggttctactgacacgtagatataaccatggcatgccacgtcagcatacggagcgggttggagcccgtttgaacctatatgatagccgagacaagttaaaggaccaaaaatatattttttgagagtttagggatctacgtgacacacccatataaatttagagcccgtctatatacattaatattatataaacctaatacattataacatataagcatatattacctatctttaaaaaggtaccggaaatctatgtggtcacagcccatacgagaggatgctgtgaacgcatgatcgaggccatccaacggttgaacacggaactcggaaggcccagcctatagtagtaacttgtaaggatagacagcatgggcccaatcacctcaagcgacacatgtaaattgggccacaatagaggcccaaaggagatctcggattttgcagtccgaccaagctcgaatccgtgatctcaattttagtgtgcagaattaggccgctaccgtgatcaaagtgggagtgattttgtactagttttaacagatggaggagtgattatatccgattttccaattgagagatataaatcagattcgacctgtattttgttgtaaaccaacacgcctattagcggatcaccagatccgttccctgtccctgccacagcagtagaggcgttagataatgtagaacacccgcgcccatccctttgcgctcaagaacattgcagaagtagacaatgaacacagatatagggtggagctctctcttcattatagatctcatctggagtacaagccaaccattagccatagatgttacaccctacccctgtatatataggggtcttaggaggagatagaccttatctctactccggtttggattggcccacaagaaacttatctcctagttatcttaggagataaacttaacacaacactcccccttgggctaatccgcgactaactcatgcctcatcaaaactcctaccaaaacctagtgggaaaaaggctaggagaaagagtacatagttatcgctcatgcattgcacgttgttgcctcgttaaaaaccttatgtgaggaacaacagctccactcactcaaggaaaaagagtataacactatggactaaccggtccatattgtgggtcatgttctagggtgctctcccgttgaacctagcaaacatcaaagtcttctcatcccaattctccggaaaatcttccgagaactaacagttgggagagactaggtgatcaatcctctagattatcactcaacttgaattgctactcacctcacctcgcctcaggagtatgaggtagcccacttgtattagtggtgttggtttaccaaaccaatctttatatgataggaccttaaaaataggtctaagtgatcatcatcgagtcaatgccccgagcatactctaagacatttcaatgtcttgcaaatgacaatcaacacatagcacatactccccctgatgacaacctttgtcacagaccatgttcccatagcattaaacatctctcagatgtatgcgtaggcaagaatccttcagatcctcaaaccattagtcttaaagacttgtctcatttcaccgctaaaatgagaatagggaacatagagagtaatgcattccatcactatcatataccacaataccatattgttgtgcaacgcaatctgtttcatccttcagaaggattatggggataaataagtcacaacggcacgcacctcctgggcatgactccatcaagaactaggtcttgatcattgcaactttctttgacaatgtcaacaacaattggggatccacaagatcaaccacaagccttccaaagacatgttgtaatgatcagagtaactagctagtctgaaaattcaagcactgtgggggataacacatagccaacaacaccaagtataccttagcaggtattagaggacaccaccgttcctaccatcgggtagaacagatatcacgagtgtacacactccagtgataatcgtgaaatgcacatgtgcctacagaccctgtctgtttgatctcatcaggttcctcattgcaatcttatcgggtcacaattgggtcatcattcctccaagggattacacaattattagtgtgctcagacttactaattattttgtatctcaaaggaaatttcatcaatgaggtctccccctcagagaaaattccatcaatgagattttctcccaacaggagatggtactcttaccggaatacctattggtacgagatttgcatgctgcgatttcactatggagtctattcaagacatccatatggatttcccaaatttgttaactgcatatttaatttcatgccattttgccaatacctttatttagcggaacgttcaactcatgtggaagaggtctcatctaggacctacttgaaccatcgcacatcaccacctcattatctcaataatgacccataaaaatccgaacaacattcgcgacttttacttagcgattcggttcagcctcaattgcatttccatttgacccgatttgagcatcgcatgctcatgccatggactttttccggatccgggttctctctaagagaatcattagcaagaggcgacatagtgtcaacacatttattcccactcacacatttaaccagatcttcatcatttcccaaaacgatcgatccatggttgttccgtattcctagcaccataatatgcgtgcattgctaggaatgtcgtctccatgacgaacatcattatgaggcatatcaccttccaaaggtgaattctccaccaggagaatcagaggagtatactcacatccagtgagaactcttatgctctgactaaggcctacggatcgtgttagcaggcgtccccgcacaacatgatcaaatgccataagtcttatgtggatacgatattattcccgggtctatccacatttaccacaattgggagcattactctttttaacaactatctagttgttcctcatatgattttgttggcaaaaactccgtgcaccaagcaataggagtatgaactaaacatacaagttcagctcatttagtgagttcactcaaagaaatctacaggcattccaaaatgggcaattctctccccctaatgccgagatatcttacaatagcatactaccaatccccatatcgtggcataggattaaggaatttcacctcgatcacaaatgttctcccacgaatgtatgctacggtggtgatatatttgggaaatatttacgcactttaataggagagatttttccattatatgcagtgagcctggacatatactaatacagtgccatgaatactgtattcttccttccttcgaagggttatcctcaacctcctagttaggatatacaggtctgcaaaaaccaccattgctaccaaatgtatatgcaaccaacatgcaaatactttagccaaatgcactctccatggattaatgctcacctagtgccattcaaactcataatcgattccggatcgacgtgcattagacattgcatgttatatgcttaagaaggcaacctatggtggcaaaacgcattccaatgcgctcaacaaggagtacgatagcaaagtgcgcggccactagcctgcgctgccaagcagatttttgtggtgcagagttgtgttaaagtccaactcgtctaatgcccaagtttgactccaattactcataccaaactctagaattgggtcatagttaagcagcatgttttaggtacgatccacgagtgaattatgaaaccacatttactaatgtcccctggacatagccatcaggagataatcaatacctccgacaatggtaatattcacaataaaaccattatattaagacatatccacaaaaatagtggaatgtgtcggtgcaactgtcgttggcataacgagctcaacgcatgcaacacgacaaacctttgcatggcttgcacacgtccacacacgaaaaacgccagtgtgcgactagcatggtcatcaacccgtgggtgatcaaccaacacaaccagggagtagtcatcgactacgagagcgcgataaaacgcaatagtgcatagccaacatttttctgaaatacagttacgttgaactgtgtgagtggttgtaactcctcggatcaaacactaattgttctattaaactaaagcatttttatcaattccagcatgaagataagctttataatagaataggaaagaccaagaactttatctatctaggaaatatcgatttaatgcaaagttccaaactaagcaaaagataaactgcttggcaacattatagccgaccaatgtccttctaggacatgctctaaactagccatacaactcccgttgtcaaagcaacttattagacagacactacaaaccattggtcatcaaccaaaggtcgccatttagcactggatccatccgaggagacgaggacctagaccgggtcaacaccctagtcaagctattggcgttgtagtgaagtgggaatcgtgcctattcacagcatctaccctcgggcttattccgctagatttgcctccaatttttcggcgttctcgcaagacatcaggttccaaataatattgagaagatatgtgcacaccaggggcaaccatatgaacagtgccgttccaccacatggaaaacacttcacatctttcaccggaccgagtgaaaaatatctcaaattattgaacctcgcaactccatgttgctagaaaattgaggtataatcatttatctccaaatcagaaaagcatgctctcaaccattgggaaagcaaaatgacgaccgtagtccgaccatactctgattgagatattaagccactaggggaaaggcacaatgaatcccaaacacattgtctaattccacacatttcaacgactcagaatcccattcttgagtgtgatcatagggatagagtgatctacattaatgcccaaagccatacaatagtcattgaaggcctttacgtgaaatcacccacactatcatccgaatcgtttcatgcggttctcagagaacgcaacacgcaaatggacgatatgtgcagtgaattcggcaaaagcatggatctcgtacaacaagtatacgtgactccatcttgtagacacatcgatattaccatttatgtatggaggagtgtatcagtaaagagtggtcttatccatagccatggatatttaatttcccagaatttccatgcgttatgtgattttttgttatttacttggtcttatttggcattatattcccaatatttatgccacacagaaaaccgtcacacataaatgcaggaaaataaacccatcataatgcttccaggggggattctacactatgtgaacacaatttatggaagcatcataacctagaaaaccatctctagattatgttgttggaattgcatcaattttaaaagcaaagcaatgcttaaaaaacaccattacatagttatttacgagtccggagacccacatgcaaaaccaaactatacagggcctaagcaacaagacatagccacacaaacaaaattaatataatctcttgttaattacaaggttcaaactgtaaaattgcattgaacggtgaactatagcgtaaaaacccaacactccgggggcttaaacacaagttgtcaataaaccgaaattaatccggccgaattaccgttcagagtacgatcttatttgggctatcaagcacagtgtagcccaaaatgcctaataggtcgaatttctgaaactctagacccatgaggatttcggatttccaggtttattatttttattaatttgtttgggctgtctcgttactgttgggctttattcggtcgggcggaggcagaccggtccagccggttcgcctaaatgaccgagaaagaggaaggggaattagggtttcccctttcccattcattgtccgcaacggcgtccaccgctcggcacaccggcccctcgggcacggcggcggcgttggaggccgtcaactgtcgactttgaagggagttagggtggcacacggcgaggaggtcatcgacgacccatccactaccccgattggcaggacggtggcgacgacatcactcccttgttgcaatttggtgtggcgacggctcggtggcacacgatggagctccacgtcgacctgcgcatcctcatgacggcagcgaggcgaactcaacgacggcaactgagaccccaacaacagcaaccaaattgcatctggccatatcgtctcggcggaggttaatctggtagcaggcagccgacgacccatcatcctcccgccacagctcgacgacagcgtcgatgggaggtcaacggcggcggcgcctcgcttcggcattaactccggcggcaatggcgacatgggtttagggctttttctgagacggcggtttcccgcgacggcatcgacgcaaggccgacggcgtacctaacagcgacggcgaacgatggccaacatgtctctaagtccgactacacagactgagaatatgtcaccgcgttcccggcgtggcgtcatcagagaaagagagaaacagatagatgcgagggaggcgggcgagtcagtcaattcggcccagccgaattaggcacgtctccagtccagggtttcccatcaattttaatgatttctcacacggttttctccagttttcatcaaataaaacagatgcatatagatcaaaagtaggaaattaatctaccgctagatcaagagcaggatcaaatctactacaagcaaagcatccataatatgataaaaacgagaaaataatatcaatctataaaaacatatatagaccgcatacctaatagacacatgcctggatgtatctatagattagtaaattagtttagaaaccaatcttactaattaccctggttcgcatgctcacaaaaatctttcacgcgcatgctgcctcctgctgcgtcgcaggtcgcctcaggaacggcgtcgatcggtatatcgcacgcatctgtacgtgcatgtgtatgacaacgatgacgacaggtcgacggctccgatcacggatacgctgcttagcacgcacagcacctgaggctcgtctcgcaaggcgacgcgacgatgactcagatctcgtcgaccggcggcagacatgcatgcaagcaaaacaaccatcaaccattaattaattaatttgtaatcagaaatcaatctactgatgtaagtgcatgtgtcgatgcatgcatgcagcatgcatattggttgatttgccatcaatcttgtgcatggacgccaggagccaggtccatccatgcttgcgtgtggccagcacaggccatcgcgtggaggtgcggcgtccagtgtagccgcagccgcgtggcggatcgcgtggggacgaaccgacgaagaacgggccggtgcactaggagatcgagcaccgacactctctacgggcgcgctcgatcgtgcgagggaggcggggccggcggacatcggacgacaggagtagtgcacgctgctcgcggcgtctccacggtttcccggctacctgctcggtttccctttgcgatgtctccgcagtcgcgtgatctcgcaaagaaaaccaggacaaaccaatagatcaatctgttgaccgaaattaatctaacaaaatcaacacattagaacaacaaaccggtgaacggagagctgctgataacgtgttgtaaaccaacgcgcctattagcggatcaccggatccgttccctgtccctcccacagcagtagaggcgttagaaaatgtagaacacccgcgcctatctctttgtcatcaagaacattgcagaagtagacaatgaacatagatatagggtggagctctctcttcattatagatctcatctggagtacaaaccaaccattagccatagatgttacaccctacccctatatatataggtgtcttaggagaagatagatcttatctctactccggtttggattggcctacaagaaacttatctcccagagatttgtttcacaacatatttaagcgagtaaaagtggactttttccttgttattagctatctaattgggccgcgctttctgttaggcaagctatggtgggccgatcgctttcatcggacgacatagaggaacactacaagcccattccccagtggccgccgcccgccgccggtcgccggagcttgctccgctgctgcaaacacctcgatcgttgtttccgcggcacggccaacttgccgacgtgatggccatggccggaggacgtggtcgcacgcacgcatgatgaggagaaacatgcatgattaattggacactggacagagagcacaaacacagcacgatcaatgccttcccttaatattatacaaacatgtagtagtcaattcgcagtcatggatcaattaaattaacgaagggcctcttcactttcacgtcattttcaaccttaccaaattttagtaaagttgtaaaaaaagtggctacatttagtttgctgttaaattttagtaactatataagaaatgatgccaaaattttgacaatagatttttttttggcatcaaagtgaataggcccgaatagacatgtatcgattcacaacaatctataagtaatttaccaaacaaaaaattaatcaacaagaaataataataatacaagttcatatattgctcaaatattcaactgcaagaattaacgagcgagtttttttttcctcactcgatggatggatggatgcaacagcgtgtgtcaattaatcatcatatcaggatttatggctagcttaaccaatcaaatcaaatcaatttcaatttctccttcttggcatggatacggcgttgccgtcgaagagctcgtcgatgatggcctcgaggtcctcggcggagagcttgatgtacttctccgcctgcctcccggcgctgaagctctgcgagaacctccccaggaacgacctgtacgccggcacgacgacggcggcgatcgacaccctgagctccgactgcagctgctcgtcgctcaccacccacgcgccctgcgtcctctggatctcgtccatggctgcgttgaattgcttgaacctctccttgagcaccggcttctgcaccgaccccttcaccgtgatcaccccgtcgtcgcggagcagcgtcagcacgcggctccacgtctcccgctggtagttcttgtggtactgcctcaggtccgtcgaccgcttcctcgaccacgcctcgccgaccaccgcgttgatctccggcgatccccggatcttctgcagcatgtaccggccgttgttcatcaggaagatgctgcagagcgccgggtccttgtagagtcgggatttggcttctagattgtcgtggaggagctccatcacctccatcagctgcgccgcgaacgggtcgctgccctcgtcgtcggcgtcgatgtcggtgcggtggtgctcatggaagacttgctctagggtgttcttgtactcgcatgcgtacttgaggtagttcattaggtagcgggtgagtgggtgcaccgcgccgcccgggaccggttgcttgccggcgtcggcgcggatggagctctccaggtcgcagaagatggcggcggcggactcgccgaggcgggaacggacggaggcgagctcggtttttatgtcggtgagggcgtcggtggtggtgtcgggttcgtcggcggcggcgtcggtggtggagcaagcggcgatgaaggcgtcgatgacgggggcggcgtcgcggacggcctcgtacatgtcgagcaccttgaagagcttctcgcggcgcgcttcgtcatggcgacggcctcggtgaagttgagcatctggagcatggcgcagcgggcgaggtcgacgaagatggcgcggccgacggcggcgtcgcagccggcgaacacgcgggcgcagaggtcgtgctcggcggagaggccgacgttgatggtgtggtggaacgccttgaatcacgttggcacgtccgactccagcgactcccacgccatcctcaccacgttgtcgatgctcggcttctcgtacccgaagttctggagcaacccgtccagcgcgttccggcgagccaccaggaacacctgggtgcactccgtcatgtaccccacggcgatcatggcgtccgccatggcgcggagccggtccacggtctcgggtgggaacggcgggggggtgtctccaccgccgccgccgccgccgccgccgtccgacgcgggatcgccacccgcatggttgaacgacgggccacgcctcatggacttgccggtggcgctcctcgtgtcgccgttctgcgccgccttggcgacgcgggggtcctcgagcatcgtgtggaactcgtcctcgacgaacgccatggcgcggtggagcacgccggtgacgcggtgcaccccgatggtgaacttgctcccctcggggaccgcggtgagcgccgccgccagcgcggagatgcgcctgatcgcggcgaggagcggcgccgcctcgccattctcgcccaccgcccacttatcgtcgtcgccttccgactgcgccatctcctgctcgacggcggacgcgaacttgtcgagcgtcacctccgagatgctcgtcggcgcgtcgccctccctcccggcgaggaacgcgtccacctccgccgacagcatggctaggtccggctccgcggcctcctcgggcggcgccgcctcctctccggcagcaccctcgccctcgccggcgccggcattgtcgacgccgccgcgaccttcctcggcctcctccttgacgcgcacagcgggggcatgctcgctgatcttgatggcgccgagggagaggttccggccgagcctctcctcccggaacgtcgccggcgagaagctgctcgacttctgcggcgggatcctatccattcttgccgccggagttgatcgatcgatcgatcggtgcaacggtcaatggcgggacgggtcgcgatgcatgcaaagcgagagatcgagaggagagagagagagagaatggagaggttagagagagagtaggggtggggcgcggaagttgagggacgccatgattttgaaggagtcgtcgtcgtcttcttcctcgagctatgcagactttgctaaagaaagcagaggtgttgcatggttgctcacttttggcgccaacgtgagtctcctgacaaaattcttatgaatattttcttctggattgatttgaacattagtaggatgccacatttttagaccgaagtgatatttttttaaaaaagaaatcgttatttattcaaatgctaatgaacgtgtgaccgtgtgtggtgatcatttgtgcttaatttggaggaggtgatgatgattgctgcccacgatgagtccacttcaaggactgtttggagatattgcatgtaattaattagttgtccacagaattttgttcttgtattcaatttaactcggcactgcgaactgaaatggttagttttatgccggcccgattcaattcctaaattgacatgtcagctcgtatttatgtgcaattattctattaacggtaagtgagtactgtttacacctaaatttgacacctctagataaaatagagaaaaattgccaaagtttgaaaagtgctgggtttccttcacatggccggtcagaccgcaggaatgtgggcggtctgaccgcggcctgaactccggtctaaccgcaggtatgtggccggtcagaccgtcagagtttgaactcgagtctgttttcgtcgggtctcgagtttccttgcttgggaaggcatgtttcgggtttcctttggtttctatcccaagttagacgtggaggagaacctgtagagggcaagaccaacccccatttaagggacaaggccggttcaattgtaatcccccaaacacacaatatacttgaatcaccttatattttatctttatttttagccatattttttattttaccctagttttagtccatctttgtcgatttgtgccgtaaatcgtccgccgccgctgcgagagtacgacacctctttgtaggtttgtcctgaaaaccttccgtttgtctacgagacgggtagttatcctcatatcgatctaaatcggtctagatgctgactttaatctctaaatcggctccgctagccggtttagccgttttctacaaaacctatcttgatttggctttttagctagatcgaggtggttggcgactccatatcaccttaagacgtttaggtgttgcgatcgtacttgtcgacttgtcacaaaaagttatcaacaagtacccgtcgatagagagatgtaatttcattagtactaagatatatcagtaaggtctctcaagtaaggtgcgtgcatgttgtgtttaaagcgaaattaaacacctatagtgtcttcgataatcttaagatactcccatccaatctttcagaaacgctcatcgtgatagagtgtgttgtatttattagaaaatgaattaatttggcatttatttgtgaaaagaaatggatccggcgtataacacatgatcatgtagtaattggtagtgaggaaacggcccgaaaatagacggaaattacctccaccatgtttgtttaattttttttgttggaaatggaaaaaaaatctcagatacagaaattataatgaatatagatacaaagtaaataccaacagtaacgaatatgatcatggatagttatatctacaagaatatacttaaactcatgttaaatataatatgtcattgtaaattagactatttattttttaaaaagaaaacttagagttttaaatatgaagtgtatccatattaaaatatcattttcaaattttatttattcaattctaaaattaataattaatgaatgtaattgagatggatttttttttaaaaaaaagaaacaagttactctcccctattcacattataagacattttggaatctctatatctcggttagattttatcacataataatctatcttgttaaagagattttataactattttaagtgagtgacatgtaaataaggaggggttatccccttgaaagtttagaatagtctcctagcctgtcaacatctcgcttgtgttcagtgagattgcactgcatgtatgcatgatcacaacaattgagcagtaggttttctcaggggtggatcccaggattccttgaagatactccctccatcctaaaatataacaattttaaccctcagtatttgttccaaaatataacttctccatcaacattctcttcccaaccaattacaaccctccaccattcattttttccacctacctccactactcatccaatcacaactctcacaatttcaaattttatactaactttacgaaactactaatgtgtaatattcatattggattttatatacatgttagttattaattatttttaatatcaaattttagttatttctaaattatattcctatatggactctagatcgtctttcaatatttcttattttttaattctgaattttcgttatctgtaaattgtatttatatatagactctaggttcttcatccaatattatttatttttaattctgaatttttgttatttctaattgtatttttatgtgaactttaaactcatctttagatattctttaatttttaatttcaaatttcagttacttctaaattgtatttctatattgactttagactcttcttcctctgtttttttaaatttcatcatgttgggtgatcaagccgacaacgtccacgatgaattatctgttaacaaccttttctcaaatagtccagccgtagccgacgttgtacatgagataagtcgtcggccttcgttggtaggttgggtgtgacaactcagcatttttcgagagcgttctcgataatggggtgtacttgaccatatcctactcgagtgctcaattgttcctgaaaaatattttctagaagacaagatatatagcatagaatatcgagtatgtacttaaaaaactgcatgaatcttctagcaatttaatattctagtttttaattccatatttaattttgaatttcagctatttaaaattgtatttctatatggactctattatttctttttctctgattacgtatttcaattagttataaattatataccagtatgaactctagtcttctcttccaatattcattatttttaattacaaattcaactattttaaattgtttttctatatggactttgattaatatgaatttgtagcccatgagagagaatgtggagtctaattttcctattacttaaataagttaatggattagttcttaatccaattacacttgctctgcattggttgaattagaaataaactttgtgtatgtggtttgtttggtcgtttccatctcaaacttttttactccgattcctataccttactttaagcttctgtaaaaaaaagatttctattagttatataactattatattaaatctaaactgttataatctggatctactatgacgcgatggttatttaattttttctctttgtcttgattaacattggaatttctatttttcttgtccgttttcactttttttctatctttctcgtccgtttccatttttttttgtccgtttcaatttttttatccgtttacactacacccaatctaatacccttctttttttgtccgtttacacaaaacctaatcctaatacccttctatttttattttttcttattttctttcgattaacgtgagattttctagaccgtaagagtgaacgtggaggcttctttttctgttactttattaagttaatagattgaaaatgtttctattgaattcttttttattgaattcttttttacatcgctcagtttctgatacgtactatttttcttcggtatatttctatcattttttttgtctatcgcctccgtgatcgagtcggtctcataccctacacggtcgcatgaagatgcacacgctttacgcgtccacctgcctcttcacatattgttcacatgcaggggcggatctagaaaaaaaatagtagtggaggctgaataaactacatcagcataaatcgaacctccagtccccacatcctatggatctatggaaaaaaaatttagtgggggcttagggggtctccactgtcccggagacggtagtggggtctcaagacccccgcccccattgtgaatctgcccctgtccacgtgcccccattgtgaatctgcccctgtccacgtgtcttcattcagttaggcaccgattgtctcgctcgtcatgtctacggggccaccttcgcagcttcgctggatgggactattgccctgaatcatgcaacttcatcatgcgtgtgtgacaaaaaaaaaaatttcacggtatcatctatgatttcgattggatgttctctccacttctttttttttttgtgatttttagcacttatacatatatggatttacgtacccatcacattaattctttcatgcaatgcccgtgtgccaaatctcggccttttacttagcgtaataccagatcctcactgtattggtcaaggttggctttaaacctctatacaataaatagaccaaataaccatagtaaaaatatttttcgtcatacgacccacattattcaatacaagcaaacacatgatgaataaaatttaagtcctccagaactatatgatgtgcttttcccggagaaaacaagcagctagactactcgcatttcatgaatttcctctcagcttacttcctaatttgcctgaaatcaaccaacatttctcaatggcatctaacatctcttaatattttcttaaagactgcgaaaccactcttgagtaattgacttgatatatgggtcaaattacacaatgcatacacataatacaacgaatttgcatgaccacatcttcactagtctgaaacggctgcatgccagggctttacttttaccttgttcactgaaggtttccgtgtgtgtgtgtgtgtgtgtgtgtgtgtgtgtgaaaatatatat

SEQ ID NO: 25838 - DNA, 4580 bp, Oryza sativa
atatatatagacacacacacatatataatgtatcatacgtagctccatgcctccatgaatcatctgaagaaatcagggaaggaccacatgatgaacctggcgtacaaatcattctccaggaactcgatgtgagcagctctcccgatcatggtgttgaggctccggcgacggccatgggaggactggtcgaagctcacgtcgcagcgcatgaacacccgcgtctccgacgatggggctcggagctggtccaggcagttgttgagcatctcggtgaacacctgccctttcttcgagttatccgacgatgaggcagggcaggaatcgattcttgctgaatgatatggaacatacccatcctacagttagttaagcagagttatttgattaggaaaatatacatgtcagataatcagcatacatttgaaaggaatattttgagcaagaaggtacctgtggcgatgataccaagatgatgtttttgaagttatctaatgtattcagctgcgaagattaaaaaatatatataagaagttgagttcatacaggttaattaccctgtgattcctagttcagctctaattttggggaaattaattcttatagttgagttttgttactgaagggacatagagtagatctaccttgcatagcttgtaaaaaaatgtgttctggggatcttgttcatcgctgaaagtgagctggtgcatgcattggactcccttgagccttttcataagccacagaccagagttgaacagagaatttgagctgtaccagtaacctaagtgaggtccagatattgacatgtatgtgtagaggttcttcagaaatggttgcatcttggggtctgttgaatggaaaagaactggttagttagtcagacagagccagctacatatttggaagtaaagttggaaaaactacctgctagggcacttctgataataatgtttccaatggaatgaccaacaaagctaagcttcaaatctttgcagcctccatttcttgaatacctatcaattttccttttgaggaatgcaactacctcatttgatagccttctgcccatttccttaaaatctccacatgttctgtcttcatttgtctgagacagtaggcactcagctccaggatcacacagtatccattggtttctaataagccgtaaatccagatgatgtccctgctttcattcgagtgaatagaagaagttttcagtgtttcatcaacataatatatgagatgaaaaccatcgctacaagtctgaagacacttgcctgaaatccatgcacaaaaacgactgctcgcaatatatgcccaatatttccatcacagctaggcattcttgccacatgtttaccatttagcttatgctgtagagtagtactgtttgcctctgaagcacttctcaccaaacgcttgctagaaccatgttgtggaacaaccatgacatgttgttctatgtgaacaacaggaatttctgaaggattagcataaatttgcatatcttgaatgaaccgtgcattaatctgcagaatgatttgtgtcagtatccttttctttggagtaatgcaaattgtttcagttttcaacattgactgactaccgaccttcatttgtgcaatacttctcctatggagttctgcccgtgaagaagaattctgtacaggctacaaatatatggaaccatcaaaacttgacaggaaaatgctactaattaataaaagagatggtaagaaaagggcagatagttcactgtaagcatcaagacaagacaattacatcaggatgcaactttcttgaactggaacctctcagaagtgaatggcgaggagaagacttgccactcaaactgcacaaataacgatgtggcatgtcaacttttgaatgaacaatccatattgaccattctgattttcggtcagcatcccaaatattgcgcaagtgatccaatatcttgattttgtttgccctgcagtaaatctcaagactttggtcggacagaaaataaaatgaaagaataagaacagtaattaacaaatcattacaccaacacattagagaagtagccaatggctatcttgattctaagacaaaataaaaaaaccacagataacctcacctatgaaatttcaagaatgcattccataaaaatgaaacttgatcgctcacagcttgaaataattctaacaaatcttccttggaaagggtgtacagcagaatgtcattagtgctccgaaccacattatcagatctctggaattagttgtaaaaagaatcgtaaacagttagtaaaagtatcatatgtgacaaaaattgtcacttttgagagaccaaatcaagtgtacctctattagatcatgtaaaacaccagtaagatggccaatgcacttcgtgggtatatagagccctttgctatatttaggcaagcctgcctttgatgaatcgatcggctcatgtttaccaagagttaaatcagcatcatctaaatcttcaagagttttaccaatgccagcactcatcttcatcacttcctcaagcaaaatttctctagaacttaatagtgcttttataatataacatgattttgagcataaaccttgctcagatgcctgcatattggcagcttttagggataataaatgaaggcaacatgttcaggtcattattttttaatatatgaagtcgttgactttttagataagtttgaccattcgtcttattcaaaaaatttatgtaattatcatatattttattgtgatttgatttattatcaaatgttctttaaggatgactttttttttcatattcgcacaaaaaaaattgaataagacgaatggtcaaatatttgtcaaaaagtcaacggcatcatatattaaaaaaggaggtagtatatgctcagcaccctataatgttgccaaatttatcaaatgttctagcaatctcagtctctcagacaagcttttttgtaaggtcaccagtatggcagtgtctaaaagaatattaaagctaaagtatcacaaacctgtgtaccttctgagacgatttggtcacaccagcttttaggtacacgatatgcattgttagatcaacaagcacagggtggaaagcatcaaaatggacaggaaaatatgcgtgtaaacccaggagtgctttgtatgggattctaaattcatgcactgggacatatatgtcacttggatcttcaatctcagtcctacaataattttttttaaaaaaatggaagcagcttcagtactgatgaatggatgttgattttgtaggcacacaagtactccccaaaacgaacaatataatgtgaacaccaaaataagatggaaagggaaagcaaagaacatacctgtcttccaatgttggaacatagatgagctcaaattttaatattacagacgaggttgctgggccctggaatggagaaagcagaagttcagaccagccattgtaaacataattcagttaggaaaagaaagttaagctaacctcatcttcggtgttgggtatgtagaaagacaccataactgatagataaatatcttgtctagaatatttaatctggaatggttgtgtatagaagctattgtcaacgtcatctattttccaaaggccaaatgctcccttcgaaccaatatcaggaactgcacaatccacctagcatgtcattatgtattagccaaagattgacggttcaagatgatactatacaacagaaaaagaaagaaaaacaagaacatgaaaaatccaacctaacacaattgattgtaattgccaacaagacagctctgatgcatcttgaattggttttagttcaaaccaaactaatcaacaacagatcttaaattataggtacaagtacatgattgatgagcaaacgtgcaaaatatatagcacatatcacatattgccatcacagaataggtgcaagaaatgcacaaaccttcatattgcacgaccctggcaggagatacgggcgccctgtactcatcctcctcccacgccgcactaatcttcagccggtaccatctgcacccaaatagcaaacacaatcacatacacctcgatgaaactgaatcaaaattgcaattcagagatagattttcatcagattcataaacagacagaacaatcaaaatcgtacagaataattaggttcaagtctaaatttccaaagcccaaattcatcctggtagaatcatcagcaagaaaggtaaaatttctgccgttcgttccttacccttgctggaacaggtcgaggttgtggaagcggtcgatgtaaatggccacctcgtgcgccgtctccatcacggcctcccacccaccccgccggcgacccgcggccggagaagcttcgcctaccccgctccgctccaccaacgccggcgagatcggccacctcccacctctccctgccgcgcctccgcgcctccgcgcggccacccatttaccaccttcccctctccctattcttgtcttccaacaatgggccgcaccgcgcgcgtcaaggcccaacaacccattcgcgtattgggccgcgcccggaggcccaatactggagtccgtaa

SEQ ID NO: 25839 - DNA, 5029 bp, Oryza sativa
caacggcgccgcccgcacgaccgcctccccactgccgccgccgctggcggccgccgtcgcggcgccgccctcctcctttcccgcctcctcctccgcgcctccgctcgcaagccgcctcgccggccgctgctcagccccgcaaagaggagaggaaaaagaagagaaaaaaaaaagaaagggtaaagagagagggtgacgcggacacctgatatgtgggttccacgtgggtctcttgctgactcagccgccacatagaccaaaaccgaggtcaaaaccaccgaatgacctcgggtgaccggttttgtatagttaagggaccccgaatatctggttttgcatttcgaggacatttttgtatcccgatgacaagttgagggaccttcggtgtactttttccttttggttcccttcaactatacccatagtttgatttttttaagactaaaaaaatgcccgtggatgctattttaatttaattattattatacggtttagttagggtgaaatttattgtgggaattcatttggatatttttttaagaaaatcataagttgtaattaggaggtcgcatttcatctcaagttagcattcgagtttttttaaagagatttcttatatgacttcttttgtatttccaaaagcacacgagcttaaaatgcaactcaaacatggatctatatttccaaaagcaaatgaacttaaaactgactcaaacacggataatgtaccaaaataccggcaaaaacattttcatgttttataatagtagagatagagatataacgggtagaaatccgacctctatatccataattggatttacacagtcaataccctagtttgattgttgtcaagaccagatatgaagactcccctcaacccttaaaaccgtccaattcaacttcccaggaggttttcagagtggttcggtccgatgtgacgcttatatggcattaaattacagtaaaataaaattaataaatgcagtgaactccacacatcagtgaaactcctcgtttccccttcctccctgtattacaatcaaactgtagctatctttgagggaggtaaaataaacattctcccaaccgtaaaccaaaccatccgcgtaatgggccgcgcttgggggcccaacactggaggccataataaaccctcgagaaccccctccaccggcgccgtcgccgccaccgccaccgccttcccctcgatcgccggagcggcgagcccacggcggcgagcgccgcagccatgtcgcgggctctcctcccgcgcggcagcattctactcgtccttcgaccgcgagtcccgtccacaccccaccgatgcttcgcgattggggcggcggcggcagttgacggcggcgagacgtggcgggggcaactccggcagggggagggggaggggaggagcagggcggtgaaggtgtcggtgtggtgggacttccagagctgccacctcccgcagggcgccaacccgtgccgcgtcgccacgcgcgtcacggcggcgctgcgggacgccggcatccgcggccccgtcgacatcaccgccttaggcgacgcctacatgctcccccgcgccgtccaggaggctctcgccgccaccggcgtcgccttctcgcacgtcccttccagtttcgtcttccaaacccatcccaatttcgttactcatcgaagtgccattgtggaattaattaatatctcttgtgttaatggaattaaggagtgatattacttcatgatgtagagagtacatatcatagaagaacactagttttaatgcttttcaatttatgactgacactgattaggctatatatgtcaaaatgatcaccctttttactgattctaattgattgcgttggggttatatccggtgttggattgggtttgtggggtgggattggaagaaacatcctgaattcttcttaatgatactctgctctatatgatttccaatatggtattgagtttgtgctaaatgtgtaagtatttctccaactgttagcaatgaatcataatttttcattttcagacaaatttgcagtgctttggattgttgaaacttgcaaattaaccactggcatgctttaaatgttgtgactttcatgtttaacgaggaaatttagagcagcttatatttcacttatctgatgctgctacttcgttgcatgatattaataaatagtttgatattgtaggtggaaagggcggtcccgaccaattgttcatggctgatctgacctattggattgctcagaatcctccaccggcccatttcttccttatatctggcaacaaaggccttgcaaacattctgcatcgcctccggatgagcaattataatgtactgcttgcctgccccagtgctgactctagtgtattgtgcagtgcagcaacgattatgtggccatgggatgctttagttaaagggttggatttctcaccaaaacattttaaccaaccacctgatggtatatccttttcttggtacggtcactataggggaccccttgatgacttgttcttgaactcagagtcagatgactctatggcagagtcagaggactccctggcagagtcaagggactccaaggcttttcaaccacataccaagtcagtgaaaccacctattttacccaaatctgtggccaatggggttaggcaagtactgtactcctttcctgaaggtatcagtcttccaaatcttcgagcagagcttagaaagaatcatgtgttcatggataaaggattatttggcttcaaaaacttctcttctcttctccaagccatgcctgatgttgtgaagtttatagatcctctaccaggtgaaagaaaccagcctgctgtggttggggtttccaagagatcaatggagcctgctgagcaaatttacaagggaaagagttctgctcaaagcagtggtgagttcaaacgcctcgttcagactcttaatgagaaaccaccatcatcacatgtcccatcttcttcatcagatattttatctgcggaccgcaagaaagttctagcagttgatgccccatcttcccaatctgacttgttatctaggaaccaagagaaagctccccctgttgatttgactacacaacctgaaacacctgcaagctgtatggaagctgatgtggagagtgttgctggagcttctgcctttacaggagagcaaattactgttgacaaaaaggggctatttgaaaggatttgtgtactatggaatgatacagagcctgttaagcctatgctttctccgtctcaagatgatacccattctaaaggctccaatgatttactaactcagtatgccaatagtaacgaacataacagtcttttgacaaggaccttgaagatcttttccacaactgacaattcagatggagacaatgttgacagcacttcagcaattagcagcagtttctcaaatatgactgccaatgaccattcggacaaattaaatgtcaaggagaatgtagggaatacgatcatccattctagtagatcagttgacacgagcaacgctgaacataaagttgggtttatagaaaaaagcaaaggaatatttagctgggctgcaaagtggtgggcgtctggaaaaccagacacagatgacaatttaagttcagtacatatcaatgatggaacaagggaagaatcagaaaaagaatctgcatttgtaaagacagctgctactgcaagtgaacagcaagtaggagttgaactgttcatgaaaccttacttctgggatgcactacagcaatatttgtctacccctcatggatcagatcttgtttcaaaagcaaagacaaggtattctgcttctcaaattacttttatctacatatataaatgtttctactttgcctgcaattctatctttagcagattccaacatgcacagatagtaactgtagttgacattgaacaaaaatgccatatcctaactacaagtccatggttctgattgcaagctgctcttttactatgctaacagcaagcagaaactaatctcttgcagcacaccaagagataatcaaaatggtaagaactgaatatgcaagcatgcggggtgataatggctgctggctgtgatcatattcaataattgtagttcttatattttactttataattgcactttcctcttcaagttcctgattttattctatattttgttaccaatgcaaatcttatcacagaagatacgaaataaatgcagtcttaaaataaatgatgactcaaataatttcatcttttataattcttgttcttaggtggacatggacccaaatgtctcacctcaaatataactagaatcatttctgagtaaagcttcactcaacctagctgcttgtttttgccagggaggagttagcgcatggactacagaagcaaggccattggcctctaaaaagccttggtgggaaacaccaccaccaattagtagatttgcttatctcagaaaagcaatggatcaaagaatcttcatcacaaacgtctccttttcgacttgccctcccccagagaagagctcgttctccactactttcattttttacgaatggaaggccatcaggccagcgtaaacatgtcgatgacagaagcccaactctgtctagaacgtcggtccatgttttacctacaaaaaatgggaagggtcaggccagctgcaagagcaatgagaatcaaagtaagagtgatgactttttggagaaagagcttggtccagtatctgacagtggtaaaccatatcgacaaaatgataaagcagtccggcatcatcctcctacctgttcagatgatgaattttctgatgatgaaaatcatgaggtggtccaagaggctgggagagatgcagcacaaagttcactcttcaaaattattgattcgtggaacactagtaagactatttgttctagcaagaaacagcacggcattggtggtatagtggactgctctagaatcaacagaggtaatggtggtgacaattcgatcacagaaaatgcagaaaaggcta

SEQ ID NO: 25840 - DNA, 6957 bp, Oryza sativa
taggctccattaccccatgattagtttaacactaatgaccttaatgaagcttttggttgtaatgtaatgtaaatgtggtgtggtggtgttgggtggtgtgggaatgaatgaaaagacacacaaatgcaacacaaatgccaaggagaaaaaaggggatctttatgtgcggttgcagcatgggcgattgggcatgcagaagctatgccatcatgctcccaatcctgaccttctgatgagaccatgtgatgtgatcacctgtttctttccttctctgcattttattagccatggattagaggagagtagaaagatcacctgttaattgaatacttctacatttgtggcaagaatgcactaaaatactatttctgaatatttctctccctctctctcttaagttttgtttgactgaatttctgcaatgtcattgtttgcttttcagcttataagccattgtcagaatttgaattttgaaattgactttgtggctttctcattgtagtttctttctagcattttcttttaaaccacgaatagcacagatattgaagttttgcccacaaactattttgtggttgcttatacgctgttctatggtttaacgatcaaacttctgaacatcattctgaatgtgacagttccgaaattcagcaggaagaatgcttgcaatgcaagatgctgttgtgatctcgatggcatgattggtgcaggttgatgtggattagtttggattaatcccagcatccgttcttagcggttactgtgcagtcaaaagagtgcaaattaaagatgtatattagagagagtcaagtaataatgcagtgtagataagatcttcagtttcgcctaaaaagccctgctgctgcactgctcacaatcattagcacttctgtacgtagatttcttctttggaagatcattagcatcgcagattcagaaacggctaatctgtagcatagctttgtcattcatagctagtcttgtcagtctctgcgtgatttggttcggattggcgcacgcgatgatgattggaaagtgatttggaaaaaaatttggaagaaataattccactgtgatacgatcgtcgtgtgcagattttgtggggagagatcccggccgtccacagatcaggaacggacggagaccagcagacatgatccgcgatgcgaggcagcgtcaatcaatctcggccgttcatcacaagaaacagacggtccgcatacttccagcaggttctgcgtcatgcacccctttctggccccacctgtcagcgtcagacgccacggcccttcttgtgacacgtgtcgtgttgacgcacagctgaactcgacggtttttgatgatttgatgttgctagacccacgaacctacttacaggtaaaggatcctattgtttggcttattggtgaaatatgccgaataacatatttacaagcgaaaactaatttatgaataaaacttttatatacgtgttattagtgatctaaaagcaatgcctaaataataaacttcgatgagtgaacctcaaaatcagattcaaatttaagtttgaaaattcaaaatttagctgataagcataagcataaacgaaaatacgaggccgaaaatcagtgggtaacccacgggccacgaattgacatgttgtttacttagaattaattaatctataagtgggttcacgggtcgaaccacttgcatcctcaggtacggcaagctgccacgatatatgggaaccggtgggtcactcacttatctgacctataaatgggttcgcgtgtcggtccatttgcatccctagctgccacatgcacccgtgaattgtatccgttattatatatttattttttatctatgaatttggacattacacttatctagattaataggagtagcttaaaaatattatattttagaatgaaggaagtattattttagaacattgaagacttttaagttgtgatgttttgacgaactaaatagttatatttataataaaagtattctgataatatgacatcttcgacatattgtaacttttctttctaaaaaagtataagctattaaagttggtactctacatgaactgtgtctggtgtaagtaaaaggaacggggagggagtatattgtaatttaatgtataaatgcctttgacaattgacatttttccccttcatgccaactttaatttgagaagagggacaaagtttcaaagaaaaactaaagtttttggcatatgttattcgtcctcctataaagaaaagccactcgctcgcatgtacgcaacaaagaacatttgaacatgcatgagcgcgcgcttccaggttccagcgattagtatacgctaattgcatgttagtatagttcatcacatctgagacccagatcagagaggaactattaatttggaccagatactattcactactagtatagtactccgtagtggttaatcatgcatatacctgggctctgacaatacaaatcatgttgtatttgaacgtgtatgcaataatgcatatactggcaattccacgacgagatacaatcatgctgtatttgaatgtttggagcgcgagaaatctctcttactatttttttttacgaaaactatactattttagtgaaattactgtatttcaaataggatgaaagaacattgagttcatttaaaattatagacaacattgtccaattttattaacgcattaaaaatttatatttgtactgtaaattgccaaagggctggtttggtttgaggcctaaattagacttaccaatatttggcaatttcaatagtgtttagtgtctatttggtttgaagccaaaatttgacatgcctaagaaaataggccatttcaatagtgaactcaaactattttggcttcaatacaaacacaactttgccttaccaaaattagtcatgctaaaacttgctaaaatttggcactgacaaaatttgataaggcctatttaggccacgaaccaaaccaacccaaagtgacaaaaactgttttttatgtacaagtttatgggccttctccaaatccggcccagttatatgtacatgggctggttagttattttgaacattggccaactttgtgggcttcctaattttttgctggtagtctccttccattcacgaatgattttgtagggagtttgtcaacatggatgccatctccaatgttgtgtatatcttgtaaacatcgtatatatgtttcttgatgaaagcagtaatgttttcaatggcgtgtatatattgtaatcatcgtatgttgcttgatgaaagtagtagttctttttattcaagtctgaataattgagctaattaccaaaagagaaagaaatatgaaaaataccatcacatataatagagatactacatgagttacacaatacgaatcatatgtcgatgacacattatacaatggtattttagactctgttttttgcgatggtattcggagtattgagcaaaagagatgccatcagattcaggcattcagctagccaccttggtcaacgagcacgctccagaaatgagccgcacatcgatatcgaatgggttaattgcatttagatatccagccactagcgactgtagctaggagccatgattaagcatatgatacatgcacgcaatgcaaagtaattaatggaagagagccacacatgacaagaacaaagcagaagcacatgcggatgtgtcgaccgatcttatggtgacagagacatgagaatttaatcagcattattgctcgacacacatatatcatcatttcaagacgattgtcaattctgaatgttttaaaagcctaatgtaaatttacatcaatgttcagatcatcatttaaatcattttatttacaaatgccctagctaaattaataatggttcgtgggtacttaccatctatggatcaatggctcatacacatgaacaaggtattcagaagattgggaggtagatcgttcaaaaaaaaagaatattgggaggttatttggcaatactaggactaggaagttcaaaagcatagtagttctagggtataagaaccacgttcaagtcgtttgttggtagtgtcagccaccatctagtgaagctctgatgactcctgtggtgtcatgaaaaccgtagacttatcctcctccacgtgtctaacaaaagtgtctcagaataaatgtgttgtaatataattaatatctagataaaaactacgactacctctgcttttaaataaagggtgatgctccggtgcactctacttgcagtattctactacaagtagaattaatctcgaccgtttatttaaaagggcaggtaagtaatctcctaatatagtttaggggtaattttggcatgggatgttttgttcggttcgcatcacatcaggttcggtggatgggcacggcaggcaccacaggcgattgctgcagcatggtgtcgtcgtctctcgccggcaagggccacagcgcggtgtacaccaccgacggggcacggttcgagggtgccattggtgtacctttgcacggtggttttcggcgagctcctcgccatgtctcaagaggaatttggcttcgccggcgatgatggcaggatcacgttgacgtgcgatgcatcagtgatagagtacgtcatgtgcttgattagcagagatgcctctgaagaggttgagagggcgttcttgagctccatggcaagttcttgccatagtgtcgaaggaatcagccattagttttccactgtgtcggagaatggcgagctgctcgggatcggatgccacggccggccgaggtaggtctccacactgctgccggcgggggcaccgcggaggaggtcggtgtcagcgtagatgctgcagtcctggaacgagaagcctgtggcgcgggactgggcggtgatggtgttctgctggccgcggagggggaagcgtgcgacgatgtcgcagtgctggaagacggcggtggcgtcgccgaagatgagttagatattgataaattatgataatacccctgcacgaattattatccctgaacgaatatacctttgtacatttctactaccactaactctggtgggagtagaaatagatcacaaccctacaattaaatataatgaacggctcagattgctttctactccaagtagaaagcaccggagcaggactcttaaatatatgatgtgtttgactcctgatgataataaattaatttgattattcatcttattaaaaatactactatatccatcctgaaatatataatataacttagctatatgtatttgcataaaagtatgtccgtatatatagctagaattgctatattttaagatgaagggagtatgtaaatatcacttattttatcattaaatatacttcaaatatgacttattcatatttatattaactttttaataagatgaatagtcaaaagtcaacaatttgtattttaaaacatatgtagtagtccctccatcacacaaagactttattgttacctttttcatttgtcccataatgccttcatttttaagacagttaatacatcaaagtttggaaaagtgaaacacaaatacattagagatttaaaaaagcgaggaacaaatgtattggagttcgaaaaaaatggagagcattttagtcttttgactttatattggtatgtgtgagataggaaaataatgaagtttttttttacagaggtagtagcaccatattactatagtatagccatattaatataaggccgatcgatatacacataatcatttaaaaggcgatctcacggtcagtcaaggtgcaatggccctttcatcaatcaggcccatatggccatatgcataatgcataatgctggttagcccaaaagtgatgaattcaacataagctagctagccagccagctctgccttcacgtactcaagccagctgaaagactcctgccatctctctctctagatcgatctcaacatgtgtaatgatcatgccaaaattgaaattaaaggaaacttgcaaatatacctattacacaacagttgatctatcatctgtgaacgtccttttgatgagatggtccgaaagatagagaaattggggcacctctatgcatatgcatggtcccggcagattcagagatgaaaaagtctcagaaataaaggtagctaggccaccatgagatcgagggcggccatgatgagagagattaagcttaagggtaccattatattatattgcacctttagtttctttagtaaccaacagctaactgcagctccaaaggtaatcatgagatcacacagagttggaagctaccaagcaagtaagctcagttgattgattattcttcactccgttccaaaatatagcaacgtaatacaggatgggatacatctcgatactaagaaatccctattcagatttatattactagaatatgtctcattttatattaggtcgttatatatttttaaacggatggagtaacgttcatgtatgaagcataggtcgtttgtgcaatatatatgtatgcacatatatgaagccaattacacaccggcctagctagctattcggtagacattgttgtttcccccttttttctgattgctgattataatatatattccaataattaagttagcttggcagtttggtgcaagtcaaaaaagttggctgatcttcatgaataggctagaaatattccagacattagttaggttggcactctcaacacattgcaacttcattttcattctactgtgtgttgggctggcctttttatagtttttgatatactcgatttgtaattcacttggttaatcagtctcctaagaatagtagaatcgtagagctatttttagatctttattattattaaatatcattcaatgtagaaatatatacgtagcaattactccctccattataaaatataaagatttctaggttgttta

SEQ ID NO: 25841 - DNA, 17990 bp, Oryza sativa
aaataatacttcctccgtttcacaatgtaagactttctagcattatccatattcatttagatggtaatgaatctagacatatgtatgtgtttaaattcattaacatctatatgtatatggacaatgctagaaagtcttacattatgaaacggagggaatactaaataagagacactttggtgtttttcttcactagtaaattttcttagattgcttagagaaatcaagtctttttagacgtatagggagtattaattcctgtctgagtaatgaccaaattactgtagatattacaatactcccttatttcataatactttactaattttgattggctttgttttattttgtccaccgctgacttataaataaattcaagagtattcaaaacctaccatattattgaagtatgttagacaataaatatatccgttcatcataacaaacgatttgaaagttcgtcaaactaattaaaagtaaaacagtgacaatcaaaattatattgataggtatagtgaaacagagaaatggagtattagccgttccgtattataattagtcgtttaaggttcaagtttgacgaagatcatagaaaacgcagtaacatttataacatcgaataagtttcattaaatccaatatttccgttgtatatttgtcttgtgttgagaatgctgctatatttttctatataaacttgttaaaaattaatgaaacttaatttaggataaatcgaaaacttctttttcttacacaatctaaaacgtcttacaatattcataaaagagggagtatcgaaaaactaattaagtgcgtatttttcgtgttaattaactaattaaggatagaagtggcctctgtgcgcatgcatatcttttgcaatcaatcgagatgatggccgatcagtgtaactagctgtcgtgttgagatcttctatatatcgtcggccaatgataaggggacatccgtgttaggaaacgatagacgaacaaacgataaaaaacaatagatcaattacaaaagacatgagatttaacgtggaaaaccctctcaaaacaggagaaaaaaaaccacgggcgctagccagcaaaatatttcactatatctgaggtgaggttacatcgccgcacggcggcttacaagaggtatatatatagtggaaccctaaaagggatgatgatccgtacggcagaagctggcctttattaagtgtaaatgaatttggatcacaactcaacaatccggacatgcatggatcgttgatcattggccaactttgcatgcatgggccacgtctcctagtactaagctccaaccgcatcgatcgatctggctagctatctgctatagagatcaccaaggccggccctggggcagtacgaacggtgcgaccgtaatgggcctctaaaaattaggggcctccaaaatatgtatactatggtattaggcttgaaattcgttaatgacaatgagtttttaaatattatcttgtttttttatggtgaatgggggcctttattttttttccgcaccgggccaccaaaaagtcagggccggccctggagatcacagcaatatatattatcagaaatgattattcagaagatatacatacataatctgtacttccatgtctttgacgactctctgtctcactgcctagccaagccatgcagtagtagattcagagagatatagcaaagatctaaataaactagacaaaactctaaccctttttatatatatgtatgacaaaaagttttagtgagatctttataagagctctcataattctggtaccagtagtggagactcgagcccttgccgtccttatattagatcatcccctggagccatgcatgcagagataatatatacactaaactccgatcttttcatacatgaatatattagtagaaaatcatagctcgtagtactaagaacatgtaatattccatattatgtttatttattttggagcacaatgaacaatcagaatatttatatatacaatagatctctcctacgtatctaaacctaattggtacttgctaaaaactggtcgtacgtacgttaaaaaatatctgaccattttagatggatcatattaacatgatctatatgcatttaacttttcaggtcatgttaaaaacttatctattctacatctacatattgtgggagtttatacttcatgatgaatgtttttttttataatgggaatttataaaacccggcttcaaactggatacaacggggtttttattgattccaaattctagactaagcaaaatgtcggtaagctacaactaagattacaaactgagtacaactcaatatttattaattcagaattatgaaaccattcagttttgctatataattgtcgataaattttcttctagaaatttaacatatataattatagtactatcatgatataattacattgtaatttacatataactataatataacttgtacgcaactttcacaaaaaatttgaattggtagatttgtttcaagattcttaccggcaaggaaggaaaaaaaatcaaattgtgcgtacatgtgagaggattcggttgacctccatttcacgaaaatagcatgctacgaagagatttttaaaagttacatacaagtgacattgtagttacaatgtaattacaactcgattgtaccataattacatctgtcaaatttctagaagaaaagttgtcgacaaatgtatatgtgacctcaaaaaattaaaaaaaaaatatttcaaatgtcaataacaatagctgtgcgacacacggttttacgactatgaaatacaagaaagaagagatcgggaatacaaataagctcagatatatgtgtagttgttatcacttgtttatatcagtggcatggccgctcgtgtgctgctagctgcatgccccatccatatattgcatacatacacacatgctagctactctcatcactctaaattctaaaatacacacgacaagacagtacaaatcgacgagcgtcttctttataaatcaatagccagcctgcaccacagcctgtgcccatccaattaactacaagaccccagttcatccagtggatcgatcgatcagagctagctagatcgagagatcacaattcagaagcaaatcaatcaagcatcgatcgatcgatcgacatggcgtcggagaaggtggagacgatcgtggcgggcaactacgtcgagatggagcgtgaaggcgccgccaccgccggcgaaggcgtcggcggagccgcggcggcgtcgggcaggcggcgcggcaagctcgccgtctccagcctcttctggcacggcggctccgtctacgacgcctggttcagctgcgcctccaaccaggttcaatccgtcgtcatatgacatgacatgacactctcatggcgatcactacgatcgatcttgacgtcatcaatggcgtgattctgtgcaggtggcgcaggtgctgctgacgctgccctactccttctcgcagctgggcatggcgtccggggtggcgttccaggtgttctacgggctgatggggtcgtggacggcctacctcatcagcgtgctctacgtcgagtaccggacgcggcgggagcgcgacaaggtggacttccgcaaccatgtcatccagtggttcgaggtgctcgacggcctcctcggccgccattggcgcaacgccggcctcctcttcaactgcaccttcctcctcttcggctccgtcatccagctcatcgcctgcgccagcaacatctactacatcaacgaccgcctcgacaagcggacatggacctacatcttcggggcttgctgcgccaccacggtgttcgtcccgtccttccacaactaccgcgtctggtccttcctcggcctcctcatgacgtcctacaccgcgtggtacctcaccgtcgccgccgtcgtgcacggcaaggtggatggggcggcgccgcgcgccgggccgagcaagacgatggtgctctacttcaccggcgccaccaacatcctctacacgttcggcggccacgccgtgacggtggagatcatgcacgccatgtggaggccgcggcggttcaagatgatctacctccccgcgacggcgtacgtgctgacgctgacgctgccgtcggcggcggcgatgtactgggcgttcggggacgcgctgctggaccactccaacgccttcgcgctgctgccgcggacgccgtggcgcgacgccgcggtggtgctcatgctcatccaccagttcatcaccttcggcttcgcctgcacgccgctctacttcgtgtgggagaaggccatcggcgtcacggcggcgccggcgtgctcccccgcgcggcggcgaggctccccgtcgtgctccccatctggttcctcgccgtcatcttccccttctttggccccatcaactccaccgtcggatccttcctcgtcagcttcaccgtctacatcatcccggcgatggcgcacatggcgacgttcgcgccggcggccgccagggagaacgccgtcgagccgccgccgcgcgcgctcggcggctggccggggacgttcgccaacaactgcttcgtcgtcgcgtgggtgctcgtcgtcggcttcggcttcggcggatgggcgagcacggtcaacttcgttcgccaagttacaacctttggcctcttcacaaagtgctacaagtgccctccaagacactagaattttaatttttttgaccatggttaatttcttgatgagaagttaattaatcctgctacctactgttgcataattgcattaatgcacagagagagaagaaaaaaaaagttgagagattgcatgcgagcttcatcatctatcttaatcttccatggcgatcgagctcatggcattgttgattatgattagtgtctgtgaggagagagattaattcctgtatgtatgtatgtatgtatgtgtgtatgtgtgtatgattgatgatgatatatgatggatcgaattgaactatatgtatctctctgaatcataggtgtgatgcatgttcagttaggtttttttttgttggcgtttcatttctttcctaattaatttgatagaaatggatatagcttctgtgatgcaatgttgtgcatgcctctgtcttttaaacaagtattggagattcagattcctactagtaagtgaacaagtattattgcaagcaagttttcaacttttcatgccgtggcagtactcaatttagaagtgcacatatgtttgggtgtatcaaatcaaatggtcctaccaatacaccaatgctaatggcctcctttgatcctttacaatgcagagacatccaatggtgctgatgatgctgttaactgatgatcatacccacatccctcaaggacaatcacacttgaagaatcacatgactgacagagagggcaaaaagcttaatctgcatgcagtctgcaagctttgcagatcagaggaagaacctgcatgcaggcctgcatttgcatccatgcatgcaatggtccaccttttgtcccagaaaaggtgatactgaattctaattacaaaagggtaaaggaagataagtatacatcaactgaagctgatgctacaaagctgtggtccatgtccttactgtgatgtgaagaaaggactagcttggagaccatatgtgtgcatctagtcccataaagtcatatatgatatatgatatatgcatgcatggatgcagccacaggacaaaggaggtccaggactgaataaacaaagtagtaattctcagcttctcatatggttgcatcatgagggctctgtagtttggatctgtggtaagattttaggataagttaataagaatcctaatgcattgagccagctaactgggcagttaaagatgttgcaaggtcagaaatttccagtttttcagacgtgttaaaaatgttgcagttaaaaatgttgcaacaattattccaaaaaaaaatgttgcaacatctgaaatctgcaatgcaatgcaatgtattggatcatgcaccatcagcaatgtgttaaattttttttaacatttttaacacattgcattgaaaatttcaggtttatgttaactgctcccaagatttcaggaaatttgcaggtggggaacatgagatgacatgaaacacattgcattgcatagaaacggtataatatctcaaactctactgttctaatagaagaaaaaaaatatccacaatgaaacaaagcaagaggcattattgagttaagtagcttcaagtgtctgaattgttcttcggtcagagcatggacagcttccatgggcacttgtcagacaaacacctctctctctctctgcagaaacgctaacagctagatgacaacggattgtgggaggaagacgaacaccaaacaggaaaacactccacggcatgagctgccttccatcaccacaactgtttcgatcggatgggttctgaactctgaacatttctgaagaaaaacgaacaaggagttgctgccaaattaatcacccctagcttagctcgtctctaccttgagctcaactgtttgttcagctagactccagatgccttggatcatgtgccgtggcggtacgttccggcctcggtagccgcgccgtctcctcggcgtctgtagcggccgtcgtcgcccgccttcttctccgtctccggtgggccgtccggggacagtgatcatattcagcaagctggatgcatgcaatgccagtgcagtgcaaaacagcaaaagttcagagatgcagcaagagcctacaattttcagacttcacctccttgtcctgatgcctgaacacactgtcaacaggaaaattcctttctggtgatggtgatcagtgttctgttgcttgtgcagtgcaggatgattgagttgcagtagccatggataagatgtggggtttagctctgaaaactctgaagttatgtgttaaccgtttcagattagtataggctgctatatgatcctagtaataattagggaaatctttagtctttaccatcctttaaaaaaaaagtatcggaagatattatatttttctaatgaaaaacttggtacctatagatactaggtatcttgaggtataaaaatttttagtgtaaaatttctctactaattaacaaagactttttcaagtaaggtaaaatttctccactaattaaccttgccagagagaatgctactgctgcaagactaagaaattagtagaagaattatcatcagttgattcttatctcaatcaaaatgacaatcagaaagcttgttagaccaaataacttggtaatctgctaaataacctttttctctctctttctgtttgagaaagaacatcatgttagctgacagaaggagacattgcaagaaccaaaagaatggaaaagaacagaatgcatcaacgaaatcacaggatacatagcccagttgcagagaacgccaacaggaggcagcaagagcaagatgctttataaattgcaagaaataaacactgcagcaggaacaagcagacatccctgcatgcatcttcagtgcatccatccacgagcactgattatttagatcctgacatgtctgccgttccatggacacacaaagaacaggttaaatattttgattagcccagcactaactaaccacagctgttgagcttaagcctggcaggtacagtacatgccaagcaatgctacaagcactagcattttcaggccagagactgcagggtgattaagcaacactcccagtgtctctacaagtctaatgtcagaattcagatctaggagaagctcccttttttctcaagtacgtgtcagtgtgtgtgtgatcatcttttttcttttctgtgacaataattgagaagggtccaatctgcaatatgtgaaccccaagattcctcaggtaaatggcaaataggaaagcttaatggtagaagtggttcaaagttcaaaccaacatgcatacagacttgtcatttccaaccatgccactaacatccaaagacacacatattgaacaataccactgtaaagcatatattaaacaatattactgatacagctcaggataacaaaatgtaacacaaaggaatttgttttgtcccgttattcttggaatactgggccagaactatttatggattattcgcgccacactttcaaaagtattacttaggctacttattctaagatatacttgttaggtttataaaatataattatttgattcatttcctataaacaaatcgatcatccatcatcctacatccgcatttcatctagaaagaattggcatcgcgccaccccaatgttgactaagtagagctcaagttttatttgatggcttgcatatccatgtttcttaggttcaaaggaacaagaatgttcaacaaaattggagcccttttgatctaccatgaatgaacttcaaatgcatcactatatccaagctgaaagccatcacaaacctccttaagctgcatggctcaccaataatgccactgaaaagctgaacttctccatgtccctcgagcattggaagatcacatctgacagacaaatcaaaaccactgaccaattctgatatggcaacttctattgttgcctccactcctctacaaacaattccaaaagacatttatgtatcttggattatgaaagctgccattaatgttttaccagaaaatgtagcctactaaaaagaaaggccaattacacacattatgatatgtttattttttttctggaacataacaaactattcctaattttatttgcctttttttgggggttgtgatattactcacaagtcacaacatagtgcatgtacacttcagttcactgaactgagtaatgatgttctttcagttacaatgctgtacctaatttgacagttctcctgaccagtgaacaccaaagattttcgaatcaacagcaaacaatttacatagattaaatttacatatggcttctgaacggaagagcagctacttctaggagcaagagaacttaagacagaattacaccttgttttgagtgtttactgtgtagtcagcagggtcacttcatatttgacttcacttgcaaatacagtgactgatccaaagcagtagactccagcttttgagcaaagcatgaatgaatgtccagaagatgattctcaaaagtcattgttttcaatggctgtcctacaaaagacgaactgtatcgctgcattcagttgcgattaaaaatctgaagagcttatgaattgaattgcctatgcttgctgttggtatcatcaccaagatacaatctttagagtttcagtatctgaactgccacgtttggagaaagaacttccggagaaatgatctggatcattcttaagatgtccaaggcagatgcattggtgttaactggactgagcttctcaacaattaagcttgagactaactaaagctggatgagcccaacatcaactcaaacatgtcatctggggtaagaagggttgttccccaagaataagctccacatcaggtctgctgctgtctgatattgccttcatgacttcccggaccttgcatagaaaagatcatttaatttgttaaagatttactttttcacactgcgatatatactttgccaacacataagcacaaattgcacagagaaaaggaacaatcatagatgggaaaagttgcagatagtccaaatactctctccatcccaaattgatcgtataatgtttgtgtaccaagacctaggataatttaaaccgcattgattaagacgccatgcacaatatgcacatattctcccacagtgcatgcattgattaaaacataatgcacaaatatacacattctcccatgttgtattaattgcactccgatgaaatccgtgtccatgcggttataagatgatcaatttgagaaattttagtttctattatatgatgatcaatttggggagggagtaacaagcactggataatcagttaaaaaatattggataatccacacccaacggatattgatataccaatacaaccatccatatccctttccatatctcctccaatatagaaaggttccttaccattctaacaaatgttttggcggcagattggatcagacattatatgtaccttctttacaaagagaactttttgcaagttccttttagttctattgtggtttgtaatctcttatttggatgagtgcaattttatgcgcttttcaaagtgcactaactaaaacctcatgttttctacatgggaatgtaacctgatattttgaagataggaatcgtgtaccaactgatggttctgaaagtgccacactaccagtacactagcaaaacatagaaaatataggtcaaatttgaggattcttactgtagttttaaacaaaataaacaaatatttatatttaaacaccaaacagtataatagaaacacagcttcaataatgccatactggtatgattgaatacttgaaaccaaagaatatggaccatacctcaagggcattgatgcctcccacaacaaaaacgatgagaatgctttggtcgccaaagcttggtttagactgcagatagtattgagtgtgagaaaggatagctacagagtggtggcaaaggaaccaaggaagtacaaactaataactcacctgtcctagcccaaacctccccagtccacttttaaataaacgtccaacagctgatgagtgatattcaaggccaggaatgtcataccttgccaagacagctaatagcaacttatagagcaagccttttcttgagtatatgtcagtctcaaatctgctcagtgctgctaggccttctccaagagtttggttccttaacctcatactggacaaattgtgaaagaacttaaaaagctggtcaactctgtctcgtacttccaacttaagttgcatgtccccataagcttcatccttctgatcatcagtattatcatcatcatcaccccagctatcccattggtcatcaaaatcatcagtactcttagaagcttcgatggagtcattacttttgtcaccatctttaggtctagctttagcttcaagctcattctccaagccaacaagaaatctgagcttcacagatgatggcctgtcaaggatagagtccaccacaatatctttcaaagaccgctcgtcttcccaagagaatggaccaccagcaatcgatgtaggaaaattttcaccagccaagatatacccgataattgttagaagcaaaacatcctggaaacttagaaggccctgagaggactcagttttattagcttgcttgtgagattcaactgaagtgctagtgttgataaaatcacgaagctcactggcaagactttgagttgtctctgcagatgttacacttaatattctctctgcacttgtaaaggcatcccagcgagaactttgaggctcctggagagccatttcagcagccagtgccaattggataacccctctgtttcttactaaggataactggtctcgagagagcatttgaaccatagaatgaagctctgaaacagaggcagctccttgccgacctttggatgggaaggataacttctcatgttgtaaagcttccataagccatttcttaatcaacattaacccatcttttgctcctctgtcgagtaatgattccaagtagcacactccagcataattggataggaatgaaccatttaaactaccatgttgactgctgagtttgtcatcatgagctttatccgcgtaatcaggtagccaggttacttcagattcaacttcagcagagttccatccagacacaaatgacatgatactttcgggtaacatactggtcctactcttaggttcttccttgctgaagaccttttcaaaagggacctttatatctagtgggatacgtttaacagtagcttcagaatgcttgcttggagtttgtggatttttggacacaaaataggatgaagtcccttccttgcgtgtcaaggaggacagcatcctatcaagaaatgagtcaccgtggaaacaaggagtaaggagatcaagtgtacgatctacgatcagcaggccagcagatctcttattacgaccaacatcatatagacttgacatatccatcatcagcttcccgatgacctttgatgtatctccaagtgaaaatatatcgagctttaggtccatctacacatgttttgtaatacggatcactaagtggttatatgaatgaaaaataagaagccactagtaagaaatatgttcttatgataaatctttaccttactggccagatggtaaaggaactgggcagtcaatgtcactccggggggaatctcatcaccatcaaaagatctaccagtagatatgggaggtagccctggactaagggaatcttcatgatggtttgataaacatgattcagccattgtgccttcagatggcaaaacaaaagtcctagaggaaataggagagaaaatcatcggaaagtgagtcacagttacagataatctttttcctttagtttctagctggcttgactcatcagcaaacaaatccttttttgttgggctagattcagaattagagccataatgcaccccagattcccaattggagtatctaccaccatccgatgtgaaatcttttcctgtgtaaaaagtggtatctttgtgctcatctgacttttcatacttcttcagaagttcctcatggtcctgagtaagtaatgtctcatactcccggaaggcatctggtccaaatggggaatcaacatatgctgagtgaccaacctgcaatatatcacaaatgattcaaatcctgcttgcagaacttaagatgattttgctttcaataaaaaaactcttaagttttgcaaaaagaaaaaaaaatcttataatatgggttgaagcaagattgctgtttatcaacatttggttgagcaccacagaagttaccacaggttgcaaacaaaacaaagtccacaaattagctcatactaatacactcatatgtgttcagctatactatgtacaacaaataattcaagaggacattaagattattcatacaataaataatggtttagataagcttccaaatggacaacatgcaacaatacaaactacatacatgagtgttgagaccatcccctggagaaaggataaatcaaacaatccagatatagtatatgataccttcatgataatatggaaactaacatggactatgtacctttttcaaaggaaattaaataggaacttaagccccaggcaaaaaataaaataaaataaaatctaaagccattttgatgtgaacagaagataattgtaggaaaataatggctggatgttcaagcatttcagaagcaatacaggcatcaaagtaacaaattcttgcaggaatgaagtacctcggaaatagctgtcaacacagtacaatgtgaaatagttccatggtttcccaggcagcgcaaaatataccgatgtgcatcactaagcaggcgtgatgtaatcactactatcttccttgctggatgtgcaaaacttgagtgccattcagcagcctgccaaacacaagttacggcattttgatcatgtaaagaacaggatggcacatttgtcattaaaaaaaagcataattttttcttactttttgtacatgaacaaagaaaattatggttttatataagaaaatatgagtttgacactaaggttaacatgaaggctgttaggtgcactgcttctcatctataagaagttcagaatgaaaaagaaatatgaagtacagaaattcaagatgtcataggaccaaaaaggtagtccctccataccataatataaattgaattttatttgctaatagtatcattggattgacatttgaatacactttcaaatggctataattttgttcctacaaactttatagtatatgagaaattatgagtcaaagattagttttggagaccgtgacgagtttgaccatgccttatattttgggatagagggagtagtccttagctctaagttgacacaaatcaagaaacaaatgccacttgcaactatggtttcttcctaaactttgccactcatgtgccagacacacactaaaaatgcttgagctttggtgcactcaacatgctgcattcagtttgacacataaattactactgagcagacaacattgcaacttttgggaggcattgctattagcttactggctaactaccttgggaggtagtatgcattattaccatatctattctttattactagtataattaattgacttttatggcaagggatttaagtaatctcacagcatcaagcggagatgcattctccaagctgcaaattgcacgagcaccaagctcaagaagcaaggggaaagctccaataaactgaaacgcctccagagtgcctgcatcaaggtacactagtgcatctgcaatctcatctccaatctgcaaagcagcaacagaccaaaaaaagaacataaatttctatagtgaaagccacgaagataaagtccattagttttacatgcaaatcatcaaataggaatttgttttctcaaagttatccacagcttaagttaatcacgaacgaataacagcgacttgtcagctcagaagctaaaaggataaatctttaccaagttaagcagctcctgtaatttatcgttttggaacgagaaagaaatacggtcaggaagctgtaaagatgggtttttttttaaagaacaatttcatcgctccaatagtccaattaaacgcagtagtctcatattcatctccaaagtgcaaaattcagataattagaaactgaaaattctgggaatcttcttacacattcagtttaacccggacaaaattaatctcttacatgataataaaaagaaatcgaacaaacaatgaggaatccgagcaggcaaggtaagagagagaagtcgcgaagagatccgacctggcggatggagtcgaggcaggcggcgatcagatccaccgaccccatagtccactatcccctgagatcccaggaatcttttcgccgccacgcccccaccctccccgtgcgccggcgacgcggtagcgaggatgggaggggagacaccagccgtaaagaactcggtggggttgggggtgttcggcgctgccgctcgccggagatgccgccggtggtgtcggatgaatcgcggcggcggaggagacgagacgagacgacggcgagagagagaagagaagacgaaaggattagtaggcccgtttggagtatccggcccgacccatctgatttgggcccagtaagcaaacgctcatgggtgtcgaccaattgaaaaggaactttctactgcatatccgtttcatattaaaagacacttttaatttttttccagtaaaactcttttttgagtttgatcgaagcttattaaaaatatatagtaatatccacaacgctaaataaatttgtttcattaaattttacattgaatatattttgataatatgttttgttttgtgttactatatgtttttaggcaaacttagtgaaactttaaaatgtatgactaaaaaaatatacaaaacgttatgaaaggaaactagtacgtacctccgtcgcataatataaggtaatgtttggtttggggacaaggtgggatgggttagctccatctctatttttgaatgggatgattatgtttttttgtttggttacagggatggaacgaaccctgttttttaatttggtttgaggaatataatgggatggaatgatcctatacattgtttggatggagggatgaaggtgggatgcctgatagggctacctattgatattagttggtgaagttacccccaactagtcatgaacaccatacagtgcaaaataatacttagtcatgaacaccacactatttaaaaatgaccattgtgaattccaatttcgtttgttcacaaacaatatagctccataagttattaaaaaaatttaataaaacttcatgtatgcccaaaataattgctgcagcagcagcagaagcttcacagtgcacatataatacaagccacacataataatagcaaattttagtcttacatatattagcaacttaaggtcttcacatttaattcttgcacatgatagcaattttaagtcttactcgtactagtaagttctctgcctcaaacatattggcagtttaaagtcttacataataggtaaataagccaaccaacaacacataacaccaaaagaactatccaactcatccaagaagcctatgttgatccagggaacttttcactaatgaacatagcaaaccaatgcatcttgttttcaaatggaagtccatcgaaagctctagcaatgtgagggtgagcagccaaatgagcatagtaaaatgatctatggacctcctcaaaaccaggaagggttcccaatatgtcaaataaaccttttggaagcttattgtccgggtcggctacctttagtatagcagaggcaagcttgtcaccaacactagtgaatgcaccaatcagcccgtcatcttcattctcttgtgtttttgctttctttggcttacttgcagatgatgcctccgcacgatcatcagtaggggcaggaccatcattttcttcatcattgtcatcttgaacatcctctgttcctaggactgaacttgagtcctttgcatactttcctgtagccatggtgctaccaaatattgtaagcatctcaccatagtgtgcaagaggtttgttaaaataatctgcattagccttgtgatccttcatgaaacaaaagttattgtataagaaaatgcaataaaaagttataaaaataaaacaaagaacccacaaggtaagacatatacctcaatataaccattatagtgctcatcatcaagagtaataatgaaaattttctcatcccaactagccagcactcactttcctaagcctatttatctttgaaaactttctttgccgtgtcttcaaatggttcttaatttgctcacccgtgaaagtactattgaacctttcattgaccgccctagcacatgcattgagatggactgccttgaagccagatgaggtccttgtgccaccagcaacaacattaactaggtgagaaaacatgaaagaggacatagctgaggtccatgaagcatgggtgcttcctcccttgccaaaatgaaacaaaaatgtccattcagtaatatatatatatatgtatatatatatatatatatatatatatatatatatatatatatatatatatatatatatatatattaataaaatatgcatgcaacaatatatcaactcagaaaataaccattcagcaatatatctaataaaaaaattcagaattcagcaacatatcaacccagaaaatgaccattcagcaatatatcaccccaaaaatttcccattccccaacatatcaacccaatatatgagcattcggcaatatatctccttaaaaatttcccattccccaacatatcaaaccaaaatatgagcattcaacaatatatcaacccaaaaaattaccattcaccaacatatcaaaccagaatggaaaaagtacgaattacccccccgaactatcgcggtcatccgaattacccccccgaaccataaaaccggacattcttcacccccaactataaataccggacgaattaccccctcgacccaatccgcggtagttttggtctacgtggcgtacacgtggcagtccagtcaacattctctttataaaaaaatgtgggacccacttgtcttacactactctctcctctctctactctctctctctctctctcacttctctctctcacttctccaggcgatggcggatgcggagaggccagcacggcggctaggcagcggcgagcgcggcggagaggcgagagcggtgaagaggcgagcgcgacggcgaggcaaaggcgagcgcggcggagagacgaggc

SEQ ID NO: 25842 - DNA, 14407 bp, Oryza sativa
  unsure (1)..(14407): unsure at all n locations
cgaggaggcggcgcgagatgagaaggcggcaatgtcgtccccccaccaaccgcctcaccgccgctgccgcctcgcttcctccgccgtcgcgctcgcctactccgcacacatagncgctgctcgcctnctcctcttctggcgacgccgcacgctcgcctcggctcgcctcctcgggcgtccattgccggccctcgcgtgccgaccgcccgcgtcgccgcccgtcgccagacctcgcgagccgaccacccgcgccgcggtccgtcgccgggcctcacgagccgaccggccgcacccgcgcccgtcggggtcgacgccgtggccgtcttctccttcgtcggctccacgtccgctgcagatcgatcgaacgacgacgacgtcgcctctgcctgggccctgacgacgagcgcgacagcacaccggcgaggcgggaagccaaccgcggcgcggccagcagcacgcgctcgccgccgctccccccgcccccgcccccgcccccgggccggcgaccgacacgatgttcttgattaggttcggccgccgcgccgacacgacaagagggctcgccgccggctattccgccgccgccgactgttccgccgccaccggcgcctattctgtcgcctgcctcagtgcgccagggagcgagagaaagagagaggggaaggggtgaagagaaaggggataagaagagggattgggctgacaagtgggtcccatattttattttatctgttttggctgactagactgccacatatgcgtccacgtaggaccaaaaccaccctgaatcgatctagggggtaattcatccgatttacaaagtatagggtcaaaaataactggtactgaagtttagggtggtaaatcggacaaccgcaattgttcaggggggtaattcgtactttttctaaccagaatatgagcattcagtaatatatcaacccaaaaaattaccattcaccaacatatcaaaccaaaatatgagtattcagcaatatatcaacccaaaaaattaccattcaccaacatatcaacccagaatatgagcatccaggaacatattaacctagaaattcaacattcatcaattcatcaaactagaaattcagcatacaacaatacatttatccatacaactgacatttggcaaatggactacaacaagctgtccacgcgaattaaataaataaaaaagttcataatacaaatgaaatgtagcaaataaggtagaaatacaagttgcatggctacatattacactccatgatggttattacagtcagcccacatctgatcagttaaacgatgcctgaactgaaccatcaatgcatggtcattcgcttggccggttgacgattcatcaatgtcctcacttgtccaatcagacgggatgagtgtctaaggttgaacaactccttctcattttgcaccggattattctcccactctttcaagtggtaccgcacagcacgaaaaggaggcaagaatccttgtttggctccatatccagcatcaactagatagaattttcctatcatatgatcgataagttggtcacattcctaaatatcaacatttgtcatggagaatttgataaactatagtaatatattaccttgtgggacatgaaggccattttcacgttccaaagcatctcttaaaactacagcatcatgtgttgtcccctccgaaccagccaagacataagtaaaccgaagatcaaaatctacggccgccattacattttgagtggcatgggacttcctaccacgaaaagaagactccacattcttacgaacagaggctctaatatgtgtgccattaatagctcaaatacaatcctattttgtgttcaacaacattaaaaattagggacaatatatcaatgttcacataaatataaaatgagatagggatgaatctcacaccttaaagtaaggatcccatctaggatttcctgctattttagttggagtgtccaatgagggggggtctgataagttcatctcgtagctcaccaattgcatgaaggactttgttgaaataacgacttactgtttctccagacctatcataattagtgcggactaacctatttctaaggttatgccccaccgtatgcagaaacatagcaacttgttcctcaatacacatgtggatggtatcttcaagtaaaccacgatccttaaacagcttacaaaaacgaaaaaaactttctcttctaagtctaagcatatcgatacaagttgtatcattcctcctctagggactcaattcttatcctatccctttcaaccattgggccatatctaataccttctccttaacctcttgttctttttctagaccgaataatcatggccatcattgataacaataaatttatagcagcaatacaaactaaaagcttggtcctcttatccttctagatccaccaccaaaaataacacatgaccatcatctactgtcaataaatttacccaaaaaaataacattgttgaactaattatactacaacattcttgaacaaaaacagacatgcacagatctataaatgaaatccccattcagtgtagggatggagaggatgaagattttttaccttgaacaatggaaaccgagctctgcagtttgtgggtagggatggagaggatgagggagagcagcaaccggcaatggaggaggcacgcgcgccgtcggctcgccccaacttccgcagccgcctcgcccttctcgcgccaccgccactaatcctaaccctagaggctatcgtgaggaggagaaaagagcaaagggaaaaaagaaaagtggtgaaaatatgtggtgggacgcgagcgttaccgcgctgaggcacgtaaaatcacgagcgaggaagtgggatggcacggtccgccaaattttcgcggatgaagcggtaccgaatattgaaggaatattcccttttggaaccatcccatcccttctagcctctcaaccaaacacatctaaaaataggatgatcccatcccatcccgggatatccctccaaacaaacactacctaagagattgtgggtgaatgtgcctcatcctagtacaatgaataccgtacgtatgtccagattcattgtaataggatgtgtgtcacatccacccaaaatctcttatattataggacggagggagtataaatttataatcgtagggggaactacactatatggagccaattgaaagtacacttgtagcttttttttagaacaattgtaatttatacaaacttcaaatttcattatatatatatatttgactacttttatagcggtatgcttatgtagaaataagatatctactgcgcattataatatactagaccaaccaaacaacgatttttttatatatatgttaaaaactcaacctagacaggatgtgacccatacggccatgtaacgaatctggacaaccatctgtccatattcgttatactaggaggccacatcactttctagaccgccaaatagttagaagtgggtatcatcagggatcaatgggctagctcatgataaactatttaatccatgtattttttttgttttcgttcaattggcttactgtcaattgacgaatgacgacatacgaatggaaggagaattgacataacaactacttcttccgttttatattataagactttctagcattacccacatgggtgcctagattcattaacatatatatgaatgtgggcaatactgtaaagccttataacctgaaacggaggtagtagattacaatttaaattaatacggaaaatatcactttgtgcatatgggaaattttaatttccctatcattggtgcactacacatatatagataacggcaagcatatataggataatcatatcagttgcagagaataaccaaatgtttactccggttcactaataagaatgctaattaatgagcaaattaacactaaagaacagctcttgttcttatgcttacatatcctatcttactataaagttatcccccattaactccttaagcttaacatacaaagatgtcacatcatcatccactaacaagatgccacatcatcatccactaattaacaagatgccacatcatcatccactaacaatcatcacatttaaacatcatgcaaacatgctatatctttatagtttttataatttaagagcttttcaaatacaaacatgttaaattatcatccaacataattcacataatgtttcaatgtatatctttattatgttttatgatatcctatatacttatatagttcatcctcacttagttagtgcttaaatgattaatctatggtccaaattatctttttccttttttcctctaattaagtcatatcacatcaattgtttttagcctttagatgattaatctacggtctaaactatctccctacttttcttcttccataaaatcataccaccttacttttacgcttgaatcactattctacatactatttaaatttaaattatcataaaccacattaatttacttaatctaatgttatctagctatcttacacgctgtttttttattgttatcatactaaattcccgcagcaatgcgcggggtttcacctagtatatagctacatgtgcatgttcctattccactattattacatacattacacaacagttctgcaagtacttgattttgtactacaaaagacatgagtattcaaataagtaatgaacaccttagcatgtgtttggtatggggataaggtgggatgggttaggtccatccctgttttattgggttgagatgattctattttttatttggttggaggaatagaacgaaccatattttttttgtttggtttgagggaaaaatatgtttggtttgagggatataatgggtagaatgatcatattccttctttggatgaatggatggagccaggctccgtggatatagacacctttggtgagattacttctcacacaatatacatataacaaagaaataatttttgagtaaacatgagtttagcaaacatatatactactatttgaaaacgatatatttgcggcagcaacaaaaatctaccgtgtcatgctcattgcggcgctggcggagtgggtcggcgcggtacgaccatttttcatggatcgactggtcccagatattagtggaatattctcttttggagccaacccatcccacctagtcccacaactaaacacctatgaaagtgggtgttgggtttagtgctacatcggtaattgatgatgggggagcacggcttaaaagatgggggtggtcctcactagggctgaaaacggtacgaaaactttccggattccggacctattttcaaaaacggaatctgtcggttttttcggaaacgaattcgaaaatattttctcggaaacagaatcaaaaatgataaaggcagtttccgtcggaacttggaatcggtcggaaactttccggaaattttctcggaatttccggaattttttttggaatttccagaaattttgtaactaaaatatactgggttctttttttaagcacttaatagtgaataccatggtattttgctgttattttcttgaaaatatttttttatgcaaatctaaaattacataagaatattttttccttcattgggattttccaacatcattactctcttaaacatagataatttatttcatagattgtgttttgtgatgtactgttaatacttaataattggacttatatgattgtgttttatgatgaatcgttgaccgttgagacttgagaattggatttatcagtttgaggggttttttattccgataaattttcgttaccgtatttacgccggttcgttttcgctccgttttcggtttcgataatattcagttccgttttcgtatccggggtttccgattccgatttcgaaaaaaaatatgaaaacgaaaacgataaagatggtttccgtccgtttccgtaccgttttcacccctagtcctcatacataagactagtcttttgggttgtgtaggctcaggacctaaagttgtggctccggttggacttgtgtggagcaggcccaatgtgacctgggtggcccacggttggtgggccgagttgcgtactctaacaagtggtattagagcccaggtttagaacctggaacgatttctatgggtcacatggtggggaggccaggtaataagtcttcagggtcacatgggttgatgtgacggggagattgttgagcccgatgtcttcggggtcacatgggttgatgtgacgggggagattttgttgagcccaatgtcttcaggatcacatgggttgatgtgatggggagattgtttgtgtttgtcttcagggtcacatggattgatgtgacagggaaggttgttgggcccgatgttcggggtcatatgggttgatgtgacggggagattgtttgtgtttagtcccatatcggtaattgatgatggggggacgagggagcacgacttaaaaggtgggtgcggtcctcatccataagactagtcttttgagttgtaggcacaggatttaaagttgtggctatggttgggcttgtgtggagcaggcctaatgtgatctgggtgacctacggttggtggaccgggctatgcactacagtgggttcgacccaacccacccacgaaatccctccaaccagacagtacaaaacagatcatgcatcaagccatcatcaataatatcactgtcatatatatgtacccgtccattgatccatatggcgtccactatatatatgatgcctcctaaacaaacagcacagcaggtgctacctatgtagcagcagcacatatgtagtgcaggtatatcaaggaagaaagaaaagtaattaaagaaagagctggggatcgaacaagctagttatgtggagccatgggagttggaggcaagagggaagaactgctcgtcctgcccaaagcaatacgcgcgtactctacatattcgtagagtacgcattaggttgctctctcggcatcatattctacatattcgtagtgctgtgctatgggaaatctatggagttccgcgttctgcggaaaaactgagatagactcctggctccatgcatcttcgagtactgtcgcaactctagcctatgtgttgtgctagttgaatccgtgtattagatgaatacatacttcaggtagtatagaattgtacaataattaaggtgcaagcaaagatcgtagtaaaacttgtcttctgttatataggcatagactattactacttgtcttctgttatataggcatagactgtatactacaacagaatgtatggggcagctcaaattaatcaaaagttttagtcaccaccacagtatgcttgagacaataagatccaccgacgattgcataactttgttactaggactgccagtaggtatccattgctcacatacatacccattgggtatggtattggtagaaattatatgtttaaaacttggtaaatatacatggggagggtacttaattattgcacacttcaactataatcattagaagttaaactccaactaaaaagttgtaaaactcgcattcgcattatgacaaacttgttgactcaaatttgatttgatgacgtctccaaaaaaaaagagcgacgaaaaacatcaccgctgtcgtccgttaaggtctcaaagagagacgaatctgggttttcacctgacagccccactggaggagatgggacggcatgacaatgccctcaagagggaagagggaagagacgcttgaaaacgtcatcgttgtcggcccggactaggtcgggctaggtttttacctgtcggccgctggctacgaacccacaattgatgcacccaagctccaccgctgtcaaacctccgtcgacatgtgggaaccgctgcaccgacgccccctgccgaccaggcttcgtgtgccggcattccgcactgccgtccgcgccttctcgcgccgggccgggtttcctttgtcgtgccggccactagccccgccagccaggcgcctgctgcgggcaagcgcccgcgcctccgtagccgtcacgcctactgcggcctcctgcgcctccgccgccgacgccgcgcccacattgcaccaaacaaaatctggcggcggcgacaccggatccagccgcaatggggctagatccaatggtggcggcgccgaatccgcagccacgtgcctcgccgctgcgctgcgccgccccttcgtgccaaagacgggacgcaccgcaggggattggagcctcaccactaccatcccggcggcccgcgcggtttcctgtgacacgcttcggcggtggcaaggcggggaaaagaagggaagggtggcgccgcccaggggctagggttcgcccccgatcgcttttgcaagggcgacagggagtgcgtcattgagaagggatacatttcttgcgttgaattttcccttaataatctttttaatggtttttactatagtagaatccatctaggccgttgattttttttttctaattcaatgaatcatatctaagttataaatcaatgattgagatcgcacctttaaggataatattgaccgtagaatacacccgtagagaccgctgtaaaattactcttaaaaaattatattcatcacccgaaagtgtgcataacaccgtcaagaaagatcatctagttctctacccacctttatgagataaacatatagttgcgatgttcagacaatcagagtgcataaatatcaagagatgcacagattttcgatgttcagtcagccaatcgaagtgcataagtgttgagttcatctacacagattttccatattcaggcagccaatctaagtgcataaatgtgagttcatgtacgcattgtgaaatcattgtcatgattaatattttgtgatgaacaattggctttgcaaatagtttgttcaatgaaaattggtttggaattatatgtggatattggtgtgagcgtgtgtgactaatgtgggtcatgttgtgatatttgtgtccagaaatagttgttttgtctgattgtgtgcaagtgacttaaagtcggccttagtcaatggtaaggattaggactatactcacggaagagcatagatctagcacggtcgtaataccatgtgaaaagtgactagagtcagaattcttagagatcaactttggtcaacggtaagatcgagactaggctcagggaggaattaaggtccaaatgataaatgatactaagggataaagttggatacgagatgccacacacggttgatagacaccgtgttaaagagatcttcgcaacgggcttcacgagatgtccgtgcaagcgtcggttttcgcggaggaggttggaggttggagagagaaattgttggagtatatggtcgggtactgtagcggtggtgctgtgccatgcagtgtgctggttttgtgtaggcccgggcagcaggaggctcagctggcccatgcggcaggaaggaagcagcaggcagtagcgcaagggaaacgtacaagggcgacgtgtcgtcaccggattggcgaggagtcctgttcggattcattgtggctggctgtgtccgcggtgttttgagagaacacaattttggtaaattgtatatttggtttggaatatgagggattgagtactactgtaagcatgtagcagcagccggtataacatagactgatcgacgaagtaaagagcaagtaaagggaaagtttgggtgttcaatcgattatcgtggagacatgcatgggaatcggaggcaaagagcaaggaatttttcgctctccccagtctctactgcccagcaaaaatcagtacatgcaaaaatagtggttgcaatgttcagacaaccagagtgtgtaaatattgagataaacacatatttgtgatgtgcaggcaatcgaagcccataaatattgagatcatgtacggctataccttgtttggtcatttctagatgtaaataatgagccaaatttccactatatatcgttggcatatcaataccagtatcatactgtacataattttctatcggagaaaccagtgccactagcctacactagcagagcacaaaactagctaaaatacatggtacttcgctagcaattatggagcaagaaactagagaaagaagtgaaaatctttaggaatttggtattgagatcggctatgggaacaggaggcaaaagggaatgaaccaagagttcatcaaacctcatgcattcttgcagcggcggatccgaaagactaaaagaaagggctaagcaaactagatgaaactataatcccttcttttgatggatgtatgatagatagaggggcttaatgggagctcccatggttacgacactggtagtgtgtgttcgagatcccgtagcctctatggtggatccaccatgcattcttgggcaccaaacttcctgatgcaaaataagaacatgagtacttgatttctatactgaagttgtggcaagaaaattgatgcttccctttttcttttttagttaggtggatggatatgagagtcctacattttcgatgttggaaatgggagatgatctcctctctgttccataaggagagaaaaaaccgtagtatatagtagtactagatcgatcatcagctactcaccaataatgagtaattgatcggtatttttcttgtttctttttgggaaatcggcttagtgacaattaattaatgagtgaggtgtaaggaagagaattggcatggaagtatgcaactactaaacaacactcaaagtatgccaaagtatgaaaaagagtaaagtgcattggtggttcttaaacttataggattgtgtcatagggttgtgtcatataggtccctaaattctcaaaatgcatattcaggtcatagaacttgacaaagtgtattatctaggtcccaaattaacacgttccttttagggatgtggcaatgccacatggacgtgacgtgtccttttctttttttttcttcttttctttttctttttcgttttcttctcattcttctttttttccttttttttgcacgggtcgcatagaaaggtgaagaaaggggaaaaagagaaaaaaaggaaaaaaataaatggatcctatttgtcagtcaaaataatatcatgtcatgtccgtatggtatgccacatcaacgtcacgtaagatcctgaaggggttgtggtgatttgagacctagatgacacactatggcaagttttgagacttggatatgcattttgaaagtttagggacctagatgacatactcctacaagtttaagtaccgcccgtacactttactctatgaaaaagaagaacattctgctattcgattttaattgtttagatgaggccgtatggattttaattatattgacacgtattatagcagaccagtgcatgttccaattcactaagtaaaaacatactaagacttttggtcatccacgtgataagtcaggattttagttgaactaatagtatggtataaaaaaacataatatcattttagacaaacgtggtagttgagggataatatatatgaacttatcattatatacaattattaatacaattgatccatatacactacagggaattctatttcccgcaacaaaaatttccattgcaataaactttaatttggtgcaatataggcatactgcaaattctgagctgttgctttgaaatgtagtaatattgtaacgatttcaccatgctattgtaacagctaataatgttacaaaaaatatgtatcgcaacaatttcaccgtgcgcccctcctgcggccatccggaggccggatctgccgctcgcgccactcctgcgactgaatcctccatccgcgccgctccagcgaccaaatctaccgcccaagcagttgggttgctgttgtagtcaccaccgcggagtcgctatcgctgtcgtcactgtggccgccgtcgcctttagggacgtgggggtgggagggggtggggtgggtgggtggagaagaatggagtcgatcggtgcagttggtgtggatttataatacagtgatacttatttttgcagttagtactccttagcagccgccaattttcgttggttgtcacttaagaggtccgcttgtacaatgacctttatttttttttcaagcggttctcttaagtgtcaggcaataaaaattggtttccgctggtggttggtgaccggaatcactctcaagtatttttacaagcatgtgttcattaaacccgccagtaaatataaaaggatagtgctatgaaaaatgattttgtactagtggttgtatttctcgggtggacgattgtcggagtttatctctaacacctacatagatcggctgcgtgttcttaaaaaaagtccaattgctgtaagatttcaaagaaaaaaattccaattattgtagaaccataggaattggagacaactggaaaaaactcatcgcccgccccgctcatccccacgctctttcgtccagagaaactcagtacatgcattaggtttctctctctgcataattttgtagctgtgccttgtgtttttttcgcgaacgctagctgtgccttgtgttgcagcatatatatatgatttaaaagaagctgctgcatctggacaaaagttaattaacatgaagggggactggaatatgaagcttgtaccacaactaaaattttttttgatgaagatgaagttgtcctgataatatatcaagataaggtagcagaattcaaggtgatagttagtgaggatcatttcaacctggatgaaaaaacaacttcctgttcttgaattcgtgcctaatttgaacaattgaagaaatggtctgacatatgatccaactgtattaatggtatagttgattaattggtatgttatcaattccgttgttactagcacgaactacctcttgctatgtgaatgatttctaaaatcaaaggtgttatgttacaaatgtgaaatgtccacatgtatatatgtatggggtttttcaaattttagtcaaacaagttaaacggatgacaaaatccgcacaatatttatacattattgcaatgctgcaagctattcgctacccatgtatacatcagcttttcatcaccaagttacaaacattaccatacaacgataggcattggcatgtttgcccttcaacattcatactcaccatggtttataattaattcccaattccaaagtatgatcttgcatcataatcagcccaaactagacagaaaatctaaccggaagtttgattgaacttcacatggctacagctatctaaagcatttcaatctatgtgctctcaatcaggtttagatcttgttgagcatctcaaccacttcttccatggatggccggtgcttagggctctcctccgtgcaacgccgtgccacatccaaatacgctatcatttcatcttggtcagcctctctcccttcccattggatccccatctgacggtccaggatctccaatgcctggcccttgtctaccttatccctagcccatttcagcatctctacctctttccctttcatgttgatcttcaccggccagcttggtcgccggccggtaaccatttccatcagtagcacgccgaagctatacacatctgcctttacgctcgtgcctacgccagcacgtaactctggtgccatgtacctacaatccatttgatcaaatattggtcaacagggccaaatatttgtaaaaagaataagcatatatgaaaaaccatattctaaaagggtacttcattgcaaggtattgaaatgcgacggcaacagctcaattatcatggttatcaaccttatcaagccaataaatatttacaaacggctcgataaatcggtcaagttcaataaaaaatcaaaccaaaatcgagatcaatgtgaaaaaaaattatctgaattcaactggttatcatcgataactgttgcacggttatcgaccaaaccactagggatcggttttcgatgacgaaccacatttgcaaaccatagtttctaataagtcaaaattatttttctagcaccgaaagtttataactacatagaatcataagatcctgattcattttgatagcacccaaagtttccaacgttctcaaaatagcattatgttaacactatcgttatcgaagtgctatatatacttctctgaaacactaaaaaaatagtggtggtgaatagtgagccacagtgacacgaacaataataaaacgaattctataaggagcatttatactgttggaattcttggattaatatttgagacaataatggtactatgattctttcttttaaattcgttggaaggcacaggcattcaactagtatatgaactattggccatagaagcaattttg

SEQ ID NO: 25843 - DNA, 5977 bp, Oryza sativa
  unsure (1)..(5977): unsure at all n locations
agggggtgaggtgacgtgacgttctcgttgggttgggatggggaaggaggtggagtgagtcgtcgatggagtcaacggtgttcggcatgctgcggttgactatttcttcggctgtcactgccacactgtacagtgtacacccctgtcgagggagaccttgacctgtgactaggctgggctcttcagttaattttccaattttccaaacctcttatctctttccgcagtcactttttccaaactataatagatggtatgattttttaaaaaatcttctatagcaaagttgcttaaaaatatatattaatctatttttagctaatacttaattaattatacggtaattcggtatttggtttttcgtgtctggaggcaaaggttgtgaaccttacctcccaaactcaatctaagactctgtttggatgagaaggggactaaaattagtctctcccattcaaacagccctaagtgactacaagtctcacgtgccagctaagctactacaatctatagaaaatctggaatccaagggagaaaaaaaaagagatgagctaacctttggaccgtagttattttacatgatttttttaatatataaaagtaatttaatttatgcaagatccttttacaatttctaacttcaaagcgaagtgagcatagttttactgcttaggttacttgtggttgaaccagcccgctctgattcaaatcccagacttaacacaaatacccgtatttatggctaattattttttaacggtaagtgatgtatccgtcaacagcgagatgttcgtggtgactttgttagttttaagatatgctggtcgggtcagtgtgagctctttttgagcatctatgtttatactgtgtttctaaaaaaaattctacatacatcagtatgaaaattttgccacttcgcgaaccataaaattctatattttgagttgagacgcaaaaggtacacacttttatagcccaaaaggtttgcttttattttctttttctgatgttgctaagaatcgacgggaagtttctaaggccttcaaagaagaaaagcccacccccgtcccaactagcgagcccacgacgtccagcgacaacaccggcgacccaaatcggacgccggctgatctcctctagagtttgaaattttgcgtaccatatttttatgatggctttgttggggggaaatttgtgcatgccttggtatttgtagaatgtttgtgccctgggaagttaggatttcgatattttgttgcttcatgtcaaaaatgtggatttctaatgatgtttcgaatgagaaatactaccttataggaaaacaaatccaatagatggtctaattttcaattaagatatgtttatctcaatccgaagaatgggtccattaaagatcctctgtatttgcaacagctcagtggaaaataaattttagccagtttgtttgcttgtctgaactgacatccaaatggtctgtaattagttcccataatctcaaaagttatggatctgtttgtggtgtttttagatgtgatatgttccaaatgttctttctttctttacatactccctttgtcgtaaaatatagcaacctagattcaaatttggagtactaggttatgtatctgtttgcatctttgtctctcatgtcatgtgactaatgtgaatgcatttctattctacatgtgcggcaaaacaatggtttaaggtcatcagttagatatcagagatactatccctgtgcactaaagtgccttgtcagttagctgatgattcttatttgcctttaagtaccatctacacacatgtcaaattagagttttgctacaggtttatcggcatagatttaaagataatgacatgtcaagacctgacaaggaaaataaaagggattcaaaagcacaggctggtgatctgatggatgatggtggaattcttgtccttagatttcttctgctgcctccttgtcttcgtgatacaatcaaaaactgcgggatcgtctatgtactagtgtgttaggtcgttttcaaaaggtagtgcataatattcgccttaattattgggaagtgtttttctcaagaagaaatcagagtcaggaaagtagtgatgtatagtcgtattggttgccctaacttaatttttaagattttaaattttaaatttttaaacttaatttttttaagattttaagttactttcaacatagttttcttttcagctttaacttttaagtcacaacaaaaaacatatatatatatatataattttatccataaattaatttttattttctaacaaaccatttttggcttattaggaaatatgggcaaccaagagtctaaaccgtgccaagaataatactctgtttttctatcaggcgtgttgattccagaatgtcaaacatcgaaaattataaccaattcttagttaacttgccggtacatcaagctcataaatactataccgatatactcattcaaatttgacttacctttacaaaatattgatttttatatctattaagaatatattgcctccgtcttaacaagagtttctgcagtactactttttttttcctcttcaaccattcctcattcaaatttgtcactcctacctaccgtgaaccactcttccactcccaactagtttgtcttttaaatgaaacaattacactgttttttagatgaagtatctgataagaaattgacagtcgaagtgtaatcttttctaaaatagagttctcagggagaacgtcaatcgtatcaaagtccactcatttctacgactgtcgaaaagggggggaaacccccccaaaaaaaaccccccgggtttttggggagaaaaaaaacccccccaatttttttnncccccccccccccccttgggggggttttttttttcccccccccgggtgggggccacctgccaagttcctcgggtttcaatcggttcttaaagaaaaagttggtagcagttttgtttttttattaaaaaaaaagttgccagctggttcattcattcaggaatcaggacaggaaagggaacaaatagctgaaccaaaaactgtgagagaaacgaagtggaggcataatgtgcattcagactgacaaaaagaccccatttgttcgtttgatggggtttcttgtcagattccttcattccttattccgaattccgattcccctcctttcgccgtttttactctcaacttttgatgacaaaaagcccatgttccatgtcggcaaactccacaatacctttatcctacacatagagtttcagagtttcagctaataaactcagggaatattagtttcaaatgtattgcaattattgtaaccatgttaattaacagaggttatctaatcatctaacaaggcatgctaggcaaaagagattcctgaggtgatctgcacctgccgaatgtcaaccacagcctgcaaaagtcacaatgaaagcagccttgaacccttgattagccttgtcatgtaaacctatccttttgagacacgtgcgtaaatagaggaatctaaaatagatatagctcaaggagcaaaatgtaaaagttgcaggaacatgaagtaagtaacaagcatctactgataaaaaaaaaagcaaccaatcaagaaggaattaggtcaaacccaacttaattgtacagtcaaaccgccgtaatataagctagtgtgaaagtctcactgccagcatttcattgtttaaaggagacaaatttgctctcaaattctcctccagttcataaatattttctctttaaaaacaaatcctccagtctcaggttgtcagtcctcttcacactgtttctactctgtttcacactaactgttctagatcatgaccaagacgaagcgaattcgcatcaaaactggccgataattacgcaacaaaaaataagcaaaaacaattaaactaattattcagtacgaacggaagtagacgatgatgagataaagaacaaacaaaaaaagaaaagaaaaaagcgaaattaattagcagattcgttgcacctcgccgtcggcgaactcactgtgcaaaaaacggcgaaattctccgaaccaatacgagagagcgagagagggggtaacgaggacggctgggattgcgccacgtggcagccttccccgccgcccgccgccctatataaactcgttgcagattgcatggtggacgacgactctagctgtcacgtagctcggtcgccggcgacgtacggacggcggcggcggccgtgatttcatgtgcggtggtggcaaggtggcgagcccgccgggaccacgactgccgcggctcgccggcgccggcggcgaggaagaagaggagaaggcggcggctggaatgctgtcgaggcatggacaggcgagggagatgtctgtgatggtgtccgcgctggcgagggtggtccccgccggcggcggcggcgaggcggaggagtggtgcccgccggcgtacggcgcggcgccgctgccaccgtctacttcccctgcatctcacggtaaggaattgaagtgtgccatttagcttggatagataattagatcttttcgtggcagtattattatgtgttaattttgagtttaattagcatcattgcgtgtaaaaagttaattgcatgtgcttagcagtttagcccaagtagtgtgtgtgtgtttttttttactagtctcatccagaacagagcaacttcatctggtagtttcggatttccagtactcatttctaacttgcattcctcgtttcaatttgaaaactatttcttttgttttatatatagtcttttgctgacttactaatagttttttaagtactccatttctgccttgatgtttttttttcagctattgtctgcttctcctcgtgtttatcaatctagttcttcacatttgtcacgtggagagggtagagagtaattagatggatatataatggatggacgtggtggttagcaaagcaagaaacaattagagaatggataatgattccaaatgtgcctaatgattatcattagaacgcatagttgcatcatagtcggtgaggtacacacgtttttcagattaagtaacagtggaatatgatcacgtcaccttgcaagagtagaacacgtgtgtgtgttccttttgtcactgtcccattgggtccatttggtcacctgcatgtacaccaaactacctttgtttttcaaaagaaaaaaaacacgaatattagaaaatgacctgatatcaaataaatagaaagggtgagaattcaaacccagactagctaacccatcaccttatggagttagccggaaaatccctaggtgtttctcaagaaaaggtaaaacattgtagtaaaattttattgaacactatgttgaagatcttggaaaaaaaaagagggagcagagctaaaggaaacatttgttggttgtttatatagagtagtacatggtaattattctgcttattcgtcagattatcgttgcagattatttactccgatccatgtccttttagaatacgatttttcaaaatacttttttactttattgtttagaccacctattctaatttatttgttaagtttataatgtataacattagctttcatcctcgaacaatgttgaaaacaccacctaagctagagatacgacaaaatttcaacataaatttagaaatatctaaaaaatgactatttttaaaatgaatcataatatatctctaatttcgtttaccatagccttcagtactctgtttcggttggattttgcagagcacgcagcagccatggcggcagggcagtacgcgccggcgacgtcgtcggcgatggcgtcaccgggcgagcaggcctcctcgccgtcgtccggcgacgccgccggcggcggcggcggcggcggcaggaagcggtaccgcggcgtgcggcagcggccgtgggggaagtgggcggcggagatccgcgacccggtgaaggcggcgcgcgtgtg

SEQ ID NO: 25844 - DNA, 15057 bp, Oryza sativa
  unsure (1)..(15057): unsure at all n locations
tttggttgtctagttgattgattgatttaaagatctagcttggggatgtttttttgaagatagactcggactcaaatgaacgaacctaaattttgggagggacggatcacatggtcgtatggatgaaaattaggtgacgaaaggaaaataggcgacgaaaggaaaattatgaataattagttaagataatgggtttattttatatacggatgacgacggaaaattttttaattttttaattagttagagattagagatagagatagagattagagattagatcttttctttttgtgattaggaatttagattgtttatttattttttagaaataaaaagaaaaaaaagaaatagggaggggagctctttttttttctacctcgattcgctattttcttacagttgccgcgttttttttttcatgatcgcgcgatgacgcggcattgcaggcatgatgacgcgagcgacgattttatgtgacgtgagcaacggacgaaacggacaaaacaaaattacagcttgtatttgatacgtactcaaggccattaatcaatcggaaaaaaaaacatacgaaaattctaatgcattagttaagatgtgtctaaagatttgacgttatgtttttgcgaaaagttttcggaactaaacaggcccggaggacaattagtcaactgtaccacccacgtgtggccactgcgcacgtgccaatctgctgccgccacgtcagctccagcatgtggccttcgaccttgactccagcgtgtacaaacatgtacacgtcagcatccaatatgacttgcctggttaggcaggggctcagggctggctggaatcatcagcaacaggaagaatggacgaaacagaattcatggcattcagagcacacgcaggaaggaaacctaggttgttgataaataaacagcagcacagggtgtttggttgtttggtggtgcttttgctgacaggacaggcctagctacaaaaccaagatccagccacaaaatttgcccaatcagtcacaccgccacgggaagtaaaaacatactgatggggcatacggattcatgtcgaaacccccatacagaacagcattatcagataatttaagcacacgagttctcaagcttcaagggcacctcctcctgatttcatcttagaatcgaccacgcccacggccgcgaccacggaatggtcccggtcctccgccccttctttccctgccacgtcctgtgaagccgaccgaggatgagaggagccatgagaagtgagatggcgaaacctggaaacattgttggttatgttagactgagcttaccacggcctggaggggggtagtcctctggttcttcaaagtattcgccctgatcttcataatagtcccccctgccgccataaccgtaatcatagccatatccaccacgtcgaccacctccgtagtagccaccacggcctcttccacgtcctcgtcctctaaatcggcctctccctctgcctctgtagttgtaataatctccttcctcttcccactcctcgccataatcataagcggggggaccattgctcatggctgcacatttgctatgaaagaattagcaaacataatattatctagtcggcaagacattcaacaaataacatacactttttttagacttgcagatggaaaaagacgcataattgaatctacaaatgcagctagcacatttttaaacaaggcacaatgtaggaagtgttagaaactagatcttttatttatttatttaagaacaacaggatggtagaagctgcaaagccagttcataagattgaaagcagtatggcatgctacctacaatggtaacagatactggtaataaccatgtgtgttgtagtctggtagttttgtgctcatagaagacataagaaagaggatacctctgcccctgcctcttctgccaccaccacggcctcttccacgattagtggggaaagattctaaatttccatgaaggaatttgtcatcaaatggttgtgctagtcatatttaaagcaggaagtcagaatcatgcgagaacaataccttcgtgttcatagtcaaaagcgggtctcacttcttcagctgggataggtggctggtacctaaggatttaatcaacagacaatgatcagacatattcactatcagtttcaaattaatatacagcaccaaataagtgaataataagtggataaaacatattagctctggacagggttcaacttaccctggagataacgtatccagtgctttcttggataatgttatggcgatcattgatacatgccgggtggtctctaggctgtggtaagcagtacactagtgtcatggctcacgataagtctttccttttcttttttcttctgaaaaaatacttacgggagaaggccttcttccaaaggttcccaagtgtccgtgatgtcaattgattcagtagatgtaatctgatgaagaccaccgatccttctctgaacaaaaaatttagagtaagttgaaaaaacaaagaataactttggtattagatattactaggtggaagtgatacttagcactaaccttgatcaattcaacaaccatgactgtcttattgatggctcttcccatagctttgatgacaatctcatcatgcccattttcctgaaaaagaagatatggggatgaacatattgaacatatagtcacattatccaggattaaataaaaaacatgagactgcataaggatccacaagaggaaatatagcattgttgaccactgacgacccaataaactttttggcataaggggacatatgcaaacattttgacgatggcatcttatagaataaggaacactgtacataacaagctgaagaaatagcatatgaaaacggcaaaggtatcttctacacaatcaagtgaatgggacgaatgtttgcacatttgtcaggctgacaaactacacatatttcaggagtcaggatcaaatgctacgtaatggatacaacgacaagcgataatattcagaaagttcaggagcagtaacagacattaagaagcacaaggaaatactggaaggaccaggaggtcctctgcggtactacagtggcaactgacgatgtactatgccaacctaaatcataagcagaggcagattcacctccgggcagcacaggtggctgcccagacttcatggtaacatccctggaggtcgacgctaatttttccctgaaatagagtagttcccgggcaatgtgtaaatgccaaaggtgggtgtccagcaaacagcgatcctgcaggctgcagctagcaggttgttgccatcctcggcttcctatatggcctgtctcacagtcacagtcccaacttaacgcctcattctcgtatcatatgcatgaacttgtacatcgaactcccaatctcccatgcatctctaggcatcattttagatgtacagtcaaggcatcaaacaatataaaaaacactgaccaactaaatttcaattctttaccacggtcttgaattagactgaataatcagtgctatagtttcagggacaagctataatacttcctccgtttcatattataagactttctagcattgcctacattcatatatatgttaatgaatctagacatatatgtataccaagattcattaacatctatatgaatgtgggcaatgataaaaagtcttataacctgaaacggagggagtaatacttagttcatatataagacaagtcttgaaatttttcgatgtataaatttagcatgaccgaccaaggttcaccaccacatgtagaaaatgcattcgccttgtaggatgtattagcaaaatgcttcactctaaatatgaatatgtattattttcttatatgttgcatggatataattatttttttgtttcgtgaggtgcttgggtgtgttagcgaattgttgaggcagcagtaatattgaatttagcaccttgaattgattatactgattatcattttttttcatctataaatatttacatgcattttgggcatgtttctatataaaaaaaattgggatgccaattttgatggcgacatatgagaatatggatatgctttagttaggttttcccaggcttcatagaattcctggcacagccactaatcataagagcagatttcgaacttaaaaatccaaagatacctctgattgagctgtgcagaggtgtgaataagacaagcttacaaaatgcagataacagagattttggggccttttgagccatgtacttttttagacttatgcagcaataaaaactgggtacaagcagatgcagaatttaagataaccgaacagcttactattggtaggaaacacttagtgataaataaaggcatatgcatgagtgcagtacatacagggtatccctaaaaatatcttcactgtccacaatgtcaatttgcaagcgcgtcctgttaattgttaaaacatggcacaaaaaaggttgctgcatgttctacctcaaataacaacatagccaaaggaaagtaatagtagtagggtcacctcaagcaacgacatcccatagctgatatagttcctcatcctcccctgtgcagtgatcctgatctcattctcactaattggtgtctcattgcgaggcttctccaccctttggtatctatccatgcctatgaattgatacattgatatttcagtacgacaatatatacaagccacaatgtagaattacttcaagataggatcataaattatgcagaaataagatagggagagagcaaaccgtatacgaatataagatagcatcataattaattttcactcgatcatatatagactgagtgagattccaacgaccggtgaaatttatacaaaacctaagagtaagttaaaaatgaaaaccatcaaagtccccaaccaagatgaatatcttttgaaactagagattaaatctattactgcaatctgacaggtaagaccaccccttcatcgacttgcaagaaaatgattaattttcgctaggaaaatgcaataagattctctttttcactcatcactctttttgattctgtaacaaagcacggacattctgctagtaccatgaaatacacacaaaggagatgaaacgtggacaaactgaggcactaagtacagaaatctggcaggtcaagatgaagctccctctcacacattagtgaatctacttaggaccttagtgacaaatcacagtcacagtgatgtttgcaagtgacactcaaacactgaggacctaaaacacagcaaagttcattagagcagaacgttagtgtgataattcagaaacccaacacgtagcacgtacagaaccattttgcgcctccgaaatcgacaaccaaccgttcagagtagtcaatcacaagagtgcgaacaccggctactaccggtacacctagaactaaaaatataactcgactgctactcccaagccttagtcgtttgatttaatcctaagacagagtgattccaacacaagggaacagaactccaaccgcgccgccgaaccaatccccacccccacgaagagcagcacccaaacacagctacatgccgcggcaacgcgcagagcaaccgaaaacccacccaaaccccccccccccctacacctcgcagtcccgccaccaccgaccaaagcaccggcgagtccagcaccgccgacgcgcacgaaaccacgggaagggggaccacaaccacaaaaccaccaaatcgagccctaaaccgtcaactccccccacctcccaaatccaccaccaccacctccaccgccgccgccgccgagtcagcgacgcgagcccaaccaaatcgaggaggagaggaacgaatcgcaccttccgattgggctcgcctcgcctcgctgcctcctcctccgcttcgtctatgcaactcctccgctgcgactctgcgaggcggagagagaagagaaaaaaaaagaaaaaaaggagaggagttttcaggtggttgcaatgcagaggagaccggggcgcgttcccgtatcccgtacgtggcgtggggttacggctctccgcgtggggctcccacctgggcgcggcgcacgtgggccgcgccacgtggggagatcctgcgcgttggtttggggggatgggtggtgcggattggggttggtccatggaccgggcgcggggagggttttggtggcagcgggtgggatagggcgcctggttcgaggataaggggccccggtttttcactgccgccgtgggtagactgtgggccacagttgtcagtgagcctggttgtgttgtcttgtactcttgtgccgtgctactgcgcgacacgtgtcgaggtaattttgccacttggagtgttccactgtgcagtggtcacatcagatttttcactgtttttacttggagtgagattaaaaattctaaggtttagatttaaattttacagttaactttaagatattttatttttataaaattgtcttctaaatcgctaagaattttgaatataaattatttttattttccaatatcacaaaatatgggaaccgatgaaacctgatgactgagggtgcgtttagttcccgtcattagaagtttagttgaaattggaacgttgtgataaaaaagtcagaagtttgtgtgtaagaaaattttgatgtgataaaaaagttgaaagtttggttgaaattgaaacattgtgatgaaaaaatcaaaagtttgtgtaagaaaattttaatgtgatgtaaaaattaaaagtttgaaactaaactcggcagaaatacggtttttagaggcacatctgacggtgcgcaaatttccttacgcaaaaatacacacctactgacctacataacattaagtacagtgctttcttggaacaaaacagcaatgacgccaaaatcgacaacaagcaactagcaaaaccgcattacgagatttaatccatagggttcaacagagttaaggtagggacagcagaagggagcacaaattcatagatcaacaggtcctgaaacatctgctacaaaacttaataccccagaaaatatcaagagaagagaaccaagtatagagtagtgatgatcgttttgacaaattctgactttgctgaggaaccgcacaaactaagccttgagcttgccgaagaacctctgtttctcgtcggtggtctggaagcgaccgtgcccgaacttggacgaggtgtcgatgaacttgagcttgatctcctcgagcgccaaacgagaggtctgcttgagcagggactggcggagggtgacgaccctcttcttggggccaacacagcaacccttgatcatgaggtagtcgcccttcacaacaccgtagtgagggaagccacccatgggagtgatgtccttctcagtcctgagcgcaagagcaagcacaatatcgtttaagtttcgctcgcaaacagatgcaatagcatatcaaacagaagacagatttgcaatcatggagtgctggtgtaatatctggtagacgaattggtacctgtcaaattcagtgcaggcagcatggctttcctggccagacttgccgatcttgtaaaccttcttattcatctcagtgcggtggtggtacccattctgaccagcgcgagcaacagtataggaaaccctagcaggatgccaggcaccgatacaggcgaccttgcggagacccctgtgggtcttgcggggaaggcgagtgacaccccaacgcgtgacaacaccttcataacccttacccttggtgacaccaatgatgtcaatcatctcgtccttctggaacacagcatcaactgggatctccttctcaaagaacttgtatccatagtccaccttatcggcaatggtaccaccattgatctggatctccatgaggtgagccttcttctgcttcaagcccttcattttcctaatctgaagcacataaagatttagaatgagaatgaacaaacaatttacagcacatggttaccatccaattaactgaatagaagggctcaaaatacaagatagtaaaataacagtaggttactgacctgagtgtgcacgatcacacggacaacagaagcatacttcttcatcttctcaagctgcatttggatttccttcttgccggcatcgctatcatacttgagagcatacttggtgaaagccttcttcttgctcttgcaccagttcttgtagaaccttctccttacttcttcactaagatgctgagcccagacagagttgagactgcgtaagccacgtggagtcttcacataggccacaagtccaacaacgacaataggaggtgtctcaataatggtaacagcctcacaggtctccttcttgtggagttctgaaaagcattagaaaaatgacaaggttaaatctcttcagtagtatgcatattcagatgaatactaaagtcttagtattaaagtcttggctaaaggccagtactcaactatgttaggacttgttgccattaattcagaatattatgttcttccaagtaaaattaagaacaacagatgaaactaatgtagttgcttcttccgcatagtcacaatacatggtcatctatttccaggttgaacaaaatagcattggcaaaaggcaaaaggattagacacatactggaaccaggcttctcgacctcacgcacaatgtgggtcattccagccttgtaaccgacaaaggaggtgaggtggcatggtttgttgacgtcatccttggggaatgacttcactgcaataacagagaacaaaatatcagattggtagtgtaatcacacataaacaactggcagtgcaaaatggcaccgagaagacgactggaacaagaaaaaactaaaagttgaagctaagccttagagactgctagaaagaattcccaaacttggatattattggcaagaaaaacaataaatttcagcattttgaaaaataggcagagtacactcatgtcagatatgcagatatatggggaaatgcatcaccgcaggggtatgctcttagtaggaattcaacaatcaatgatggaagcacatggattgatcagatcaacatagaattattacctcatttttactattttcccccattacactaacaaaaagaaattatgtggaccattacactaacaaaaagaaattatggggacaaatagagcataggctttcaggtcatatatacagagcaccagaatcaaagtccattttgctaagaacactggggcgcacaacaatctagccaggcacacagaactaggcctatagatccatacagcaacagcatctcgtccacgactacatcctattttctaccaagaggatccaacaagtttctactctaccatacaaggcgcaagctctacaaatacagcaccgcacaagcaaaagagagagagagagagagtaggtgagtgagcatacccttgccgcggtggcgggaggagcgcttcctcgggaggaagccgagggatccgtgcctcgggtgctcgaacttcctgtgcgacatcttcttactcctcctcccttacctacaaaatcccgcgagaaaacgcaaactccatcagatccacgacaaaagcaaacgcggcaaagcacccaccggtgaacccgcangccgacgccggcaacgaaatggcctagccgcgccgccgccgcaaggcgagcagcgaatcgaggggaggcgaaggatgagatggttacctggttgcggggtgcggcnnccgagtgcggttgggtngtgtgtgnagncgnagcagggtaacccctaggacagcgcttataaaggngggcgccacgacgagggttttgatgggtcggacgnaaatgcccctccgcgatgaatgcttctagggctttcttgcttctctgggctgggctgggatgggatgggctctggcccacaatacctccacttgacctcttcgtttgctaatcattttctctgttttttttattattcttctaagaaatatcttttttcttttcttcttcacttcctttttttctcccatgctcatatatggggttaaatcaaatagcacttgcaaaatgttgctctctgtttcaaattttcttgtgttaatttatgtgcttttcacttcattcaagcggaaagatgtcaatgatatgtaggataactttttgacatggtctttgaccactcgttgtattccaaaataaataaataaaatattaagtatggcttatacttaagatgtttacgctgattcttttcgaataaaatgaataatcatgagttattccaaaagccaatggtatcatctattaaaaaaatagaggtagtacatttttttctgcctcttgagtctcgaatcacttgtggcagaagagatggaaatgccggggaaaagaatgatatatcacttggcagagccaatttcagaaggaacaaactaccgacacaattacatgcaatgtacttaagctgtctgctctatgcacccgataagaatacacaatgactcaaaactctgcactctcgtatagttctgaacacaacaagaatgttaactcacaccaaatttctcaagtcaagaacaccaaaacgaaaagaatgatgaaaagaaccaccaagaatgctatcatcataatctggcctttcaagctggccttcttcaggaccatggccacccttttctgcacgaaatcaaaagaggggaagaattttcaggctgttggaatctggagtcaaaacagactaggtggaaaatatgatactccctccgtttcagaatgtaagtcattctagcatttctcatattcatattgatattaatgaatatagatagatatatgtctagattcattaatatcaatatgaatgtgggaaatgctagaatgacttatattgtgaaacagaggaagtattccttttgtattgggatagagagagatataacgcatgcctgcacaaagtcgagcctattggtcgtagtttccatgtcaaggcttagctcccccaaaagtctttcctgcgcaagatagacgagaaaacaaacattggcatcacaaaggacaatagcatttcaataacacaatatacagtagtcaaattaagtactgtacaacatttatacaaggaaagagagtacacaaaaaactatttgtacgaaagcaagtaaggaaattagattatcataactttacctgtccaacaagttcatcatgtatggtgagaccaacacctccaattcgctggacactagcactaagctcatccaattcctcatcctgtcgcctacagaagaagtgcaatgcatttatcagtgatcgtttggtccacagttcatacgagagaggaaaaaaaatagaacaaacttatggaaggcaatttcaaatctcttgtttaggaaattatatgattccatggagcagaactttgattctttgtttctttgagctacaagttctaatttgatattcgaacaacatgaatctcaggaaattagatcattttggtaagcgcttacttaatcaggagcatctgctgatctgattctgaagcaatgaagtcatcgttatcttgagcaatgtgctgcttggacctcactaattcagaaggattgactgaatggccaaaggcactcttttgctttccagcttcaacacaccgccttatggagaccacctaggttatttcaaatattgttatttgccacatcaaactcattttatagcagaaaatcaggttgtagactatcatactgcaagactacctggttacgagcagtgctagtccagttcctcctttttcctatttcaacctcgttaagtccatagtaagctggatctctctcagcaactgaaatagctttctccagttcaaccacctggatgaaaggtcgaaggcatatataagtcagagatgaagtaagaacatgaaaaagaaatggagggttaacgacagtttataaatacgtcaaaccattctgaaccttatgggttgtgagtggttgcattggccaaaatatttataaaaaaagtaaaagtacaaaagagtcctgaggcagaataactacaggcatcatgagcctaaaattagtatgacactaaaaatatggtggcaatcccatatacctgccactggatactttcgcagcttgctattatttctttggtcagatgcacatgttctccagtgttttccggtgtttgcttccactgatgcaaagtatcttgaattttttctatctggacaacaatgggacaacagaagagaagttgttatatgcatcatgaaagtaaagaaatgcactacttatagtatcatttgcggtgttattatttgcatcgaaataatcgttggaaagaatataacacaattgtcttcagaccttgtagtaacagaatacatcattaaagggaaaatccttcggtaaaaaaaaagacggtataatgccaaattgtaaatgaggaaaccagatatcatatatactcacaagagaaaaaaaaagatatcacattcacatatactaacagatggcataacaactctgcacaacatcacacatagtagctacattcatctaccacacacccaagagggagcagctctatcaatctctcagatccatgaattggtgagactcactaagacgcattaatttcctgcaattctcctacagggagttaaccgaaaccgaagagcccaggaaacggatccagagctgcaattgtgtgcaacccagagaagatcaaaccgcttgaatgagaatctacacagcgaagaacacggcaaatcaagaccgaccacacaccagtgagtgaccaccagaaatcactggttcaccgcgatggagtctagcgcccgagattcgcatttacacgccacgacacaagagaccccgctgctttgtagggcatggacaacccgggaaacggatcgagcgagcaagtgaacgaatgaacgacggggagaggaactcaccgactcctgaatctcgtccttgacaatgtagaaaggatcctgcgcggaagccatcctgttcccccaagctcgcgaagggaacctggagagggagagctcggccggatcggcggagcggggagtgacgcgggcaccttcttccggtccggccactccgatgtggcgtcgcggacgaaaagggcgggagacgaagatcggggagatgtctacacacacccaattgtggggctgggctccgatcctccttgctgggctttaggcccatgtgatctattgggccgtaaataatccttttattgcgcattattttgagtaaatttgtatttcgctgggtaaataatactccctctattccaaaatatagggcacaactatttttaaaagtggtttcataatataaggcgtgcatgcatgcatgcaattaattagcacattctctcccctaaatcattattattttaaatcctatactcacaagatcttcaattctattggttgcatgtattgtattaattggggtgattcataataacgatgagatattaattatttcttggtctttgggataagggtggttatgctttatattttggaatggagggagtaaatacgtactaggttataagcagagactttactctataccccctctgtactcgtaaagaaagtcgtttaggacaatgtttaagtcaagccttgggaatacaaatcataaataactctcaagttgttgagtttgaaaatataaaaaatatatgaatagatttatcttgaaaaatactttcataaaagtatacatatatcacttttcaataaatatttttatagaaataagaagtcaaaattatgttttggagaccgtgtcgctgtccaaaacgacttcctttacgagtatggagggagtactagtttgcaccaaaaataagtttacaatgtgtttttcctatacgtgtgggttggtgtgtagtaaaactagatgtgtaccccgcgcgttgctgcggaagaattatgtaataatatagtagatatgagttctaaaattttctttcaaaccaactatatgatttcttttcatgtgtttatatattttttacctttattaattatccaaatgtcataaataattgggttgtatggtgtatcttttggtggaaagagatgcaatttacacttttgatgaatcatccaaagtcttaaaagaattgagttgatgtggcttcacgacagaagagagaattagcattaactacacgtagtggggatgaacttgatagatatatatagatataggatttgttttcgtttgccataatatgaagagaaaataatactatttgtttattaagcctgtaagaaactctgtaatatagtaattttgtgcggtaaggatatattatcagtcgctgcagaaacgctatagggcagcattttgctgggtaaataggattgaagcaaaataggtgaggaagccaaactgattactttgcaatagtttgaagcaaaataccaaaaattttatttttgccattgacacactaggtgagcaattttgttaccacgtccatgtgctgatttaaagttttttttttaaaaaagaaacttattttttttctttgccacaatataaagctaaaatatttgtcattaactgatcctgttgcaaacaatgaattttaccccaccatagctaattaactcatataataataagcctgtaagttacagaactgaagaaactctgtaataataataattgatcactaagaatatgatcagtcgccgccattgatcactaagctagtgcagtgtaatggcaatggacgccactaccatcaacaatggcagcgatcccatcccctttccctttctcgcgccctatataaccacagctcgccggcgatcgatcactgcaccatcagcttccacaaacccagctaaccaagtttaattgccaccaagctcaccaatggcgctcgccgtgaagctcgccgtccttctactacttgccgcggcagcagctggaggaaagcagcacgacgaccgtgcccccgctagaggagaggctgggcgcggcgttcgacgggatggcagccgccgccgaagg

SEQ ID NO: 25845 - DNA, 1449 bp, Oryza sativa
aaatgatttatatgaaaaacgatccaatgtcttcctttctttgcgtgacatgtttcaaaaaaaatgtttttctaaagaaatgcttgtcaaattgcatgattgaaatctgaattgactatcttaagttgttctgataagaagctttagtcgagaaaaaaaagaagattgctccatgagctggtgactattgagacttgagaattctggggactaaagctactagtcgagactattgagacttgagaattctggggactaaagctactagtcggaatgggtatcctaacaagtgataacaaatttgagtctttgtatatgctttagcctgaaatgttgaatgtgtagtcccaatgaattcagtcaatcaagcacattggccctaattttagttagacttgcacatgtcttggaaagttggaatttcactggtctttcttctcgtatttatgttcatgatatgatttagtatcatattgcctaacttatctttgtgctctgcagtgaggtacgacaagatgttggaacattcggagagtgcaacagaaaaaattatgagcagcatcatggataccattgctgagaaccttcctaagcagaaatctgggaaatttgacgtaggcgctgcctctgacaaaatgaaggagaagctgtttggtcgtcagaagaccattcatcgagttctgggtggtggaaagcgtatgtaatcttcttatatttttataatgtttcctttgtgtagccatgtgtgatgctctgtctgtgcttgtagctgctgatgtgtagccatgtgtgatgctctgtctgtgcttgtagctgctgatgtgttgctatggaggaacaagaagatatcctccagtgtcctggctcttgcaacagcaatttgggtattctttgagtggctcgactaccacttcctaacaattgtttcatttgcccttgtccttggaatggttgtccagttcgtgtggtccaatttctcaagtgctctaagcgggtatggaatttacaaagcatctgaatagtgtgtcccctaataattcttcatgttgtcataaaaaatgtcttttgccactttttagatctccttctaaagtaccccgtgttgagctgccagaagagctgtttgtgaacattgcagttgcagttggtacccaagtaaataagttcttgagttttcttcaggatgtgtcttgtgaaagaaacctgaagcactttgtactggtatgtggaccttctttaggttcttatgtactccataaacatcatgaatagattaaactggtaaagactaaagaatcaaaccctgaatatgcaaacaaaattgttctgtttgtttatcactgacctttatgcctgtgtcaaactatggttcctttcaggcaatcgttggactgcgggctgcggctgttattgggggctggtgcaatttcttaactgtcatttacattg

SEQ ID NO: 25846 - DNA, 1561 bp, Oryza sativa
gcacaaaatggggaaccagaagaagcccttaaccttttccgtgaaatgtgtatggaaggagtaaagtacagtaatgtgaccatatcttctgtgctatcagcttgtgcaagcttaccagctatatattacggaaaggagattcatggtgtcgtcataaagggccccataagagcagacttgtttgctgagagtgctcttatagatatgtatggcaaatgtggtaacttagaatgggctcatcgtgtttttgagtccatgcctgagaaaaatgaagtctcatggaatagcataattgcttcctatggggcttatggccttgttaaggagtcagtaagtttattacgccatatgcaagaggagggattcaaggcagatcatgtaacgttcctcgctttggtttctgcttgtgctcatgctggacaagttcaggaaggattgcgacttttccgatgtatgaccgaggaatatcagattgcacctcgaatggagcattttgcttgcatggttgacctatatagtcgggcagggaagttggataaagctatggaattgattgttgatatgcctttcaagccagatgctggtatttggggtgctcttctccatgcttgccgtgtgcatcgcaatgtcgaacttgcagagattgcttcacaggaattatttaagttggatcctcataattctggttattatgtgctcatgtccaatatcaatgcagttgctggacgatgggatggtgtatcaaaagtgagaaggttaatgaaggatacgaaagtccaaaagatacctggttacagctgggtagatgtaaataacaccagccatttatttgttgcagcagataaaagccaccctgattctgaagatatttacatgtccttgaagagtattcttctagaattaagagaggaaggttacattcccatgccagatttatgttgtcccacgcacctggacagcagcacacaggttcagcaacaataactctgcaacttgtttgattgtgcactttcatacttcaaaccttttgaactgctgtgtcaataatgtctaaacatgttctgaagatactatgttatggatctacatactaactagcctctgttgaaaagccatcactgctctgctagcatcattgtagtaccagattgtctatccattaatagcatgcaacatcagaatgtagggtcacttgggcaattgaagtttaggtaacctgtcacagatcgtctctgtgttcagtgaacagaacaatggcatatcatgacttaccttaacattctttgcagattggctaaatcagaatggcattcttgaatctcgacaaatatatgatgcccctatgctattgtgcattttctgtcaaggaattatcaaaagctatttctatctgattcagtaatgtcgtaacattgcctggttcaggaattcatttattttgttgtttcttatgtgtgcgttaatgaaaagtttggtaagagttgccagtctagagttaagattttactgataatgtctttatcttcttgcaggtcatggggatttgattgcgatgttgtcc

SEQ ID NO: 25847 - DNA, 10673 bp, Oryza sativa
ctgcagcccttgaatctcgacaaatatatgatgcccctatgctattgtgcattttctgtcaaggaattatcaaaagctatttctatctgattcagtaatgtcgtaacattgcctggttcaggaattcatttattttgttgtttcttatgtgtgcgttaatgaaaagtttggtaagagttgccagtctagagttaagattttactgctaatgtctttatcttcttgcaggtcatggggatttgattgcgatgttgtcccaacactgctagctgttcttccatttggtcattgggaatttggtgatgatttaattgagaaccattatatcattatcatacaaacttttgtttgtgaccaaatgatcttcttatgcagcttattcaatatcttcatctgaaaaagtggtgggttgacttacattgctcgtacattaattgcttcaagagtgtagggttcatctaactgactaagtaactatgtcaatcaaccttctccttgttgttcagggctgttcatatcatgacaattaaaatcttctgcgtttcaaccttctccttgttgttcaggagggttcatataataccaaatttaaaatcttctgcatgattcaaatgttttttgtgtaccaacatggttagccttattctcttacggtactcaatctgccaatcatgagaatttcagttttgctggtttagtgtatgtgcctttcaatctttcaattttttacagtaactgagcagtgaactgtgccaaactagatctgagaaatatctatatgatacctagaatcagtacaaaatccaaaataagtgcagctacacctaggcttggttgaatttatagaagcttcttgatgtgagccccttaatgatttctgtaggtgttatcctgcataaataaatccagaagcatattgccttgtcttatttgtgaaaagttgttccattttgccactggcgtgagttttttttttcatgacatttcttggttaaattatgtgtgttcttgttccatcaaggccctactatccaacctttatctcgtgtgtaatctaagtgaacatcaggctgcaggatgagagggtcatgaaaacaacatcggcgtcaaagcttggcaagttaatgcaccatcgtttcctagaaagtatttcattgaataaggcttgagttgtattatatggtgctaataataatttggaactttcacatcaatgaagtccagcttttgaactgatcaaaaggtaattttatcggttttacccatatcaatcgtacaatttagcatgatagttagttatatgtgttggtttatgttacagggctttgcacatgaacagagggctccttgattgctaacttggagatatctagtaagtttgctcagattttgaaaaggaaatattcgtcagttaatgatataaatcaaaagatccttatgttgactttattattatataggatcctgtattcatgaaaaacatggtactatattatattatatatacaagagatttctgtatttctgttgtttctgaatagtaacctcacaatggttgatttcaaggccatgtttttcccccttgcatagctgtcacttggtaccaatgtttcataaacatttcatgtaaagagcaacagtacttgaagtacatacatatgaagttggccgatgttctgatccataatctggatcataacaatagcatcacaaactcaagttaagaatagtacagggtcactttatactacacaaaccgtcacgtttcttttgattcatgtattcctgtttaagagacttttaactcatatgtcgtcgtccaaaattttcagatcttttggaagcttctcacgctgtatgcgtgcaaggctctgaggatttctgattgcatccagcatcctgtccaagaattcaatgaactggcgatcttcatgagcaacctgaggatctgaaaacctatcgaagcgatactgatcctgcacgttccattacaaccataaagcttcaaaaaacagaggaactccagcactaagcaatagatacatcgtggggatatcatatactacataagtacgtcttaaatcacaggtatgtgcaaacagaaggtcagtaaacttgtagatatatatttacctcaagtttagttttatgatgattatgattactagtttaccacaatcttggaatttatttgacactgtacatgaaaagctgaacaacaacacatctacttgtctaagcacaaaccttttatttaaacggaataaccaaaccacaaacattcaacttcgatgtagaaaaaaaaaaaggcaaattttggatagaggtcgaaccttgatcgtcgtgtcgacttgcccacacgcgctgctgcagaaggattgatagctcgccggagaaagacgacggagcccctccccatggaacagctgcagctggcgatggccggagaggcggcagatcgcctgaattctcccgaggaccaactccgatgccatgtttgcccaagcaagcggttatcctttgttcccctcttctaattttcccctacttcaatctacaagcttctccagggatcgagcagtagttgtagttgtagtactatcggagtattacgcaaggtatcggcagtcatggaaagcttcgttggcctcgtttggaccggccgggtcagagattgactgagattagcagtcatcctttgacggaacgttctttggtctcgtcactgatgactagataatcgcaagtcacaacgtgtctcctgatctcatctttgatttctcctcctgtagctatcttgttgattactactaggtttgtctccgcacacctgggatgctcccagtttagttattatccctctcaggctctgccacgtagagcagaattaccatggctgtagaccccaaggcgccgtttgggcgcgtaactgaattttttagagatgtttcgttacgatccttgattgccaatttggctggaaagatatggcatctgtagcaataattttgatcgagaaaacgtgtacgcgtttcagcggaagcctggaaagatgcttcgagaagaatattttgccaattggtcatacatattacatggtcgctggccaactttcttttatgactcggctcaaacttttaatccatggtctctgaaaacttaatatagacgtgattcacaaaaaaaaaaacagaaaaattcacacgattcttcacagtaactgtagatctcgggttgtaaaattctccggtcgtgtggtggttgtcataaaccgaacgacaacaatgtcgtatggtgaaaaaaaatactgccacacgattaactcactggcatttttcagcctatctgcaatagattcttctgtaaaacttggtgaatttgtattttcggtgctatggtatcaccgatgacttctcatccaagacctgcacttccccgttcaatgcaactacgacatatgatctgcagataaggattgcaatgtcttagaatatgtagagcactgcatagctgcattactgtgcactcaagtagtaagtgtagcattgatagaaatcttgggcatcaatgattactaaatatcataaaggaaaggctgcttctcctaggtctaactatctatatctttgaaacaccttggtctagtactagattaaactatatatagtcatgttagtttgagaaatttacggaatgctggaaactatcccatggtccacgacaccggcaattttctccaagctttctgctaccttacctgtaaccgaaacaagtcaaaccagctaaaaatcaatcgaagaaatggtcactaaatcatcgagttaacttagcataccaagatccgggatgggagttgtgaagataacatcaagtacatgatggccctccttggtaaccaatgggaagtcacctcctaatggaccagcggttccaatcgatggccgcctccataccttcatcaggttatcatgtaacgatgaccaatgatggaaagtactcagattcacatcaccacaaatccagtagttgctcagacttcagagtaaacattagaattacataataaatatatgagtgcacctctgcgtctcctaggaacaagtcatcaatctcttcagcagtgtcgatccaatttgcctgaaatgacccgttcttctattaatgatgattattgcaattgcagaaaactgatcactccagtaccagaaggtggcttacacttttcaccaagactggaattgaaccttcgatgcctttcacatatttttcatggccaatgatgaaggcaagtttatcagctgatttaacaataccctatggaggcattttcacatgacaatgtggaaaagaagagaacagattacaccaaggttgtctcgatgagcaactaaatgaatctcatttctgatgagctttttgaataccttctccaccatgaaagaaggctctccgctctccgttttccgacggccaatgacagcggtcattgtgtcctcttcaattatatcagcatcagtgaaagcaaagtcaatctatatgtcagtaaacaccgtttcagcagttcacccactttctcccattgtcagcaagatttacaatggtgaaagaaatcaacatacttgggtgccttcctcgtagctgctgacctgtatccctgctttcactgcctcacttgcactgatcgtggacctggctgatcaaccccaagaatggattaaatgcaactgacaaagcatgtcatccaaggaaattcaggtcaggagctcatgcgtccactcttgaaacaatgagtgatccaaaaagaagttagcttcagcaaccagaacttacgagggtattccaaggatgccagtgagagaccctcgccggaggcgagtgccgaggtactggatggcgaggccggacgccgggccggagccgagcccgaccaccatgccgctctccacaaacctgtccacctgaggccaggccaggccagccaccgagctcgtcagaataatatacacatgatccaagcgtcaacgagctgatggaacagtggagaatcccctcaccgtgagcttggcggcgtcgaagaggccgacgacgtcggcgtccgcggcggccgcgcaggtcacagcacgtctccggctacggcggcgcacggtggccggtgcgacgttgccgatgcggcgggggcgtgggcacgggcggagccgcgccgaagaggagctcacgcttgccccggcaacggcgtccatggttgggctggtgcctcagcttgctggcctagcgagcttgacagttgcatacattggatggatggcacattgacgaagcggataaggggtgcgaagcaggtgcaacaccagcctattgtccttgttctcctcaggcctcatatgctcggttgtggagtcaccgatagctctttgcggtataaatacgttcactaatcgatttgtactcaatttacatattcatatgttttatacaatggtagtttgtactcaattcacatattcatatgcttatacaatggtaggctagcatttgaatattgggttttcgttgcaattgtacagtgggattttagcatcaataaaatgatttaggctgcgtttcccaacacagctgctgcacacgtccagagcgatcgattagcacgtgattaattaagtactccatccatcccataatataagacgcacccgtatttgaagattaacctttcaaacatttgaccaacacttagttaatataaaatattttttatttattaaaagttatattattggattgagatttaaatttactttcatacggtaataattttgttgctacaaaccttatagtatgtgagaaattataaactaaatattaattttggatggagtattagctttttttttcagaaatatatcaatataatttttttaagcaactttcatataaaaactttttttaaaaaatacaccgcagtttgaaatcatgacagacaaacagcatttgaatattaggttttcgttgcattcgtacattgggtttgaagcatcacagaatgatttagcaacatttgcatattggataacatggcatgtaaattatgtaagtttgaacgactgaacaactttccatgtaaattggataacatggcatgtaaattgtaagtttgtaagctgcaaaccactaattattcacaaagcagatttgataacgaaatccggcaggcagataaaagcacagatcaggcaaaaacctcttaagctccatattcaagcaaataaaacactcggcaaaaatatgaacgattcttcaatacataatcagtatcttgcagagcaaaaaaaaagagacattttccaaaccacgttaccacatatcaatgctgcattgttcaatactttaatccaatatcaggcaagagcaagaaagcatttcaaaaacacaaagcagatacaacacatctaacaaagatcaaaaggacaggtaaaggtacttcaaatctcataaactttcataaagcgaattatggtcatcacattacataatactccagtctaggaacataaccagagacatttcaacagctagaattaaccaaaaccagaaaaggtttcacattcctacaccaataactggaacatcaagaatccgaaggcaccatcaatccaaatgcaccggtcaacatgatgtaagaagacatccacactactgataacgactacttggatctctgcctcatctttcggcgcttcctcttgagcctcctcattctcttcttcttccactgcagattagcaaaggctcagaacaaagcatcgacggtatccataattaagtgtagtagttgaataaattaacatgcaagcaatctatctcgtgtggatagaagtaatctatctcatgaggataaaagttttggaatcagaagtatgagtgcttcattgtagtttcatcacgagatgatcagaaacacggaccaatggttcttcatcatgttccataaaacgattaattttgtggtagtcatacagcatagagccttgactgaatcatgttcatgatttagcaagcagaacactaacgtactgactaacgtacatatgaaaagaaagaaacaaatgtacaggatttggcattcagaatgagtaggaggaatttatcatcaaatagatcagataaacgtaaggtttcctcatcatgccaatacagtatcataaagaagaatcacatacagaacaaaggaaaatcggcaagaaaataaataaaatgttctctcagacaaatgcctcgattgtccccatggtttaatggaatggattagatcggactcgtcatctgtgtgttcatcaaggagaaccgcatccagaaatataacaatttagaacacctactcctatagtacacacgaagattgctagcgaaagaaacatttttacagctatatagcagtagtagcagaagaagaaagttaaatcgcgcaagcgcgacacgcaatgcaattctctcagacaaatgcctcgattgtccccatggtttaatggaatggattagatcggactcgtcatctgtgttcgtcatcacggagaatcgcaagccacaaaataaaccaacaacaatttgcacatcccaaaacctcaaatcgaacgcacaaagtacaacaatttgcacataccacaacctcaaatcgaacgcacaaagtaaccctaccaccaacgctacatcgtaacatctagataaccgaatcagcacaggtaacaaagcgaaacgaggcatgcgaacagatcaaaagggaaaggatgaacgcggtaacgaaccttggccctcatcgcggcggcggggacggcgaagcactcgctctctgtcccttctctctcgacgtcggcggcggcggatttgtggaggcggcgaaccgggtgagatggtggcggcgaggtctctctcgtcttatttatagagctaagggaacagcggaagggagaaaccctaaccaggcgtgagcgatggacggctcagatcttccgcccaacccgggttctactccgattagggctttatttaatgggcccagaaaaaaggctttaccatcttattaggcccggcccatgaaaactatcaacaaaagtgagaaaagcttttgagtcaaattcaacgcgaattcataaaaacgatagatttgtgcctcgttttacaggacatatggaaattttaaaagggtgtagttatatttatggcaccatatttttcatcaaaaaatagtcggcatgtatttatattgtaagtccctaaattacatatgtaattttagtgtatttacaatgtaagtctcaaaattacatatgtaagtactaaaattatatatgtaaatttgaaaattatatatgtaattagtatgtaaattcgtaaatgaggtgtaactactgtataaatggctgaaaaaaaatcgactgtatagcatatagcgtcatatttatagtaactccgttttaaaaactcaaggattcatttcgtgtagaactagaactacgtggtgtgccacgtcatcgatattggctcagttgatgacttggctggcggcgctcgggtccgcgtcgccgtcggcgccggcgccggcggggggatccggcgcgtactggccgggcgccgccggcgagccccagccgatgggcttgaatgggatgccggggagaggcatgccgaggccgggcatcccggggaacagcgggaacgacgggatcgtcgacggcggcagccaccacttcatgctgtcgctgccggcggcgctccccgcctcggccgccggcccaggagccggcaccgccgcgtccgcatcccccgcggcgtacggcgtcgacccggcgtcgaccggctcgaactccaggtggctgatctcgttcttgtagtcgtccagcaacgggtccagcggctccgtctcgtcggcggcggcggccttggagccgaaggcgaagccctggccgaagtcgccgtcgacgtcgtggaggatgcgcaggccatggccggagacggcgagcaggaggaggcagacgaggatggacagcttcttctccatggcgttcctcctctttggctttcttggcctcctgcaaatgaggagacgcgtgatgaaaccatcaaatccatcgaagaaattatagcttggcagcaatggagttaggttggatcatggtgacctgcattctcatttcagtatgataatctgatagctccaggaattgagaaatggcatgtcgaaggtgtgcattgccacctaaactgcatccgcatcgttgagtatttggtaatctagtatgatatgcaaatagatttcactgcacataggcttgaatcaacaaccttgatggatccgcatctgttcagcattgcagccttggagcggattttgaacacagcctgactgcctgagataaattcagaacagcaacacaacatactgatccaaagttttgtacgttccattgtctctattctttattcttataccctgttcttttctccaactaaagttggattaaattttggatactcatggcacgctttttaaactactaaacggtgcgtttcgtgtgaaaactctctgtatgaaagttgctctaaaatatcatattaatctatttttcaagtttagaataattaaaactcaattaatcacatattattacaacctcgttttgcgtgaaacacttaatctccatcttcattttcatcttcaggacattcaaacaccatcattaatgttcctcttccttttctcatttgcccttgttcatgcaactttgtaacttatcatttctatcaatgaaatggctacaaggtagagctgtctctacattcttatgtcaaaaaaaaaaagatccagagttcagaattcaatgctatcatattattcagcagtcaatgtccatgaagcccctgatatcagtagtatcatgatggtgatctcactattttctaatttctgcaaacgaattatggtgatctcactaattcattgttttgctgagctccactagtgaaaagaaggaaattaattgagccacttgaataacactacataacagaagaaatgcagggcagagcagttgaaatattaattcagattgcagcaaatgagcgccccattcaggaaagcacacagctctcagatgacaactgacaaccaatgtctgcaatacgcaactgagcatggtacaaattcttgattcattccactgatgaaaacccagctaatctatgatttcagttcttaaaacccagacaatctactcgctcttcttgaacttcatgttccccttcggtatcttgctcaagacaccttgatcaagtttctgatactggtcacgcaggaggccaagaatattgtataggaaatcatcaacttgatcttcatacttctcgtagagcacgggcagcgtgtgagcgctaacaaatcctgttccagttaatcaaatgtgaaatatcagtgacatctgtcactaatacagtggactgcgtacattcagaaaatagtgacaacatgaaatttctaaatttcagagggagagaaagatcttgtcatggaagaaagtttgaagtagcagtctcttaccaatgtaaatgacagttaagaaattgcaccagcccccaataacagccgcagcccacagtccaacgattgcctgaaaggaaccata

SEQ ID NO: 25848 - DNA, 10725 bp, Oryza sativa
acccccaatcacacaatctaaaaaaccaaaccacgccctttcccccaatcttccgaacctatattaaaaaaacaaatctaccttttcgttcagtggagtccccaagattctcccttccaacaaaaggctagccaaaaaagaaaagaaaaagattccacctccacatcgccacacatagcgaccatcagagctcgaaacaaccaagaacaaggtctcaaacagatcatacccaggggagacacagcagcagatgaacgaagagacggagaagccctcggctctcgagcttcttggagacgaacgaggcgaagagcaagagcaggtattcaaagtaggagtagtagtagtagtagatggggaagtgttcttcaaggggactagtagcaattttattccagtggtgtgggtgcgcggcgtgtgatctgatttgcagcctgtgcagtgctgcactgcgggtcccacgagcaggttatctgctacgtgtacgcgtgaccgctacgggttgtttcacttacaggtgggccatagcgggggatattcatggtggggcccacgtgcaagagaatgtcacgatctcgagtaggaaaggaaaagaaaagtggttgcatggagcacgagggaagtgtggtccattccgaggatatttttcgaatttattattgggcttgtttgtgttgagcaaatcgccatgttgcctgttgctgattcgaaaataattgctgaattgttcgctggggccaaaatatatatgagtttaagcaaaatttacactccacgtgggtgccattgttcaaaaaaaaattgaagaaaaaagagttgaatgattgagtcggcaactgcctagatatatagagcacgtgggcaactaaaagtaaccacaacctgctttgtaagtcgttttgattttcttaaatcaattaagtttatacaaaagtatagtattctcttcatcttaaaatataagaacataaaattagatgggatattttgatacttttctagtactacatatctaaatagactatgtgtagattaatttgtgcttttccttaaacacgttcacgtcattgtattgtactatgatctgaaaaatgtgtttttgtggtttgctaaaaatgccttttgatatgattatctaaagatatttatcctaatactatgacgcactaaaaatggtactattgtggactaggttctctcaaacatattcttttttatgtgtgctctagtccaaagtgcaaactagtgtaagcacgtgtggtgttaagtgagcacttaggtttagcccttgtacattataaaattatgctcgaaatatatgcccaatgtaaaatttactcttataaatttgataaacttcacaatccatgacaaaaacaatggcccttgaggccttacctccttgcatcattaattggcgcacaatcaaaacaccatggctctctttctatgaaagattctggattttcaaactcatgaacagtgcatttcatgtaaaaaaatctatataaaggtatctcctctgatcttcatagaacaaaatttcaactttataatagttgatttagtcatttatataccctagaatagtgagctgtcacaaaaccagataatccactcaattagacaattagaagataaaaaaagctaaaaaaatatgggtggctagtttggtaaacatagaatggcattttgccagactcttttggcaagagaaaggtttggcaacttccgcttgaactggccgaagttgtaagcaattgaagcctcccaacaagatcatcctatcaaaactccattggaaagcctgcaactgttttttttatattaaaaaaaaactccattggaaagagtcagaaaaaggcctggctacaaagcacccaaaggctggatcattgggccgggtcactggctgcggttggacggacagtgggcctctgttgccgtgtggggtgggccggaccgtgggcccatgcagtcactccatacccggacggacgacgcctccgccgcccgccgcctcgcctgcgtcgatcgatctccatcgccgccgcgctaccatcgtttccggcgtctgctgcttccgccgcatatcctcgctcgatcgctggctggtgagtatccatgcatcccctctttctcgaatttgcattagtcctagctagggttcacaaactatgtgtgtcgcttgacatatctaggggtggtactcatcctgacatatcacatatgctctttgatttgtgctagaatcgtgtgccaggctagcttagattgtttcagatctgtgttgaaattgagaacaatgctacatgttaaattgagggataagttttttttttctgatgaagttgcgtgcttgtacaaattagtcttgattttcaccgcacctgaatttcatttctcaaacggaaaaaaaaactctgtacaaacgacgggcaaggctataaattattctcgattgattataccctctctagtcattgctcgttccttgctgttattgattaatagctcaaaaataatccagatttttcacccttctccactgaatgtctagttacttctccttttcagtgtcagtcaggctacggtaccaacgaattaagagatttaatttaagtcgctcatctgttctgttgacatgtgcaatgaattattctctttccttgattggacagaccttcaggtcaacgaagtgtgagtgttgaagatgagttgtcagaagttcagccgtcagtctctgcacttggcgttgaacgaggggcgcggcttgtactcgctaaggcacatggacgtatcaaagctcttctacccatcaatggcagaagcactggaagcagaggctaaagcgaagaagaagaagaatggcgccaacaaaatccggagcatcggccgtttgccaacaccgagcatacactaccaaccacatgtgtcggctacgtctaatccatacaatttcactaatgtgtttgctctctttggtgagaacaagaacaagatcctcttctcagacatggaaggccactccagcacctacaacaccgagttgcattccttcatgatcatgcctgatctgaattcacccaagggacccaattgtttggctgctcatatcacccgcactgctgcccacgcaaggtatgactttgatatccggcctgatgtggactacgatttctttgcctataatccccatggtgagcacactgacagcctctacttgatggacatggaccaaggcaaaccaagctcctttgaactgcttgcatactatcctgtgggggaatggcaatggtgctcactcccattgccgccgttctttgatgacccggagcacaaggcctgcagcaacatatcctacgcagtcatcgatggtacccgaatctgcatatcatctgccactgcgacctactcttttgacacagtggccctcgagtggagcaagattggtgattgggtgtttcccttccacgccaaagccgagtacattcctgagctcaaactatggcttggcctgtcagctagcagtccctctgacctgtgtgctttggacctctccactgctgccatggattcttgtgatgtgctacccatggtgcatcatgttgggcttgatgctgaccttcctgagggttgatcgctgaaaaatcgtaccctggtgaacctgggcatgggccggttttgcattaccatgttcttccatactgcagatgacggtcctcaggtgatcgtcttcaccggtgtggatgtcgtgccctgtggtgacaatcaacaaggggggcaggccctccacaggatcaagcacaagtccaaatgccttgtcacagacaggatcgagcatgtgctatgaattgtgatcgtcgatgctctcatctagagatggcaatggggacccataacccgagactcgacgggtttttattttattaggagctaattgtgttctaactcttataccaaatgttttaccgttcatcttattcaaaaacttttgtgaaatatgtaaaactatatatatacatataaatatatttaacaatgaatcaaatgataggaaaagaattaataattacttaaattttttgaataagacgaacggttaaacatatttaaaaaagtcaacggcttcaaatatttagaaacggggggagtattaatagcactgttgctagagaaaatagtgatggtttataactctaatatggccaattatagtacaaaacttaggctgtgtttagtttctgaaattggggagaagtttggagaaagttattagttttgaaaaaaaagttaggagtttatgtgtgtaggaaagttttggatgtgatgtgatgtgatgaaaagttgagagttgaggggaaatttagtgtgaactaaacacacccttagcccgaatgatcaagcacaagtccaaacgtttcatcactcacatcaagttcgtactctgaggtcatcgattgatcctcatttatccatgtttaacctactgggagaagtaggttcagagccagtaggaggacaaatactgcacgcagtgattttgctttaatgtgccatctactcactccgtcccaaaaaagacaaacactggatttccgtgttcaacatttaaccgtccgtcttatatgaaatttttttataattagtattttcattgttgttagatgataaaacatgattaatactttactagtaatatgcccgtgctaacgctacgatgctattattgttattttataaaaatattagaacttcatgttagggcaaataattttcgcacaatcctctcagattcaatgtcgtatatgaatttaaagtaggcagataacaataatatgatttgcttgaaaataataatccataaccatcgattacttcaatatacaatatacgtgagcaatatatgtggacactatatgtccacataaaaaagacaaaaaatggtagagaattattccattaatttgcatacaaacatgattaatactttatatgtgacttgtctttttaatttttttcataattttttcaaataagacggacggtcaaacgtccttgtttctctgccgataaaacttaatatatgtgccatctatatttatgttactgttgtactagtttttattttttttggtcgtaagaactatgtatatcttagcccttgtttctctgccaataaaactaaagctatagatcaagtgtggcgtctgctcagagattggctgtgaatggcattcccgcttccagaagaagggcctatggagtttggggattggtggctgaaatctattagccgatttcggacgtgctacagggggcttttgattccctttgtctcatggtgtattggttcatttggaaagaacgcaacacaaggatttttgagcatacatcttgcacaacagcttagctctaccgggatattagagaggaaatcctaatttggagagaagcagagatctttaaacgagtagattatcagtgctcagttttgtgagagttcttaggtggtgtttgaatcttctaaagataaagatgaagatgaagattaagtgtttcatgtaaaacgagatggtaataatgtgtgattaattgagttttaattattacgaacttgaaaaatgaatcaatcttatactttagaacaactttcatatagaaagttttagcatgaaacgcaccatttatcggtttgaaaaacgtgacatgagtatccaaaatttaatccaacttttgttagaggcgtcacccgaaggtgatcgctcctgtcgtttcttcaacaatcaacacagcttctacggattataggtgcggttgcagcactgcatgcgagcacaacttgacagcgatcgattaatgaagctgaagttaccacgaaatctgaggctgcatatctttagactaatgaagctgaagttaccgattactaatgtttgagggagttccttcttgcttcgttagtggaatttggcccggcacaaagtgataaaattaaacgcaaatgaagattggcccggcgcaaagtgacaaaatgaaacaggaattggagatgcggggtatcgatccccgtacctctcgcatgctaagcgagcgctctaccatctgagctacatccccgtgatgagcattagttttttttatcttgattgatactgtgttcataactgatggactgtaaatcgccaaaatgcatatgcaacactgcagctagcagtacatcgatatgcaagtgtttttttttaaaggaaccagcacaagaatgtgcttattcattaaatatagcaggagaaaaatacaacccctagaggcaaagaaaaagcaaaaaacaaggaaagctgtacactatacaaactgcgggatgatctctccaagacgcttggcgcctgccaaggcccacatgccagcctcttcttttatctttgaaagtagatacgaggttgcggtttccttatgatcaaatatcctcctatttcgctccttctagacttcccatacgatgagtagaatcagggtgcggagtcccttcttggggacgccagacacagaggctagcattttcaaccaatctttgattgattgcgccaccccccagcgtcggggttctaactggtggaaccctacccatgtcgcaacgagattccaaatccgtctcttatacctgcactcggcgatgaggtgcaaagccgtttcatcttctcttctgcaaagagggcacctgccattattttgccaacccttggtcgcaagccggtcagaggtccaaaccctattctgtatgataagccaagcgtggagtttgcattttccgggcgcctagaccttccagatcaaggagtcaaaagttgtgtcaggcgcgccaacacactgcgctttgtaggccgatgaagccgagtactgcccatgaggagtgaacttccaggcgatttggtctgactcttcttcttctaactgcatgttgcgaactgcagtccatagggccaccagctgctccacaagggccactgtaattactgggtttgtttccagtgccaaatcacctacccaggcatcattctcctttccttggcgcagggtctttttcctcttcttagaaattgcgtatactaggggcatgaggtcctttggtcttctcccatcaatccacgcagagtcccagaatcgcactatattctcgtcaccaatggttatcttagtggatgcggcaaacaagctcttgtctacttcatcgcaggggatctcgagaccaacccatggcttgtttgggtccttccattcatgccacagccagcgtagacgcagggctctcatgaatttttctaggttcaggatcctcaggcctccttgcctagttggcagacatgtctttgtccaattgactttgcattttccacccgtgatgtcccccatgccagcccagagaaaacgtcgccgctgcttgtctaggcactctaaagcttcctttgaagttttcagagcggtcagtaagtagattggctgcgccatcagcactgatttgacaagtgtggacctcccggcaagtcccatgtttttgcctctccatcccgttatacgccctgtgatcttatcaaagatgtgctgcatgtccgcctttcgcatccgcccgaggatcagggggagtcccaggtatttgatcgggaagcatgctctcactgctgggactccctctaggacatcgtccaaatcaatgttattgcatttgatgaccgcgacttgagatttttggaagttggtaacgagtccagtagccgtgccgaaacgttgcaggatttccgtgagcgcttggacatcccctcttgtgggattgacgaaaatgacagcgtcatctgcatacatagatgttctcaggcgaggcattctgcctcgaagcttagagagcgaacctaggtctgttgcctttgtaaggagatgttggagagggtcgattgctaggacaaaaaggagcggagacagcgggtctccctgccaaagtcctctcccatgcgtgattttttgaccagggatgccgttgagaagaacttgcgaggtagatgtgcagaggagggcacctagccagtctctccattttacagggaagcctaggcattgcaaaagggccatcaagtagtcccaacgaatggaatcaaatgctttcgtgatgtcgagcttgaagaggagcatcggccgattcgtacggtgaaatcttctggtcatgttcctcacaaagagaaagttgtcatgaatgcttcttcccttgattaaggcactttggttgatggagaccaaggagcgcatgtggggcctcagccgcaacgccagcagcttggagaagattttggctatgatatggattagactaatcggcctgtagtccgaaacactctccgccccttccttcttcgggatcaacacaatattcgctgagttcaggaggcccaagctggcgcagcggaggttgaagatggaattgaagacaagggaaacatcctccttgacgatatcccaacagcttttaaagaagataccagtgtaaccatccggccctggcgctttgtcaactggcatctctttgatagcccggtggatctcctgctccgagaaagactcttccaaggtagagaggtcgaaaggctggatgtctagagcttcccagttgagctcattcggcctcggccccggccgccccattaaatgggcgaagtggtcaaggatggtcatttctttctcatcgtgagtgactacccagccattttccttgcagagtctttgaatgctattcttcctcctacgcgcattcaccctgaggtgaaaaaacattgtgtttgcctccccttcacggatatgagtcaacctggaagcctgtcttttccttgccctctctatcgtggcgagagtcagagttttgcgctttagggcagctctcagccgcaattccgggccagagagatctctgtgttcctgggccacatcaagccgctgaatgacatcgagtgccatgtgaaactgaattttcacctctgtgaatagacttttagcccaggttttaatgcaagaagctgtgcgctgtagcttgtgatttatgtggcgcattggctctgtgtgcggggatggttgggtccaactagccttgaccatgtccttgaaacccgaaatgcgtgtccaaaagttctcaaatctaaaggggcgcggcttgcacggggcagcgggatttgaaagaacgagagggcagtggtctgatggccctgttgggagggcatgcaggacatggtgatggaaggcgagatcccagttctcattgcagaaacaatgatcaagcttcactagagtgggcctttgacgctcattactccaggtgaatctcttgttttgcaaggggatctcgcggagttcacatcgatcgattgttgctcgaaagcgcctcatgcgagctagattaaggttgccattgtttttgtcccttgctcggtagatcatgttgaaatccccgaataggagccacccttcgccagcattgggctttagccgccttatgtgcctaaggaaggcatccttaagccggtgtctcgtgggcccgtacaccccggtcataaggaaggtagcccctgtgagtgggaccatcacttgtgctgagatcaaaaagcggccgattcgaatatcttgtaggatgagggcagcattgttccaaaggatgataattccccctctcgtgcccgtggccggtttgaaggcaaagctatccaatttgtagccacccaggaagcgggtgaggccgtcgtcgatgttctgaagtttcgtctcttggaggcatgctaggttgcatttcgtatccaacatcatctcgtggaccgtgttgcagcgtgctggcgaattgagcaccctcacattccaactaatgaaatctaggctgtgcgacatctgcaaaccaaaggtggactcttgattgggagagtaggcccagccggggttggagcacggcctgcttggcgcgaaggaggggaaggggacttgggccgagaagatccctcgcggccataattgcgtcggcctcgagtgtcgttgcacgcgcagcccaacgaggcccaagatggaggacggccttagaaggcgcgtggaggcccaagcgagagcgcgaaggcccaagcgaggcctagcgagaggtaaggcccatggctggggagccgctagcgtcgtcgtcatcatttctgccttcgtcgcggcggcgcacatacacacagacgccggcggcagacgaggcgcaacgcaagcggggaaaaagacagcgcaggcggggtgaagcaaagcgaagttctgaccgacatgtgctccaagagctgaggttccatagaaatgctggggaggcggcacgcaggccaccggcgacacaccagctgcaaaagaaaagacgacgacgatacatggaacgatgacagctccgaatccgacgatacatggagcgacgacagctccgaatccgcgcgcacaggcgctgctcaagcgaacgtttcttccactttatcggccacatcagtgatcccttcgtccacaagagggagcagagcggcatccatggcgcactcatcatcgtcgtcgaggccgaagatcgccgtcaaggcggcgatggcgtgcggcggcaggggcccatcaaacatggccatatactggctgagaatgcgctccacggaggcatcttcttcgtcatggaggatgcccaacctcctgaacagg

SEQ ID NO: 25849 - DNA, 2585 bp, Oryza sativa
aggcatttgtctgagataattgcattgcgtgtcgcgcttgcgcgatttatctttcttcttctgctactactgctatatagcatgcaaaaatgtttctttcgctagcaatcttatgtgtgtactataggagtaggtgttctaaattgttatatttttgtatacggttatcctttatgaacacgcagatgacgagtccaatctaatccattccattaaaccatggggacaatagaggcatttgtctgagagaacattttatttattttcttgccgattttcctttgttctgtatgtgattcttctttatgatcctgtattggcatataggtaaccttacgtttatctgatttatttgatgataaattcctcctactcattctgaatgccaaatcctgtacatttgtttctttcttttcatatgtacgttagtcagtacgttagtgttctgcttgctaaatcatgaacatgattcagatccccgtccaggactggccggggtacacaaacgacaatgttgacattcagatccacgtcttacaaacatcataaaagtcttacataaatgcagcggaaaaacaaaagataacaggagctaagccttgacttgaactgcagcgggaacaccactccacaggcatcctcgacggcacggacgaagcctactccttggagaaaccaccatccgacacatactcgtactctggggttggggaaaaataaagcaagactgagtactatccataggggtatgatgcagggaattatcaaaggagagctagagtggttcatttgcataaagcgagcatttataaacagaagttgaaagaagaaaacagtcgtaataattaatcaatattaatcatccactgtccaacgctataccacgttgcgacaggcccaaccatccacctatactatccaatttcaatagactaaactagggtgagactaatcacggtgaatctggttgaccgcccataaccgcgggcacggctattcgaatagttttactctgatcagaggtgtacaactgtacccacaagacacagccccacgacatgtttccatgccccgacatgccaccacgacataccggaaagaggccgtgacaggacccttcgcataaccccctctaaccaagcacaccacacctcaggtttcactcccactcctcgcaaggcagcgggcagtcccctctcgtgcctaggtgaatccggaagcgacggaggctgtcgcagggcccgccccgctccatcacgcccacccttgtctggatgcgtcagctagaggaaagctacactacaagcccagccgttgcccacgctggcttgtggtaagtacgataagttcttccagggcatcccgcgaaccggtccttaactgatatgggtgcgactagcaaaactatgcacccacaacccaccatgtgatttattttaattaaccaacaccaaagcggtggtactaaaccaacattatcatatgaacctacagtttatattttaaatgagatttccccattatgtgctagttgaactaagcatggctaagcaactcctagtccaacgtctattcatgttataacccgagctaacaaaggagcagggtaccaaaatagcatggctgtaacaataggtaaacatcccatagtaacattataaaacaatgcagtatttgaagaaaaacaatagagcatttgcaatataggatcaacatgttcaaatgacaggcatgacttgccttgctctgcagctggaggaacctcggcgactatctcgaagtacaccggagcgtcggaagaaccggaatctaggcgatatacaaagcaaacaatacaaacaggctataagactactgaaacaaagaacaaaaccatttttaatggattctacatatttttcttgatttactgagacttgaatgggcttaaacggagctcggttgaattagttatgaattttagaaggttcactgtgttttttactataacaaaaagtccttaaatcatttattgcgcaataattcccagggctgacgtcatcaagggggggcgccgacaggcgggtcccactggtcagtggctcaggagagaggggaaggggcgccggcacgcgggccccactcggcagtggctcaagggggggggtccaccgtggaccggaccacatgggtgatccaccgccggtccacgtaaccgacggcccagatcggccccgagccgatcgggcggtggcgatagaggtggccgccgggctcggctcggcatcaaagtcggtcggccggccagggctagcggcgacgacacgcggccgacggcgacggcgacggcgaccggcggcacgggaggcggcggtggcggccgaaggcgacggcgcatgacttgaagcggcggcgcggcactaggagggagagggaggggagtaaaggggagaggacgcctcatcgagggtggccggcgcggaggaagacgacggcgaacggcgacggcaagccacgggaggacgacggcaaccggcggacgggcttcggggtgccgtaaggaaggaggagagagagattagagagagggagatgaaccacggcgg

SEQ ID NO: 25850 - DNA, 4740 bp, Oryza sativa
aaacagccgcggtctcattccactcgcgcagctcctcatcaatggcgtacgaggtggggatgaagatggtgtcttcctccgggcgcggggccgggtcgccgagctgcgtcatcctggttgcccgcgttctcggcgggggcggcgaaagctggagcggaaaggccgggcgattgcttgtctgcagctcgcgcacgcgatgacggggagacggactcttgcgcaggcgacgcggtgacgacgagcgaggacgcgaccgcgggggcgtgcgagcgcccaaccgcgcgcgccgaagcggggaccgagagaacgcacgcacggcgcgacggtgccggcagtcacgcgcgcgatgtccggaacgacggcagttgaagcagcagaccgggtccctgtactgcgcagcgtggtgctctctgctgaggcaaatgaagcatttcccacttgtttgagcccagaacgcacgatacgaagaggagtaaatggggcgctgtcgacttgaaggcggaggtaggcgggaggcggatgaatgctcttctctacgccaccagcgcttgcgacgcaccggaatctaaggcgaatccccggagatatggccatccatcttctgctcggcgacgtgacggtgaggaaggctagtgacgtagggagtactcctccgcggcggagtgacctctcgagcagagcggttgttgcgccggacagtggaggtaaaagccaacttgaatagggggcgtggcggagagcgcgtgcggctggtgcccaaatttgaatttgggaagccctgaccacggacagcatcagcgaaggaccggcgagcggcagcaggtggcggatctggcgtctctgctaccatcgaggcgacggaggccgaagggggacgcccaaatctgggcggaggcggggacttcgggcacggctggaggacacttgcggagaactggcgtggctgggaggagcttgcggagcgctgggacgacggccaggaggcggcgaaaaagctagctgggcgtcagaggatacacgtgggcggcgtcagctggagtgccgacaccggcggcgggcgcgggggcatgctgcttacctttttgccgatagatatacaggttattgctacctgctattctgtcgatatgcaagtgttgaagtgaagcctgaccagcttcactagctgcctgcttatatgttgccctccacagcctcacagctactagtagcagaaaccaatatctcgttgtggcttggtctgccaacgcgctacgatagtttgtgggtaggcttgtggtgaactggtgatcagcctagagtttgaggcaggaagtggcgccggccgacgtgttccaacatgcagtaagacgcgcgcgtatttaagactcaactctctaaatattttaccgataatattttattttaaattaaattttatttgatagatgacatttgaatttactctcgtataattgtggttttattgctacaaacaatcgtattattcaagaaatttaaagccaaaaactagttttaaaaaccgtaataagtttgactgtgtcttaatcaataggaggaaggaagtatgtagcaacattacacatgcttagagcgcataaggaagaggagatcgagatgaggaaagaaaggagagaggatacggaggaaaccatgccgttcactctcaggacagtcccaaccctccacttaggatggtatctatagcattaactacattgacatgtaggacttttaacttatgtggcactatattaattaagagagagagtgaagagaggaagaaactaggtctcatgcaagacacagcttcaacgcgagaacctatgcactagacactatcaagttttgcgttgggagataatagtgtcttcataatatatgaagaataaatatgattggtagagaagagagatgatgtatttattactgggccactttaagaaatcatgggttgtagagtgtagtttttattgtgatgtcttattgacatggcaccatagacactgcttatggacactatgggttgagactgccctcacagcgtcgccattacgccaagcatagtatttttttatgccattcacgactgcaactaaattttactgttgtacacttcttcatacttatgtaatattttttttactcccataatcccattatattcaattaaattagcacaattctaagcgccgtttcgtgaaaaaaaaagaaaaaaaacggagcgccgcattcctcaatttttcaacgacgtttgtcagtttgcgacgacgccgttggaccaccgggatgaccgagcagaagcatagcttgggcgtcgcgtggcccggagcccccatctcccccgactgctgtgacgtggcccaatggcaccgttcaaaagcctatccggcagcatggcccatatataccagtataccaaccaccacaagagaagccaaggccgcattccctactacgagccatacagacaatgccgaaatcatggaggtttaagcagccatggccacccaaatctcgtctccaacaacaccgggctctaactttggcactttgcatcattaatgtagaccagctctagcgaaggtgaggtactaaccacagaaaagaaaaaaaaaaccatgtacaatgtggtgcatatatacctacattgaatatatgccatcagttaaccgataaaaaaacattaggttgccagtttctggcctatgttgcattgtcatatgtttgggtggccatgcatgaatcaaccggtgcatattgttgatcagtattgtgtgttgaactgatggactaatggactataagtcgccatgcatttcatccattcttttccgccacaaaaatgcgtgcaatctgcaactgcaaaatgcagagtgatatgaacgcaccaatgtgcgtataaatgcatcggcatcttcctaactgcttatatataggcatagccctccacagtgcacacatagtatagcagtaaccaattaatcaacctagcttaattacatagacgagctagcttaccacacatggcgtcttcaacctcgagctcgctcgccgtggcaacaatggtggccgtcgtcctcctcctgggtgccaccacccaggcggcgcgcctcctcgacgaactcgtccccggcattccgatgccgacgatccccggtgtaccggcggtgggccccaccatcccggccatcccgacgatccccggcgttccggcggtgggccccaccatcccgaccatccccaccgttccgacgatccccggagttccggcggtcggtcccaccatcccggccatcccgacgatccccggcgtgccggcggtcggccccaccatcccgaccatcccgaccatcccgacgatccccggcgtgccggcggtcggttccaccattccgaccatcccgacgatccccggcgtgccggcggtcggcccgactatcccgaccatccccggcgtgccgacgatcccgacggtgccgggagtgccggagctgccggtaaatcccggaggcgtggtgccgacgatcccgaaggtgccattgccgccggtgaatcccggagccgtcgtgcccgccgtgccagctctgccggtgccgccgatccccggagccgcggggggtgtcgtgccgaccctgccggtgccgccgttgcccgccgtgccgggagtcccgctgccggaggtgcccggcgtccctctgccgccggtgccgtccgtcgtcccgcccgtgccttaggtcaactccggcgagccccgtgccgtcgttaattaattactccggccagctgacgtgtacgtggcattgaccgtgtgcgccatgcattggccgccggcgccggcagccatctacagattaattacgtacgtgtgttaagtagtaagtacttcctccgtttcacaatataaatcattctagcatttttcatattcatattgatgttaaagaatctagataaatatatatgtgggaaatgctaaaatgacttacattgtaaaacagagagagtacaaattaagatgacttgcatgtacgttgttacgtcaagttggtatagtatttgtgtaatgaacgtgtgtgtgtgcagaccaggtgcagtatgtgtttgtggcgagtggcgacaaatgcgtcacgctctgtatacgtacgtgtgcaaaagcttaacgtgttgcttaaattatacgtgtcatgttaacaaatatatatttctatcaccgttttaattgtgtatatctttgttggcaaattaccacgcatgcaatcttagtaaaagtgccccttaacaatattgtttgggatgacatatgcgccacttatttcaaaatttacatataatcatgtgagaaatgaaagcccatatatacttggacttagtggcggacgtagctatagaaaaaaagaatgtgtttgatgctcattctataaggataatcgaacacaacatttatattataatcacataaaaaagtataatataatcaataaattaaacaaacatgaatatttaagatggtacctaatctttgagccgtaaatagtaaaaaactactcaaatcttaaattagaggaagaaaagaagaatttcccccgggaaaaaaaaggggggaaaaaaaaaaaattttacccaactgatcacttgttgctcatccgtcaatcaaattcaagttccactatacaatcctacgataccttggttctgaacttattaccaatgacacttttcccatcaggcatgcattcg

SEQ ID NO: 25851 - DNA, 2631 bp, Oryza sativa
tggcgagtggcgacaaatgcgtcacgctctgtatacgtactgtacaaaagcttaacgtgttgcttaaattatacgtgtcatgttaacaaatatatatttctatcaccgctttaattgtgtatatctttgttggcaaattaccacgcatgcaatcttagtaaaagtgccccttaacaatattgtttgggatgacatatgcgccacttatttcaaaatttacatataatcatgtgagaaatgaaagcccatatatacttggacttagtggcggacgtagctatagaaaaaaagaatgtgtttgatgctcattctataaggataatcgaacacaacatttatattataatcacataaaaaagtataatataatcaataaattaaacaaacatgaatatttaagatggtacctaatctttgagccgtaaatagtaaaaaactactcaaatcttaaataaaaaaatcgaaggaaataaccaactgatcacttgttgctcatccgtcaatcaaattcgaagttccactatacaatcctacgataccttggttctgaacttattaccaatgacacttttcccatcaggcatgcattcggactcaatagcctttctcgccctcagccagcggcagtgattcagattgtccctccatctccatagattgcacccatagtttcgctcttgttaaaagctcctcttcagagaccatgcatgcgaggaatgaatgaagaaagtgaaaaaaacaagtcacaaacaaagtctcatgcgattcgattggaactttatgggctgacctttgtcgatcgaccgagcctacctaatgggtaaatctgcccctgcttggcctgtgaaatatcttgcacaatatgttaaatcgagggataagttattttctgatgagattgtaatattgtatgcttgtataaattattcttgatcatatattgatatatagtatgccattaattagctaaccagttgaaaatttagcttattgctagaatgctcgtttctggcctatgttgcattgtctcttatgtttggatggtcatgcatcattaattcctgagtatatattgttcaactgatggactgtaattctttccaccacaaaatgcgtgcgatgatctgcaactgcaaaatgcaagcgatgaagcaacatgcgtaatgcattgcatgcccggcttccctcttctgcaaactccttatatatagccctccaaactccacacagctagtataccagtaaccaaatcaaaccctagctagctagctagctaagctagcacgcacccatggcgtcgtcttccacctcgagctcgctcgccgcggcagcgatggtggccggcgtcctcctcctcctgggtgccaccgccacgtccacccaggcggcgcgcctcctcgacgaagaactccccaccgccgccatcccggcgatccccggcgtccccggagtgccggcggtcggccccgggatcccggtgatcccccgcgtgcccggagtgccggaggttggccccgggatcccgttcgtgccggtgatccccggcgtgccggtgatcgtgccgatcatccccggcgtgccgatgatcgccggcatgacaaccctgccagtgccgccatttgtgccgccgattgatcccggcgccggcgccggattccccggcgtgccgccggcgtcgtcgaccaccgtgcaggaagacccacagccgccgatgccgtccgtcgttccacccgtgccataggtgttaatcaactccggcgagccaccatgccgtagttaagttataccgttgctcacgccgccgcgatgtgtgtactccggcggcttaatataacgtgcctccttactgtgtgttaattaagtactcctcctgtctaaaaaaaattaacttctctatgaatttatagacgtagttagaagttgattttttcttggatggtaagagtacatgtgttaccgtgtgttgttacgttaagttggtaatttgtgtactgatgaatcgtgtgtgtatgatgtgcactgtgcagtgcagaccaggtacgtacgtgtgggtcgcgtcacccaatctctgagtgctcgcaaaatttaatgtgcttaatgcacgaattaattatacgtcgaatattataggttttaatttaatcttgtgtaacccactattttatcactgtttgaactttgaatcatacgtgtctatttttgttgggatattagtcttgctaaggtgcataggaatgaaaatcatattagtcatgttttagttagtaaaggccgagttgaggaactactcatttctggccggacaatagctgtactgctatcgcacaactttgtttgtgtcgatgctttgattgaataaagtggtccctgtttcctccaaaaaaaaaaaagaaaatcatgcgtgcttatatgtgactgttaattttgggggcctagagcattccgggcaaaccggcctgaaatttacagcccaaaacaaatgttgggctttgcctatgcagcaatttttcgggccaaaacaaacaaccatgcatatgctgattttttttaattttttattaaaatatttacaaaactaattccatgtttcaaaaatttacaatagtagttgcccaccaccctctgatctgg

SEQ ID NO: 25852 - DNA, 5092 bp, Oryza sativa
  unsure (1)..(5092): unsure at all n locations
aaaatggcagccccctacagccggccgctaggcatgagccaacggccatctgccacaacacgaaaatcgctatttgggagggctatttctaaaaatcgtcctctcaaagagcggcgggtgactaattttgtaaatttttgaaacacaaaattagttttgtaaatattttaataaaaaattttaaaaaaattctgcatatgcttacgtcgtcgataaaactgacgaaaatactcctttagaaaaagctgacacgaacaaaacggttcaacagattgaagctgcacctaaacaaagaaatttcgatccacggatggtacggagtatgcactaacaaataatcaaaacaaaaacaacctcgtcgacaatatatttggccgatcgctacaactaaatctcctgccttggccacacaatttcagaatttatccttttgttattattccttttgggatcgatcgatgaacatcctagcaagcagccaagcatatatgagttctgattaccaaacatgggcgattaaagaacaaatttgttgcagctgcaacgacacaccgttctggccaaccaccgatctaaccggatatatattcacttaattagccttataaattgcgcacagattggctcgtgttcttcgcactcactgcaagaacagattaagaaaaaaaaacacacacacacacacacaagctagtcttgctgcaatggcttctagtgtgagcttcatggccacggccatggcgatggcgtgcgttctgctcgccgccagcagcagcagaacgtgctacgccgcccgcatgttggccgacacgccggcgacggcggcggcggcggccgcgcctcccgccgccctccctgtcctccccgccgtgccggcgctgcccaccactctgccgcccatgccggccatcccggccgtgccacaggcggcgctgccgccgatgcccgccgtgcccaccgtgcccgcggtcgtccctaacgcggcggcgctgccgccgatgcccgctgtcccggccatcccggcggtgccgaaaggtgtcgttgccaccgatgcccgccgtgccggcggtgaccctgccgccgatgcccgccggcatccccgccgtgccggcggtgacgctgccgccgatgccgtccatcccgaccgtgaacgtgcccatgccgttccaggcgccgcctccatcggaataggcagngnggcgaaccagccgtgccagtnnactgcggnggcggngnnngnnnnnnggnnncagtaggtaaantaagatttttcatgtgaaatttctcaatgtttgtgtgagtgtgttatttatttcatacttagtttgaattcttcttgaaattggggtccaaantagggttagnaattgaaactactagtgtgcttggcttaattgaagtgtacattatattttgggtacgcacggtctcaacgcatgtgttgaggtcgtgccattgtgttttacgtgtacgtgtacgtacggtttatgtatttgtttttactttcatactttcagagattatatatatgttactttactacatttcatttttaaagttcacaattgtactttcatgtttgaacattttggaactttgatgtaatctcgtgggcggcagctacgcagagaatatgacatggaaaaaaaaagtactccacttttcagttcctgacgcaggtcacataatccggtgcagcaaaatgcagcgctgcagccttgacggtctaaggaactgaaacgactaaaaaaaacaaatttaactaaaaagcttgcggcgttcttgtgtagttggattgtttttttttctattcgcgtagtcgaatttgactatgaaagcctgtttggtacagctccaactcctaaatattgctccgggagttgagtctgaagtggagttggagctgccttaaccagctccacaactctagtacattttgtgagagagctccacccaactccactctcagttttggtggagctgaaactgtttggctgagctcccgctccaggaggggtggagctggagttgaagttgtgccaaacagaccctgaatttagtcccggtagtatagtttgagaatttgatgaaaatagaggcttgcctagaaaagttcatgtgaaaatgagaaattttagaggtgtacatagagacatatcggtatgtatatatgtttataggggtgagtatgtctccgtgtatattaacgtctgcttgtgttacaaattgtttttacttctaaaaaaatatttttaactgttagaagtacttccagaagacactctttttgtctgtgagaaaagttgggctgccgccgaaggccgttttccatttcccggcccattaacgaaaggaaactgatattatagcccaacaactggatcgcactgctagttggccttggtccccttctaaaagaaaggaagataatctaccggtttgactgctttaaacacataaattggcataaactaatactgtgaaaacggtaatggaaatacctgactgcctgaagttcatttctgttttttatggaccgagccatgtagaaatgattataccgataaaattgaataaaaatgataaaaaaatggaaatagaaacggaaacgatattgatattatgtgattatgtcaaccgtttccaaaatctaccctgttctaacggaaaataccatttttatattatagtaattatcatatctactccaatatatatgatccatttctttatttgacccatagtttgagcatcatcaactcctcaaccaaatcagtataaattgagtgtatggttaaatgggagataaattgtaatatgattacttagtgtgacatttgaatttatttccaatattatatagtaaaactagagccaaatcttaataaaataaaatttgcaagcaaaattttctttggaccttagtgaccacatcctatggatgagatgttgctgtcagcaaagagcttaagctatcttagttctttgtcttcacaagaatggggacaccctgcagatcttctctgaagatgagaaggcactgccctgtaatctacatctgagctcccattggctcaaactcacctggctcaagatcacaacagcacagcctgcatcccaagaagaaaaagaaaacttctttttttttctcatcacaagatcacaaaactgcagaaaggaacagggaatggaaaacgtcagaatggaatgatccagaggggctagactagtagtagtagctagataaccccaagccgagctagcaatgatccaaatcccacagttgctttcctatggctttggatgttgggggcacatttcgttttcagattatgcccagatgcaagtagagcacatgtcgtttcaaattattccgaaatattactgtcttgaaagagatgctaacttcgcattgctccaaaggaatcgtatgctcctgtgtttcgtttcagaaataaagaaattttggttttttggcgcaccgttttcagattctttgaactggtatgattggaatgattttgcagccgattccaagggaacaaaactaaccacttcttgtcaaattaaaacttgcacttaaccaatacaatcatgagagtgatgacatgtttttttttgggtgatttcagaaacagaaccgtcagggtcactgttggtgagtttggtctcatatgatgaagtaagctgaattgaagaagggagaatcatttctggtcattgccctgccccccatagaaagaattttatgcgtatctccaatgctagtggtgggcaatacttggcatggtatccatcaaggcatcaagcaccattgctcatcaattttcataaaaacatatttatcaactacatactacctttctaaaacaaacactaaaaatatgctttgactctcaaaaaggtttcaaagaacattttatctaaggatcgttcctatgcttcaccgaaactatatagctagacaacatacaaaattagctaaggtggagctggtatacaaggcctgcgtagaggtcggatttaatccattgtcttaaaaaaagtatacaatgccttgttattaaaaagtaaaaagacatgggagatcctaatatataatgttttgtaaatatttcttcaagatttgtttatggtttagtaaaactcctcgggaaattccaacaatattttgggaagataccttgactaagaaaaaaaatccccaaagaacaaaaaaacactctacctcaggctgtcaaaaacatgccaggatgggcaatgtgatgaatagtcctattgaggtctctttctgtagagaaactatcgaaaaactaaatttatggcttggagcaaactcagttcagagtcatcaattatatgtttatcgcaacagtgagatgggaccaacatcagaaaggagagaagatttcctgtccaatctgtttacatggcattgatgcacaacaatgttcccaaataaaccagactctatggcatcaacaaatacctccaaaaattacttactagcatttttccaatgcttcctgtgtaggggtctgaatttgaccaaagataaccaatggaatcaacaggctggtgcagataattagctacctgtttaatagatcatcttgatcatttttttgcaaagaattaactaccccagctagatccacatcagtcaaattataatccagtatgaataaagtatattactacgacatcaacatgcatatgatgcattgatgcatacagtgatacaggcttacaacatcagttacatactcttaggctgtgtttagtttctaaaattggggagaagtttggagaaagttggtagtttgaaaaaaaagttaggagtttatgtgagtagaaaagttttggatacgatgaaaagttggtagtttggggaagtttggtgtgaagttaaacaggcctagataggagaagaaagtacagaagcagaaaccattagtttacagagccctaagcttgcagcagcagcagcagcagaagtagcagagaagtgggagagcgatgtatccattcctgcaaatccaagttggcaattccgagggccgacatatatcccactccaaggagatccgac

SEQ ID NO: 25853 - DNA, 17221 bp, Oryza sativa
tgttcccttctcaccacctccaagtacgctttgcgggacactcgcggcagcaagagttcgtatactcgcctctgctgctgctgcactgccgcgcctaaagctgagcaagaagaggagactttgcagcaagagttgctactgtttggtttggttcaggtgagagaggtcaacaatagctgttggcgtggctagttgcttgtgcagaaaaggattctcttttggttttgccctttctgagaagctgatgatgatgtggtggtgggctatggttgtgcaggttggggagctactagaagaaggaggaatagctaggttgggtagctcagctttgctctccttttattttttatttttttttctgtttgttccaaggtttcttgcatcactttgcggcttatcttgttggttttccttctattttaaggtgtaaagtttgtctccttgtcttggttgtgcttgctgttcttgtttgtttcaaccaacttgtgcagttatacttgatgcttaatgcttctttttttttctttttctatgtggtttatgcaggttgtgaatttcttggggggacacaagaatcgtgggatggatggcaatgcgagatcggcggcgaatcagacgaagcaaatcgtgtagagatttcatctgaaacccaagaacggattcgtcttgtgttgttgccgaatggtagtgacctgacctgactctgtgtgcatttgctccaatggcgatttgcagcacggacaacgagctggtggagctgctatggcacaacggcggcgtcgtggcgcagccgcaggcggcgcaggcgagggtcgtctcctcctccggccgcggccagagcgccagcgtgctcaccggcgacgacacggagaccgccgcgtggttcccggacaccctcgacgacgcgctggagaaggacctctacacgcagctctggcgcagcgtcaccggcgacgcgttcccggcggccgcggcggcggggccgagctctcaccacgctccgccgccggacttgccgcccccggcggcgaggccgccgatgaggagcggcatcgggtcgagctggaccggcgacatctgttcggccttctgcggcagcaaccacatcccggagacggcggcgcagcgctgccgggacgccggcgcggcattgccgccggagcggccgcgccggtcgagcacccacgacggcgccggcacgtcgtcgtcgggcggctccggcagcaacttcggcgcttccggcttgcccagcgagagcgccagtgcccacaagaggaaaggcagagaagattcagacagtcgcagtgcggtgatcttttttttttcgttggctgtaacctgcaacttgctatgcttgagatgaattcttgaatgaaactgatgagaaatttcaggatgctgaatgcgaggcaaccgaagagaccaaatcgtcgtcgcggcgatatggatcaaagaggagaactcgtgcagctgaagttcataacctgtcagagagggtgagatcatcaaatacagctactgatcttaagagataaatttttagtagtcatcctaaaagatgatactgatgtagagaagaagggatcggatcaacgagaagatgcgcgcattgcaagaactcatacctcattgcaacaaggtaagaaacattattatatatgcatcttttttctgatcaggtgcaagtccatggactgatacagctatgttggtgagtggtggcatatctgatctatcctttgttgatatgattctcttttttattcaaaccttttgggtttactttactaactgcagttatctatatatttttcaattagaccgacaaggcatctatattagatgaagcaatcgagtatctgaagtcactccaaatgcaagttcaggtttgaactactgtttcttgtatctgaacttacatggtcctacatgaggccaattactagcacagattgagattgtcgaatctgtgcctcagatcatgtggatgactactgggatggcaccaatgatgttccctggtgctcaccagttcatgccaccaatggccgtgggcatgaattctgcgtgcatgcctgcggcacaaggcctaagtcacatgtcaagattgccatacatgaaccattctatgccaaatcacatccctctaaattcatctccagctatgaacccaatgaatgttgcaaaccagatgcagaacattcaactgagagaggcaagcaatcccttccttcacccagatggctggcaaacagtgccaccacaggtacaaaaataccatactgacaaagggaattttcaggcctctttgattgttcacctagattaggcattggtcatttgcaggtatcaggaccatatgcttctgggcctcaagtagcacagcaaaaccagataccgaaagcgtcagctagcactgttctgccaaattctggggctgaacaaccaccaacctctgatggaatttagaatgaccagaaacatgtaagcacttgcaccaatcagtacatctgcctatttacttcaaatgatgttgagataactagagctgcgtatcgctacttgtatgtattactattgttttcagccaatatatctgtattgaacacgatcggcaatttgtgccgtcactttttgtcagcttaagctttcagagcaactaggtaacatgaggacctatggacttacccatatcatctgtagtctgtttgttgagctcgaaatgcatgactagatgcatagaatatgaagccatcatcgtccagcttaaactttcacagtaacctgttagttcatgcaagctaaccagttgttttcatctgacctgtcatatgatggactagtcggtggctccaatctttttggtttttgacatcttctagcactgtccatgaaaattaacggttgtatgtctatttcagcgtcacgctgttgcatcaaatagaccacatgatagcaaagagttgctggtggataacttcagaactattatttatgatcttcattttcttgatattacaggataaggaattcaatgtaggctttgcacaaagggtcgtctttctggagatagctgaaaatattgacatgatgaacagattgcatccatattgctgttatgtatctcaatcagtatctgtctgacataaatgctacaagtgtctgtaaatgcacatagcatttccccccttccctaagatgctaattcccagtgtatgtactaataatccttataatatgaagtgccagtggcaatctttgcccttctttatcatcctctctaaattcttagaaatgtctttccttttctgggaggaaagaggaaatgttgaaatacttgttaaatgacaaccatgcaagcaacaggaaggcacaaaagaagccaggtcctacatgaactcattggataacaaactgacactgttcctgttctttaaatccaaagtacagctcaatcagagctcgtcttttcggccagtgctactgctggtgggcaaccagcatatgatacatatcttatctatgctttagcctaacacgactttctgtttgtggaaagatttggtgaacactgattgtctgattgtgtctgactgttgcacaaacgagccgacacacttattgccaaaatcttcagcattctggttctttgtgactcatgcagcagcagcaggaacaacaactgggagagcctgaggattatgtctgggaaccctaccaccattgcaaattgccatcatcccagcagaaacctgaaggtatacaggagttgccaatttctttttttgcctgatgttacagcactcaagtgcaggttattacatggtcctacctgcacatgctatggggggtccctgcacattgcaactggttcataggatcatatctactatctcctgagctttttttttcctgtctaccacaatgggatcccctggcactccttgctccacgcctcgccgctgttgctttcgcctttccgttattcttcgggattgaacagattgtcgcctgcgtcattgcagcgtaagaggaggaggaggaggatgatgcagccgggggcacttgctgagcctggacagtgatgtccatgtaaatgcaacctctggcttgtattgccggaacatgtacagtagaggtggtgtaaaacactttgctgtggcgttttactgctgtagttacttcttttcacctagttggcaaagccaatatatggccagcttatggaagtcctatttcgcaatcagctgcgagataaacagtttgcgatcactgctttgagccgttggatcaaccgtacattgacttcgaagtggaaggggggaaacaactcaggctcagtttaaaatagatttttaaaatagattattgaacggattgttgctgtagattatctactttattatagggataattaatcattttgatataacagataacttaaaacaagtggttaagcaatcttgtagatttttttttgataaaacatatttttcaaagcatggtgcaaataatccggtgaatagtctgaaaggaattaagtgtgccgtgtaatatgcgctcccaaaaggccatattgccgtaagcttcccttaagaacattgatgttttgttccataataacatgaatatctcctacatcattttagatgaaaaaagtagactcgttgatgttcatgtcagcatcttgtgtttattagggttctacttcagtcaccatctacgagcactagaatctgggatcgtatcctgtttcacatttataggtggagatttggagttcatgtccaagttggttgcatctattatctcttgttgacccagtcctctcaagttgtgttagtactgttgttccatgctaatagtgcagactgcagagcaagagaactgattgatatttcttttgttgtgataaatatagggctaactgcttgctgaattatacgagcttgggcattttaaaggaaaaacgagtggatctatatacaattcttattttctactacctctattccataatgtaaggtatggtcaaactcggcacagtatacaaaactattttttgacttataatttcttatatactataaaatttgtagcaacaaaattataaccatatcaaagtatattgaaatatcaatccaataatattattttcaacaaataaaattcaatttatattatactaatcgttagtgagatattttgaaagttaaatcttgaaatatgtgtgtgctttacattatggaatggagggagtacttctataaaaaaaatgcaattatgatttctatataaaactagaaatagagtcagatttcatatacaactcttgaaatagaaaatagaattggatgtcatatacaacttttaatttcttttctgttacctgtagtttgtatacaccatacttttaaaagtggaattagatatacatctcttaacttctcgttttatagataccaccaaccaatttacaccgctatattttaaacccattatgacaatggtcatttttttttctaaaattaatgtgagaatttctaagcaaacttggtgactcttatttgagttaccttaataataaatccaacgatcaacgttaattttagttatttatattttatttttttccttggatagagaacacattatttatttgattgagaaaatatggaagaactataaactcgtagatgtcaaaggacacagtaggaacaacaatatagatgtcacgatcagcgttcattttaattcctttttctttggataacgattaacgaacacgttatttatttgatagagaaaatatggatgaacatagtatatacaaaaagaaaaaaaaatgatttgatagagaaaatatggatgaacacagtatttgatagaaaaaaaattggcttcgcccggactcgaaccggagaccttcagtgtgttagactgacgtgataaccaactacaccacaaaaccaagctgctggtaagtccaaattactttaaataaattatccctatgggccagtacaacacatgctttagatgtaataaaatagattagctcgacataactactctatttcttatttagttttatcattgcaaatgtacactattacttgaaggtttaattaattaaatccatgcaattgtaaattttatggtttttaaaatctaccactatattcatgtaattggaaccatatcaccatgacaagcctaaaatcgaatccatatcacactattagcttgagacctgtgttaaatattttttctaccatactttttatggaacagaatgcccttctgtctccctgttttaacgaattttttagagacaatactattttaatagaaaattataaaaataggggtcagatggttgaaatcacaactttggtgccctgtcaaacaaccaaaatttgacaaggcacatatcaaacagccgcctattgaaatgtgattgttcgtcagggtagaagaaatacaagtgtaaacagaatatttcaggtagtaagaatatgccatttgacctccatcaatttttaaatatgttatttttagtaataatataaatagctacatcagttatggggtgcatggctgtaatgacatgttcgagaagtatcagatgtcaacgtataaattcaaacttgtgagtcagaaagtacataaagacgcagttttcatcaaagtgtaagttcaaacttgtgaacgacaaagtaaaaatgttcgagaagtatcagatgtcaacgtataaattcaaacttgtgagtcagaaagtacataaagacgcagttttcatcaaagtgtaagttcaaacttgtgaacgacaaagtaaaaatggaaaaaattaaaaagatttggctttgcccggactcgaaccggagaccttcagtgtgttagattgacgtgataaccaactacaccacgaaaccaagttgcagccaagcccaaattaactataataaacggatcattttgtgcctatgagtatgacagtgcaacacatgatttggatatatagaataaaataagatcagctggagttaattactctgttgactgttgcttatttagttttatagttttagataacccactaaaattaggtggacatgggtttaattaaaattatgccattataatttttacggttttaaaatctaccactgttattcatgtacttgaaattatgccatgacaacaatgctaaaattggatcatgtcacagtacacgcttgaaatacattttgaatctcctttttctaccgtattttgttatggaacataatgcccttgtcttcctgcttttaatagcctgtgggtagtcatatggatggcgccggtagtgaggactgagaagaaagtgaggagttcatcctgctcaagcccaagtgccgacctcttattgtccttctctaagggtttgttcgttttggaggaaataataatttaaggatttggacttttagggattaatgtctatgagtgtcatttgttttgtaggattagaagtagaggaaaaccaaaggaaaattttctttcctacatgtgaaaataactcgggaaaaaaagttgaaatatgacatcaaccatgagacaaaacgaaatgaggttcattaccatgagacatcgtaaaagtggatttttttttatccgagcgttacgcataaaatctgagtattatgaaataaaatatttctgaaagcaatttaaaaataaattgaaacgaccattacgccaaaaaaaaaactgagtattatgaaaaatttttctgaaacgaatttaaaaaaattggcttcgcccggactcgaaccggagaccttcagtgtgttagactgacgtgataaccaactacaccacgaaaccatgatgctcgcgattttaccgtaagaactccatatataacaaattccccatttgaacgaaatttacatataaacataagaccaattttgcatgtttataagactatataaatcctccgaagagaaagaaattaaggatctgttgatagaaaaatgaaacgaaattaggatgtggcctctcttggatgggtcggccaggccgaagaaacacgccaagctctctgcattgtacaagtgattcttgcctctcctctgcttcctcttccaccttcccgacgcatttcggccttgcagaaaagtatatgatactacaactgttatttctgatgtttcccatctgaatatttcagatgggctcaaaatacgtgtacggatcctaatttcctgtcatttgttcaaagattctagagatagcaaaaaaaaaaaaaaagacagcttaacctttttcaagaaaaatgtttttagcaggagcttcattcattcgagacgatacaacaaggttaagctgtaatacaaacttttacttatgaaatcatacacatctgtagtacctgaaccagaataccaaagaatctgtgccctcgcaaaaaaaggaaaaaaagaagaagaaaaaaacacctgcgaatggcgtcctaatccaaacttatgagcgtccgtgcatgtgcatgggcatggcggggtgatgccgactacctgttcacagtgatgcatccctcagagagctttcatttttcatctttctgcagggacggagggaattgcttcgatggccctctataacacaacactctgatcactgatcagtacagaatggactaacattccacaaaactgataaaaaaaatcattctgattcaccatcactgccagtgccaaatcccagtatagaagcagaatcatagtcttttttctttttgtgagaactaagcagaataatagtcacgatctgctttcttggatagagtaacttgtttgctgccttgctgagtgctcacaggcataagcataactgacacatggatcagttgttagtgaccagcaaacactgtgcaaaatcttgcaacaggaacatagagatagaactgctgcgcagcacatcacctgcaattagaagaaactgggtctgagattaaccatgcctacacgttatgaacttatgatgtacacctaacaataaaattcattggtttccctgatccttgtgggaaaaaaggggtacatatgctatggcatggaattacaggtgataagatcataaaaggagataaaaaaaattgataacagatattacctaaccaatttctggttcttggaagaaaatgatcaccaacgcgattttcataaaaaatatccagccatctgtacttggtgaatactgagaactgagagcactggttgctccttttctgattccagataactcctgactcgttcttctgaattgcctgtgcaatttctctccacttgctgctccctctagtaacattctgaccctttgtgtccaaaagaaatatcactatcaccctttctgaaataagctgcggcctgacctcataatagtgtcaaatactccatcatgttacaacttacgacagcacaacattgaaaactttgtttcaagcataattgtgctccatcaaccccatccatgggccaacatcgtgaacaatcccctgagaattcaaataagaaatcaaccttgtgacaggttgaagactagcagaagtggaaagagaggccatgagctcattgattatattctggaaacttgagctgaagttactcctgatcgattttatgtgctcaatggccaaatctacttccccaacatctattagacacttcaacaaaatgacgtgtgaattcacactctcaacattagatggaatacaagataaaacactcagtgctcctttgaaattacctgaaatatatcatggatgatattttaaaggagatatttaacaattaaaacatcactaatattattgaagaatcataccttgtttacagagtgcaaggataaacacagttaaatactgaactagccacttcagtatcctgcaccacacatttggtaaagatctccacagcctgttcatatttcttttcttggcacagcatattgatgactgaagtgtatgttgtgacatcaggggacactcctttctggaacatgcgatcaaacagttgttgggcttgttcactttcattgatttctgcaaattttgttatgagtatattgtaagtctgcagatttggactacagccactggtaaacatttcatcccacagcttcttggctggcctaaggaggttttttctgcagagtgactccatgagagaattgtatgatgaaatgtcaggctcaagtctctttcttttcacctcctttagtacatcatatgcctctcgcaccttcccagccttgcctaagaatgatactaccaaatggtaatccctcacatctgtacaataccccttatctaagagcaccctaaaaaattcccacatatcatcgcccttcccattcgtgcagaggctttcgcaaaggtgtataagcatatcgctgcttggaaatctctccttccctatcatgaacttgcagaacataacagcagcatcgacatcaatctcagacactgaacaaatcagtgcattcaacacgtcatcattgatagggaaatcccctaaaacaattgcctctgctatttcctttgcctcgccaatctgcctgctggacaacaatgcaaacataaactccctgtagtcctccttcctaggcgcaaccccgagcttcctcttctgcttcaagatcctaccttcctcttctgtcctccctgcttccctaaacgcctctgatacaactctataagctacaaaatctggcttccacccttgaaacctcatatcctccaaagcttgccaagcatcctcaatcctcccctcccgacacaaaccatcagcaaccattactgcaacaactgacctatcaactcggtccccttgatggcgcactgcctgcaccaaccgcagaacctcggccaatccatgcctcctccccacatttttgacgaacaccccgaaaccaaccgtgtcaagctcgacggccctcccgatcattctgtcgaacaccttgcgcgcggaaacgagtgacccggaggacgcgagcgccgcgagcagcgagttgcaaagcggcgcggggagggcggcggagtcggggacgaggccgaagtgcgcgagggcgtcgggaaggcggccatgtcggagcagcgcggaggcagcgaggacgcgggttgccgggaggagcgggagccccgcggcgcgggcgcgggagagcgcggcgaggatggagcggagggtggccgggtgggcggcgcgggaaggcgccgcgagcgacgcgaggtgcgcgtggaaggcctgcggtgtagaggtgggcgcggcggcgtggggagacggcggcggctggccggagatgccgcgcgcggcggcgagtcgcggcgggaggaggaggaagcgcgaggtcgctggcggtggggccatggtgtcagcgagagagaagggggcccgcaatgcccaccaagtagtcctcaagcggaaacacagaatacgccaaccctacaagaaggcgtaaaattaaattacgtaaatgatatatcgcttgtgttttctgggtcgcggccgcttcgagatcccacgcgcttgtctctttcttcttcttcttcttcttcttcttcttcttcttcctcgcgcagcctccaaattctccaaaaccctcgcgttttcccgcggcttcgcttccggggagaggagattttcaaaaataaattcctcatccacatcctcctcttcccctagctcctaggcagggtctcgtctcgactccgaatcttagggtttctcctccccgctccccgccgcgggcgccatggaggcggtggtcgtcgacgcggggtcgaagctgctcaaggccggcatcgccttgcccgaccagtccccatcgctggtgagcggccagatctcccgctcctcttgagattccgttggttatttgagaattatctgaggttttttgggtttggtttggttttggttggttggttaggtgatgccgtcgaagatgaagttggaggtagaggacggtcagatgggcgacggcgcggtggtggaggaggtggtgcagccggtggtgcgtggcttcgtcaaggactgggacgccatggaggacctgctcaactacgtcctgtacagcaacattgggtgggagattggggatgagggccagatcctcttcacagagccgctcttcacacccaaggtgataggcttcgtggttcatttgaacgtgttcattgttctacgctgtaaacctgttgatttggctgataactggtccaaattgatactcactcattactttacatgccgaaatgttaagctccgaatttttagggtcatttggtatgtctatgaggtgcccatagcgagtttaaacactttgcgtctaacttgctagctatagtctctaggctaactgccattatatggtcggattttgtcctaaatttatgtttcagtcaaactcttgtgctattttttggttatttgttgaatagctcaattgtaaagaaaattctagttttggaccaaatcggtatatgctctgcgttataaagtttaaatctaactcgattttaacgtgctatgtgcattataaaatatttaaaatttaaacatgtaatatttaaacatgtcctattgaccattgttcatgcttctgctcaagcaatgtttgttagctaagctgcagttgttcctgcatatcatttcaaaattacgatttactgatagatatgctacctgaatatcttgcattccttctagtgaatattttccagacattgatattgcacgaacgggaatgggtcctttgctccttttactagcatatttagacatttcatgattgtgtgtgattgcagtgctgtatcttgtgttgctctatgtaatcttgatggttgcatgaatccatagaccaaataaatgtcagtagtttcgaaaagccaagctgtgctaaagggaccctaagtatgcttcgccgttttgaacttcaattcaaattctttgttactactttacgaagattgtttcatttgacttcgctcattatttttattgtgaatgcgttgatttaactattattctgttgtttcaaattttgacagcatgtttcctcatcttttgttatgctctctccaggcacttcgggagcaactggcgcaacttatgttcgaaaaattcaatgtttcaggcttttatgactctgagcaggctgtattgtcactttatgcagttggacgcatttcgggctgtacagtggacattgggcatgggaaaatcggtaatataaccctacttttgtttgagccaatatagtagtatgtttttccttttaaattttgtgcttatttttatttggctaaagatcatgctttgctctgcattttacttccttatgcatgaactcttgccatataagcaaaactaaatttctctgtgacccaaccttttgttttaggaaaaatgaattgaaaaaacaacatatgttgtttgttgttctgtttgtatgcttctctctctatatattgtgtatttgtgtgtgttgagaggatggaggggggggggcataattccatactgacagaaataaaaggtacaacagaatcaaattcacctaatgaatgcttctaagtacagagaagacaactttacaagtgtagcatatcttatgttccttgtgtaatgcttgcatcccttttgcttctttctacattactccctccattccactatacaaggctttggatgcaaaaaccaaggaagctcctataactgccacagaattagggggctttaaaacaaccaaagcaagccaacgaatagcgttcactgcatgcatgtgcatggatgagaattacatgattcaaagaggtgccgctgcagctgccttcaatgcatgcatgcgcatgaacgagaataacggagtcaaggaggtgccgctgcatctgccgccctatattctggaacttctgaaaaacacagttaagccttgtataatggaatggagggagtatttatctactttagagtaaagctgcacatatcgaaggcttgctgggaaaaaagaatgatttccttttgagctcaaaaaatgtgcaacaacaagtgccgcccagtgattaatgatgtttgtgcatacacagaacatcatacaagggtgacagaaatcttgtgtaattgaaatgcttaggttactcttcttccattattattgttctactcattaaggtagtatacttaccatgattttgtttcagatttttttaaaatattcatttttatcttgctattttctggcagactattttatcttactattatttttctggcacactaacttaatgggaataactgtggagtaactccaacctcttttgttgcaggcatagataaacatttattttatttgttaaaagattccatttaattaactagattctgtaacacatcagagcaggacacagcaatacaaagctggccccaacggatgtatataaataattcaattccatctgtaaactgtatttatgttgttcagcattggctgtgtggtgtgttttgataaacaccgtttagtttcataatggtggggaagcagcagtcgttttggagcttaacgttgtattgacatcctttctattttaacagatattgctccagtttgtgaaggtgctgttcagcacatagcatcaaagagatttgatattggaggaactgacttgacaaacctatttgcggaagaactcaaaaaatctaactcatcggtaaacattgatatttctgatgttgagcggctgaaagagcagtatgcatgctgtgcagaagatcaaatggcctttgaagctataggaagctcatgccgaccagaaaggcacacacttccagatgggcaggttggttattgacttgctctatattggtcttttctatgtataatatagggcccagtattgactttgtttctgttaactgtatgtgttatgtgcaatctgtctcttcatgaaatgcatgatagctgtatgtcttaatctgttttggttgatcacatatcttgttggctacttattgctatgaatctgtgcaaacctatatttctgaacacttcttcccccaggttataacaattgaaaaagaacggtacattgttggtgaagctttatttcaaccccacattttgggcttagaagattatggaattgttcatcagctggttacaagcgtctcgaatgtcacaccagagtaccatcgtcagctgcttgaaaacactatgttatgtggtggcactgcatcaatgactggttagttaatgctactttacgctgtcggattcatcagtcttttacctcacaaataaaaggcatatacatcaactattatttgagcatttttagtcttgctattttgacattgataatatatatacatgtgaagagcattatcattcggtatgaaaatttgcattctgtatgagacttgtggagatgcaattatctgagccagtattgtaatgctattggtttatgatccatgtgagaattactattgtttgtttccttgctatgttccagagcaaagaaatgggaccactatggtagtttgtccatttgagaactcttgctgttggaccttgaacttttatttggagggagagaaactgggatcttttattatattaggaaacctcttgttctgttgttgtcattttgaattttgtcagctgtcaatattacactgaatatgtggtggaaaatttgtgtttggttagagtcaagagtcttacgatactgcagtctggtcacagcagtgcatataatcaatattttagtgaatacttgcttaaaatatgttttggtctgtatacgatttggtttggtggcactactgtagctttgcattcattagtgctttcttatgcttggttgcagattgatttaaatggcttttcatttcatgtcaccaaaaccatttgaaaccaattatttagttaagagccttataacttagtttcaatttcaaggtatataacctcatgctttcactttcaaggttttgaagacaggttccagagagaagcaaatctgtctgcttcagcaatctgcccatctcttgtaaaggtaaccacctccctctcccttcatcccaattccccaggtccaactctgtttgaccttcattaaccaaacactcgttcctccagcctccagaatatatgcccgagaacctagctaggtactcggcctggctgggcggtgcaatattggccaaggtcgttttcccgcaaaaccagcacgtcaccaagggagactacgacgagactggtccatccatcgttcacaagaagtgcttctgaataacagctcgccttggaggcatgaacaccttgcacgggtaggtgcgccctttactgttgctgtcaagtcttagtgctttcaccaccccgtgattggtacggttgtacgtgcgtgaccctaactcaaagccggatttgcctttcagggcgtggatgcacgaatctacagtttactggcatgtaggggcctgcctgccctgtgcttcaactcgctgtactaacttcctctgaagctgcggttctgagcaattcattagattcggttgtgcccgcggctgccaggtccagtttagatggtgtttgttacacttgttactagccattcaggatgcagtagaatctaacattggcatctatttattacaagttgtagaggattgtacctggcaacgctcgtaggctgcattcgtttgattgtccgttcaccgagcgtacggaaatcagttcattctgtgattctcccttccaattgctctctgaattctgtgtagctgtagtgctgtgtagcaaactacaagaaaacaaagcttagctagaagcggtattgttcttccaagttgattggcaatttgagctgtgctatgagtaattcctgtctgccttgtcggatgtcttctttttttaaaacttttctgaaggacaagatgcagcttaaaggttggctacgaatcttgcgcacctatccttttggggccttggcgccatgcaaaccatgaaaagaacaactgtagtctgagattgattgctgggaaaataaaagttaaaagtgatctacacaacctttcaatccaatgtcgtgatgtaatggcacaacaatgcagtacatcatatagctgcattatttagcttggattgtactaatgctgcaatttgcaggcatggt

SEQ ID NO: 25854 - DNA, 2679 bp, Oryza sativa
taattcagaagcctcaaaaacgggctgatcacaagtacatgcatatatacagccggcagggttgttgagcttatctcctaatacagagggataacagcaaactctatctagagctaacaaccctatccaaaccatatgaaacaatatttcacgtaaatcctaacactccccctcaatctcaacctaccaggttcagattgtttctaaacatctccatctgccttactgtcaaggttttggtaaagccatctgcaacttgatctttagatgagacatactctacctcaatgtcacaccccaatccggcaccgccgtacaacggcacctgataggagcgtgtcgcaggaaaaacggcgcgaaccgcttcctacgaaaccgcgatcacagtaccagtcccaggacatagtgctggtacccacggtgacaaatatgattcattgcaaaatccttaaaataaatagaggacttatttaccttaacttaggttgcagctcaggacagcctgagaatacaaccgaagacactgacgagaaaacaccagcaacagcagcagcagcggaaccaacgaactaacacccaacaccacaggcgatggctgggaaccaggacgaaaccctaatcttcacttcacttcatcttcagcttcagggcggaggaactatatatatatttatatagagcaaggatgagtactttcgtactcagcaagtcacgggaacttaggtgtttaatgcaagcttggaagagaggcaaggttgttttgcaaatcctttgtttgaaaacattttggaatcactaagtgatttatttctttttaagtttgggtcgagaggagacttgcgtctcgattcgacttaagagatgcttttcaacaactcaaatggtaatgtactgacccccgggtcagatcattacttatcggctcccagagccatttcacttgattaagcggctcccagagcctttttcatttttgcggactcccaaagttcagctgcccagcagcaaagcaatccgcttccactcgggaagcctagtctatgatgcccgcagacatcccgaatcacacagattcgtttctgaccactcaggtcatccatctgccacttaggctgattctggttacgattcccaattcacaacaacttttcacaaagcacaggcaaacaaatctacgcatcgggaaccacctcacatccgcccatgaccgtgggcacggctgttcgaacagttagttaacctctgcagaggggtacactttacccacaagacacgaacttactccagacactggccggtgttagaggtttgcgacaaagcctttccaaagctaactttgggtcacctcatgccacatagagggtctccttgaccaacatcgggccaactccggctttccttttaggactcccggatgccttcctctgtttcggactcccaggatgcctctacccccacatcccggctttccgcctctattgacatacaagattttccaaaagcagctaattacttagccagggtgtcccataccaccatgtggttgcacttgttatgcttgatgagtttcccaaaggaatcggttcttatatgcgaatacgggacagtgccacccaggcacagcacctgcatcgcgagttttcacaattcattttattttcaaacacgccgacaccacaggtcgggttttaaaggcttctcaaacccatttcccatattatcgacaaacaatggtgtatgtggaatatttggtatacgcgcttagagagaacgaataccgaggtaccacaagggtggagcgacaaggaatcagggtagtacgacctacaggaattagtgcgactactaggtaggtccgacggtttggcacgcaaaccgaggccaagcaagttgagtgtatgattctaataatgcaagttgcaaacaaaatagtaatgatttttcaattataggagcaattggtcaaagggtgacttgccttgctcaaggtcttcacgaagcttcacgaatcttcgagaaaacccgcgatcgacgaaaatccggtaaccgcaactatacgcaaacaataaaaaacctaaacaaaagaccaaaagaaagatcctatttagactaaataatagttccattagatagatctcaattttacggaattattggaagtggaacggggtcaatcggtgttacggatcgggagatatgaattttggaagtttaattggaatttgtggacaaaggaagatatttgtggaacaaggggaaattgatttatgaaatttatagaaataatattctcaagaatattattgacagtcacggacgtgcgggaccaagggaaatgattcatggaattttggaataaagaattgatttatggaaaaggaaatggacgagggatgtatattagacttttttgggcggcaagggcgcggcccgagggttgaaggaggctcggccgagccatttgggccggcgcaggcacgggaaaggcggcccattagggcgcgcggaagggggggagcggttcggtggaccgagtgcacctcgcgggttccaggtggggcccgcttgtcggtgacacggcccacggtgggatgggcgcatgcgaggtgcggcgctagggtttcgggtgcacgtggcttaggagcggtgcaccgggtggacggatggcggcgggcccac

SEQ ID NO: 25855 - DNA, 18716 bp, Oryza sativa
cggcttggcccggtcaaagccgaggtggcgccgacgtggcgcctacgtggcagccatgcaggccggcgggagaaggaagaaggggaggccgagatggacggcggacggcgggcgtgttcactggagcaagcgcgacggatttggtcttcggggagcacaccggagtgacgagggcatcgagaaggagcgagccaacggctcagattcgccggagggagttcgacgttgacgaattgcggcggcggccgccggcggtggtaaaagaggggatttgtcgacaggcaacgggagtccgattcaaagcggtgggagtatctatggtggtcgggaagcccatttctggcatcggatggggcagagcgacgccatggaggtccggcgacgagcggtggcctccgacaagagcgggcggcgacggcggcaagcctacggcgagcagcggcggcagtcggggcggcgccagctagctactggaaggctactcgcactaatgcccgaagctaagggcaggagatggagcgaggaaggggaacggaaggctaccgtgtcggaacgtgcgatgggagatgcccgacggcgcggggcgagctttcggcctcaggccggggaaggggaggaaggagggtgcccgcactcgtgcgtcacacgcccacgcacgcaaaggttccctcggtgtttggcgacggacggcgacggcaagaacagtgggacggcggcaatggcgtggtcgaggcgaggagcaaaacgcgattgattgggatggggagggatctcagtcttgggtatttatagcggtggggagagggcggtttgggggaggaaccgacatagggcggttgagggtgcaaggatggcgagctggcgcggtcaagaacgctgctggcgctcacgggcggtagaggaggtccagctcgggagggaaaaaggaaaagggcagggtggaaaggaggggttcgaccatgccattttggggagggagagaaggatgggagcgcgagctctggctccacgttttggacgcaagcgcacagaggtgggggcaagcggcagggcggcatgggcggctgcgtggcgcaggctgccagggctgacgcggcggcgaccgggcagtcggccacgcgcgggcgagcgcgcgcgcgacgcgagggtgcggccggatttcgaacggcggcggcgggaaatcggcgccggtgagagggagttcgacgagggagagagagcgagcgccctcgctcagagcggcgcacgcgcgaggcacgcgagggaggaaggagcggctgagggagagagatgggccgagggaaaaaaaaaacggcccacaacaaccgagggaggtaaattagactttttccgaggaaatcgattcggagggatatgagatttggaaattgaatttggatttcgaacttgaggcttggtctgacaaagcagggaggagtcaaggggaagcacccaagcgagaattcggtgtttctttggagcaaagttatactcggcggtccgagggattagatgagagggattcaagtgagacctatctttggagttgggacaatggtatgggataggttccaaaggtagatgggtagagggacggatagattgatagatagatagacagctggttagttagatagataggtagatcgatacatagacagatagatcggctgatgggtagataaacgaataggaagatcgatagacagatcgatggatagatagtaggtaggcagattgattagagagagggagagagagatagggacgaaagaatcgacgattgatttcaggatgttgatttcagagacttgaatcggaattggaatcttgaggtggtggattttgatggcgacgaaagggaacaacgatggagattgaattgagatccatggcacaacttagactcgcacacaaagaacgaaattttcgcaattaggattttgccgaattagtttttaatgtcacgcaaaaagcggagcgttacacctcaagtaacttgtgagcaactcgttctctaacaaaatgataatccacctctatatgctttgttctggcatgaaaaactggatttgctgttaagtatttagctcaaatattatcacaccataccttagcggctctaggcccttttacaccaagttcctgaagtaatgtttgtatccacataatttctgctgttgcatttgccaatgccttgtattcagcttcagtacttgatctagaaactgtagcttgttttcgtgcactccaagatacaaggttgggtcctacaaaaacatcaaatcctctagtggatcttctgtcatcaagacagcctgcccaatctgcatcagtaaatgcactaacaagcaaagaactagacttgttaatctgtagaccaagtttcacagtatgttttatatacctcaatatcctttttaccgctgcccaatgatctgtagttggagcatgtaaatactgacataccttgtttactgaaaatgatatatccggtcttgtcaatgtcaaatactgcaatgctccaactatgctgcggtactgagtgctatcattgggaccaaggagagctcccccttgacttgacaacttttcagagatggacagaggtgtattaactggtttacagtcactcatacctacccttctcaggacatctgaggcatacttttcctgtgttagcactagcccatcatttacctttttaacctcaattcctaggaagaagtgaagatctcccaaatccttcagtgcaaactcctgattcaaatcctgcagaagagctgaggtggccttttcggaagagctagacacaatgatgtcatcaacatatacaagcataaacatagtaactccattcttatcatagaaaaacagagatgtatctgattttgatgacacaaaccccagctcattcaactttgtacttagcctcgagtaccaggccctaggtgcctgtttcaatccatacaatgccttatctagtttgcacacatagttaagtgccttagattttacatatcctggtggctgtctaatatacacctcttcttctagaactccatgcaagaaggcattttgaacatctaactgacgaagactctaacctttagaagctactaaggatagaacagttcttatggttgcagctttaacaactgggctaaaggtatcttcataatctatgccatacctctgcttgaaaccctttgcaaccaatctacccttgtatctatctaaactcccatcagcctttcttttaattttatagacccacttacagtctataatattaattccctttttaggaggaactaaatgccatgtttcatttttcattaatgcataatattctttgtccatggcctctttccagttcctatctcctagagcctcagctaggttctgtggttccccagatgatgtaaaacaaccatatttgactgtgccatcagtataaattttcttttttctaatcccactttggagtctagtttttggtctagcattaatatcaccttgctctgttgcagcgataacctccggagccgcagacgatcctgccgcatcatgatgaggccctggcgatgtgtcacctccgagctggtggtggcttgcgatggagcgggaactcgcgcgggagctctgtacagccgacgacgtggcggctgctggttcggtgacggtcgcaggttgctcaggggcctgcacggcgcgccgctgatcagtacgagacggcgattctgccgccacttctgtttctgctgtgtgtaccccggtagatgcaccaggatgaattccatcaggttgctctgcattaatttctgcattgctgtcgctagcatctgtgtcatctgcagcatcattctcaaaagaggaatcagtaacaacaggtaggatattatgcatatgatcattgctatgtgctactcccccttgatcagatgcatgcgatgtaagatcagcaggaagaagggaaatttcagcacgtagacgcgctccagcatttggctgaagcttggagaaaggaaactcctgttcatcaaaggtgacatcacgggaaatatagacttgaccggttgccacttctaagcacttaaaccccttatgtaaattgctaaaaccgagaaagacacattgtttggaccggaattgtaatttgtgagtattgtagggacgaagattaggccaacaagcacaaccaaaagttcgaagagatttataatcaggttgttggtgaaaaaggcgtgcaagaggtgtgtcaaagtcaattacttttctaggcaagcgattaatgagataagtggctgcaagaaaagcttcgtcccaaaatttcaaaggcatagatgcatgagcaaggagagatagcccaatctcaacaatatgacggtgtttccgttcaacggcaccattttgttgatgggtatgagggcacgacacttgatgtgctatgccaatttgcttaaagaaggaattcaatttttgatactctcctccccaatctgtttgcatgcctagaatcttacgattaaattgtctctcaaccatgctttggaactctttaaatttctcaaaaacttcagacttaaatttaagaaagtagatccacacaaatttactataatcatcaataaaactcacataatagcgcttggctccaacggagtcagaggcaggaccccatacatctgaatgaataagttccaaaggattactagaaacactaaaaaacttaggaaatggcaactgatgagactttccctgttgacaagcatcacaaacagactcactaggagactcattgctacaaggcaatttattttgattaataaccctaagaacaatgggctttgaggcatgccctagacgaccatgccatcgctcgaacgatggcatcacagcaaagacttgttttattggatctccggcaggcaaagggtagagatcgcgccgacatggtccttcaagaattgtcctcctcgtgaccttgtccttaatcaaaaaatacttttgatgaatctcaaggaatgcataattatcagcaacaagtctatgaactgaaataagattttttgatgccttaggaacatgcaaaatatttttaagatggaggggacggctagatgtaggtacataggaatgaccaatatgctgtatatccataccttcaccactagctgtgtggatttggtcggtgcccttgtacttctcccgtgtggtcagcttgtccagctgcccggtgatgtggtcggttgcctcggtgtcaacataccaattggtgtcaacaccgtaagcgtgcgtcgcagcgcctcctagcttctcatcggggacgtagttctcgtcgtagcggtgccagcagtccgccaccacatgccctttcttgtgacagacttggcaggtaggtctgttgtcagtgccgccgcgtccattgccacggccgtgcccgccacctcggccaccgctgccgccgccgccgcgtccagtgccgcggccgcgagggttgccgccaccacgtccctgatttccgctgccacggtttccactcgtagcagcgcacgctgttcggatcttcaccctgttttcaaagccaagaagctgtgagtagacctctgcaacagtgacagatgcattcttggcgatgagtgcttccaccactggatcaaactctgaatcaagaccattaataatgtaagcaacaagttcttcatcatctattggctttcctgttgcagcaatttcgtcaccgagagcacgcatcttgctgacgtactcggtgacagtcgattggcccttctgagtggtggtgagagccaatctaacgttgatcgcgcctgcgtgagatcgtgtcgagaacgtgttctcgatcgtcttccatgccgcggctgccgtcggtgcgcctgcgacttgcgaccgaatctccctggtcagagaggagaacagaaaaccaaggacctgttggtccgtggcaaaccattcgccatacgccgggtttgggactctgacggtcttctctcctttttctccttccttctgctcaagctcggcttctggtggaacggatgttccgaggacatggccctccagtcgcgcgccccttagggctgtgagaacttgtgccgaccagagggagtgattttgcttggtgagtttctcagaaacttggacgccgaacaaaggatttgcaaaagcggtggaggaggaggaactcgccatgagatctaatatagatcgagtttttgctctgataccatgtaaagaacagagatgcaagcgtggagaacacctcagtgggtggtttcgtgttaattcagaagcctcaaaaacgggctgatcacaagtacatgcatatatacagccggcagggttgttgagctcatctcctaatacggagggataacagcaaactctatttagagctaacaaccctatccaaaccatatgaaacaatatttcacgtaaatcctaacaggacggcgtttcttccgccatcccggcgaaaaataaagagagaacacgtgtatgttttggctgtgtatatcttttatgtatacagaggttggactaatgaaaatccataattaaaacattgttagctgtcagagatggaagaagagtgtaagcagacttgatagcaaatgatggaaaaaatttcagaaacagcaaatgtagcaaagctgagattttctttatctttaattgtattgacacaaccccctgatttgtatcccaactcgtgcaagtttatatgcagtacattcgcattaattccatatttcaatttcaccatccgatcgagcaagaagaccaataactgataaactaccgcagaagcacatgcatcgaaggcccctgcaactgcaaacgtgagtctttgccaaatttccagtgtggttaagccaatgagtttactttcttgcacgccactgatcacaattcacaaccccatcagctagcatgtaccgagcccgagtgcttcgtgcgtgtgtgttcgcttgtccatagccgatagaaatcggaggcaactccggctttccgattctggatttcttctgaaactgaaacggacatcgacacagctgacagcgccgagttcgaatcctacccccgtataattccacccctatatacgcagcgcgtctcgccgcctcgaacctcacagcgaattctgatcaccaccccaccaaccagagttcaccacgatcggttcgatactttgatctacgcacgagcgccgccgccgagaacctcacgcacgcagcagccgccgccgaggaggaggaggagagcgccacgccgtccatggaggactgggtcgtcctcagcggcagcgacggcggcgacagcgtggagctccacgacggcagcgacgttggtggctccgacaccgagagcagcttcgcggtcgtgcaggtccgcggtcgtgccgctgacacgccggcgatcgccgtggaggccgtgccgtcgcaaccttcgccttcgccgccggggttctttaagaccgtctcatacggccaggcgttctcgggaatagcttccgagcacgtcgcagcttcttctcacgctccggtgctcgacgcggcagaggaggacattgccgaggtgtctccggtgatcgtcggaggtgagcacgagaacgccgagatatctgacgtggtagagagcaacaatgaccacgtcgactccaacatcgacgccgccaccgaggtcacgaccttctccggcgaggaggacttggatgatgagaccgacggtgacattgaatgttttgatgaggaggacggaatctgcgaggagaaccccgatgatgaaatcttcgacgacgaagaggaggagagcgatcccgaggaggaggacatcggaagctctgacttggagactgattccgatgagtatatagaaagcaccgacgaggagagcgattacgaggaggaggataccactgacttggaaagcgattctgacgaagatactgaaagcactgaatcttcccatgacgaggacgacctagatgatgatgatgaaagcctcgacgacgatggctctgaatgctttgatgaagaggacaaaatcggcacggagaacccggacgatgaatccgtggacaccggaagctctgacgaggaggagagcgacgacgaggaggacagctattctgatgaggagattgacgacgaggaggagagcgattgtgacgaggagatcgatgaggaggaggaggaggagcatggtggtaataagtacgacgccattgacaacgaaagcttcggtgaggaggagagctgcatggagcagagtgatgctgaagaggagtggccggagttcaccggtgtccctgtcaggtacaaagacatcgacaccgactctgacatggagatcgacggcggcaagtcggggtcattggcagtgagagcttgtatgaggaggagagcgtctccgacgagcagagtgatgatgaggaggagcccgaggagttcgccggtggcggctacgatggcatcgactacgaaagccttaacggcgacgacttcgaggagtacctgcaggttctcgccgatggtggcattgacaatgaaagctttggtgaggaggaaagcgtcttggacgatgaggtcctggatttcttccatggcttgaacgatgagttcctggatttcttctatggcgacacgctctacgactatgaaactgaaagctcctgcgacgaggagtgcgagcacgtgtgcgtctgtggcgctgcatggagctcatcgacggcgaggagttctatcagctgatcaccggagacgagttcgatggcacgcagctcggagaggagatcggtggagacgcaagcggcgccgacgaggaggagccctctgacgccggtgagagcgaccacgacactgctcccgacgccggcgatggcgaggcgcacggcgacagcgccgacatggcaggcgggaatagcgcggcggcggcggccgagccggcgtccacgtcgtcgcagttccagcaggcgatgcaacaagcggcggctcggaaccaggctgcagcggcgatggtgagggcggccgacgcgatcgattcgtacatgcaggccgccgccggcgggctggcggcgcaggacgtggaggcgctgtcgcagggagccacgggcctgcgcgccatggcggccgcgcccagcttcgccgttggcgttgacgttagcgcgagcaacacggcggcggcggccttcctccctgatacgctcgcactccaagacggggtggtttcgcttgcagtcttctacctgctctttggtgtcgtgtaccttcttctgcgaatctgcgcattgaattagaattaaggatttattagggagtgatgctgataaagtttgtggtttagtactgcaaatatcatgttcttttattatatatatggtaattcctccgtccttaaatatttgacgtcgttgatttctttaaatatgtttaactgttcgtcttataactattgtgaatattattcaaaaacttaaattacttaaatttaaaaatgaatcaaaagataataattacttaaattttttgaacaagacgaacggttaaacatgtttataaaagtcaatgacatcaaatatttagggacagagagagtatatatgatatgaatcatatgatcgatcgtgatagtattgttatgaaacgatagacaaataaacgataaagaataatagatcaatcaagacacgagatttaacgtgaaaaaccctcccaagacaggaaagaaaaaccacgggcaccagtcagcaaaatatcttcactatatctggggtgaggttacaacgccgcacggcggcttacaagaggtatatatatggtagaaaccctaaaagggatgacgatccgtacgctccggcccaaatctaccggcgacgggcctatgctccactacggtagaagctagtctttattaagtgcaaatgaatttggatcacaactcaacaggtatatgtcactcctaatttggctgttttttcttgaaatttctcaagttgtatatatgtagtaagtacaaacaaaatccttgaattgggtttagtcggaataaatttggtcgagattcaatcgaagaaaacaggggttgatattccattatatttactagtcttattttggcaatgaaagtttctaaaaagcaaaaaaaaatcaggcaatgtaatactactattaatataacgtttaaaaagaaagaaaaatagtttacatatggtgatatcaacgaggcaatactgccccattgtaaaaacccaactcactgaaactgggcccaaccaaacgtggtccacatccccatcagagttatgcactactccgtgttcaagttacaaaattttaaatgcgcgatttgtaggggatttggtacataagatggcaacttacaataactaaacgcatgaaccaagtaacgtaacaagagaggactcgtgaggcctatacatgttctccttatcatcagcagcaaagagagccggcaacgaaccccaaaacacaaacacaaacaggttacaagtccttaatactcaaggaaagtagatgtcggtctcggtcacggtcacagcctcaaacgcggtcccaactccgactcacgtctcatgtcgtagcggtgttcccaacgacgaatttccgtctcaactcggattcttgcttctgaaactgaaacggacatcgccgagttcgaatcctacccccccgtaacgtatccacccctatatatgcagcgcgcctcgccgctttgaacctcatagcgaaatctgatcaccaccccaccaaccagacttcaccacgatcgcttcgatacttcgatctacgcacgcagcagcagcagccgccgaggaggaggaggagagcgccacgccggccatggaggactgggtcgtcctcagcggcagcgacggcggcgacagcgtggagctccacgacggcagcgagagcagcttcgcggtcgtgcacgagaacgcagagatatctgacgcgacagagagcaactatgaccacgtcgactccaagatcgccgccgccaaggacacgaccttctccggcgaggaggacttggatgatgagaccgacgatgacattgatcaatgctttgatgaggaggacggaatctgtgaggagaaccccgatgacgaaatcttcgacgacgatgaggaaatcgactgcgaggaagaattggatgatgatgatgatgagagcctcgacgctgatgacgttgaatgctttgatgcagaggacataatctgcaaggagaacccggacgatgaaatcatgtcccacttattattaacctagctagtaccaatttagccacgtacatcgatcccatgtacagccgcatctaattatcgaattattctgcatttttacccctactttcggtcgttagctgtcagaccttttatgttttgcccccataatttcgattgcgtctcgacacaatgttgatcgtggttgtgcatctatcagttattcaactaattcacaggctctccattacttatctagcacctgcctagttgtctttggactctatatacatattatttctgctcaccacttgcaacttaatttgtctcttcgttgtacgcactcgcactaagcttttgcatgaatagaacaatatggttaagaaaatgatagagagctatgcatgggttcttagggatggaaggcatctgcaggagcattcttgtgagaaatgtacgtgataattgctattggatagagagaagtgggcgtgaaaagcacaactcatgcggaaaaaaatgtgtagccattaaaatgttaagggtgtgagagatcttaattaaagagaaatgtttttgtttgacaccttaaacaagagatagggtgtgcatacaagaaagagcccgccattcatttgcaaaatagaaaacaaatattccctccgttttaggttatgcgacgttttgactttaatcaaagtcaaactgctttaagttatcgagtttgtagaaaaaagtaataatattttttctataatcaattatatttaatttattatgaaaatatattcaacttaagtttgaccaagtttgtagaaatttattatgaaaatttattcaattattgatttaatgaaattagtattataaatattattatatttatctataaacttagtcaaacttaaaatagtctaactttgactaaagtcaaaatatcttataacctaaaacggagggctacttgattgcacactccgcaggaacaaacaacgacaaatatctgttttttttcccttcacgttatcaactaaatgtccctgcgcagttcagttacctgcaccggcgtgtcatcatctctcaaacagtttactgtttacagacttagcagcagcattctccttccatgttactggctgactggtgaccgactttagaaggtcatctgtggaaccatcatttcggttgaaaagttggaacatatctgcttcgaaataatggaactttttaacgtgatgttcttagtctgccgatccattactccctccggggatatattaattaaagttttagacaagattgaggttaaacttttataactttaacaatcaataactttaaaaatatttagttcaaagaaactagaacaacatatatagatttgtctttcaaaacactataataaaagtaaacatgcatttatttattgtatatattataatagaaaaataaggtcaaaggtatgtctcgtagagcatgtcattgtccaaagcgtcaattaaaataaaaccggagggagtataatgtgatgtttttttccggcaaggcctgtaaataacaccttactttgtttgtttttctcctgctttatcaatacatacgagacaaagattttaacttctttttgaaaaaaacaaatctatatttgttttttttacatgggatttgcatcattgggttgctcgatcgaacatctccaaaagaccaaaatagtcaagaacgattcgatttttactgtagttttgtcccccatcaagtagcgttgcgcattatcccgggaaactattctaatccctcgaggggatgttccctcgtttgctcaaaaatcatttaaacggttatgaaaaattctggaaaaatttgacaacattcatacaacacatatatacaacttcacaaaatcttaagtccaaactcaactcacacttcgagatataaaaaagacaaattcagcgtatgaatagtagcgtactgtttatatctaaatttgtctttttttttctcgatgtgtagatcgaattggaacatgaattttggtggactagtaggtatcattatactctacattgtcaattttttttagaatttttcacaactatttgtatcaaatttgaaagaaaaaggtatacgaggggatgtcccctcgagggattagaatccactccccattatcccctttcttgacatatgtcggccagtctaatccttctctccttaatcacacaaatatattgcttgctcagacagtcaatgatatgtaatattcataactataataaaaagaattgcatgcatcctctaaactttggatgaatgtccatatagaatcttaagttttaaaactgaatattgacaacccctacacgcacagcgtaccccgaagtcccgaacgtcacaattcgtccattgtgtctccaactcacaaacataaataaggtttcaacagcattcatgtgcgtcgctctcccccaggggcgactcgggaggcgaacccggccgccccctcctcccctcccccaccttcctcctccgcctcgccgccgcccgagtggccgccgagccacgtagccgcaaggacggcggcggcggttgggcttcacgcctctccctgcgcgggcggccaggggagcctctagtgcagcggcgatggtgactgccagatcctggtagggtggcagctggcggcggggacagcgatggcggtgggagtggagacgacgacggtaggggcgaggggatgtgggcgatggcggccggaatggtgacgatacaagaaagagagcccgccattcatttgcaaagcagaaaaaataattgattggcaattcagcatactgcagcaaaacatgaataattaatcaaattagttatttttttagtaatgttctgtgcagcgtgaaaaataaacagtaaaccgtgcatacacagatacacgtaaactacttcagtgaaagtgaagataatatcacacttggtaaactattataaattttcgagaggacatttactcgttgtttgcatgtcatctaaataattataaatttttttaaaagaaaatcaacaagacatattaatatgtgaaaatcactctacaaacatgcaagatctaatttaacttctataggttacaacgtaaaaataaatttaactgtgaatatacgttaactagccatagccatagtttacagctagcttgctagttacccaaccatttaacttgacacgtacaaccccatgaaagacaacgagaatagcgccctagcatgccctcccccccttttttttatagataatgcgccctagcatgttctgatgtagttttgcctttccttttccttttttttcttttcttcaccctgggtggttatataaagtttttcccctacttataatataatataaaaaataaattttactgtccttagcaggtatatacctcctcaataactgtaaaattgctctaatataaaactagcaacgcttggcatcgtacagtcctattggttgcctaagtgacattgaatgctatgatgtagatgatagaatctgctaggagaatccggatgatgaaatcttcgatgacgaggcggaaatcgactgcgaggatgagatgagagcctcgacgacaatgacttgaatactttgatgtagaggacataatctacgaggagaacccggacgatgaaatcatgtcccacttattaacatagctagtaccaatatagccacgtacatcccatgtgcagctcctgcaaaaagagacaaaaatagtgatgttatatctccaatcaagtagtttacaggcataccgagttagtgaaattctttttcaaaaaaaaaggaacccagttagtaaattatcacgaagaaaatagaggatagactatatataattattcgtggtgcttctcattgtctgagaaagctagaatctttgatgacagtagttttatgtgtggtttggtggtacttgatttttcagtagagaacgattgatcaagcacctttctcagaaattatccggatgccttccactcctagtaggaggccaatgcaatgctcaaacatttctcacccagctacactcaagcacagctgttctatcagtgtacaatatgacagcgtcttcttctgtcacttctcagttatcaggcattagacaaggtatttgatggatcagattcagaggatgaggtgagaagcagccatgaatgaggccatgtatatataaagaagatggctggcctgttggctgcacgttagttgtcagagatccaagaagagtttaagcagagttggtaggatcgaattgatggaaaaagtttcagaaaagagctagcattgttgaaattacagcaacctttgttccttttatgttgtgctcgttttctttttgggcctggcttttttttatatatataatgggcagcgtccggcctttgcattataagatgaatatacatggccaattttgggcctggctaattggtcatttttatgctatttaatttctcaaatacttgaatagctgcatatgaatacgctgccaaaataactgcaaatcttttctttttccaggaattgtacatccttctcttcgtatttgagacgaactctactcctaaaagcattcgttaatgctagctttatctatgcaatcaaccacaaatgtttactcatctggctacaagttttgcaacgacgagatcatcctgctcaaccgtagtttcttccaataatgccaaaatggccgagtctaatccagcaaatccccaatcctgatcaactcgtctagttatgaaaaaacttataatctaaaacgtttgttccagagtctagcttggattcaagaactgagtctgatcgtcagtgtggactgtatcatgccatcgactagtccagcatcaatctatatcgcgctggtgtctggttagtgccacaaattaagcattttgtacctcatctagagagacgactggtgccgcggtcctgcataacatgacctaggaaactgaaaacacctagtactgacatgaactgtcggtaaccaaattcctaaactccatcaaccatcctacccttgtgtaagggattgtcacgccccgaactagtcccgaccggaactagcccgtgacgctccaaattaacctgttaatcgataccagtcccaggaaacaatgctggtatcacagggagacagagtatcacagcaacagaggtctctttattatagagtagaagtacagtcatgttgggctgcggactgatcccgagctcacaactgcattacaaaaggaaagcggaagccaggacttggaccaatcatcacaggcgcgacttgggaactaggccgaaaccctaaaactcatcgtagccgacttgctcctggaagaactcctcgtcagcaggatccgcttcatcttcttcagcaactgggggggggatatttatatagaacaagggtgagtacgggagtactcagcaagccaggggaaggctgttgtttttgcaatttggttttatttgaactctttttctaaaacgactaggtgagtgcttctcaaacgacacggatgggacagtgcgtctcgtccggtcggagtatgtgcaatgtatcagtctttagatcttgaaacagggttggcattcggccaacagcttttcaaacggcctcccgggccaacaacttttcaaacggccacccgggccaacaacttttcaaacggccacccgggcctagctgatcccatcagctacagatttttcaaacatcgaaccccttttcacaacagcaatttcacaagcagtagtcaaacaaaactacgctaggaatcacctcacatccgcccttgaccgtgggcacggctgttcgaacagttcaatgacctctgcagagggggtacactttacccacacgacattactaacccgggtcacccagcccgtggggatcagccacgtcgggagacctccaagctttcatgacaaggcatttcgaaagccgatacaggtttaccatatgccgacgagaggggtcccagaccaacaacaggttaggtcccagaccatactgtgccaggaagcccaggggtcctccccgacaccaccccggcgaatccacatgtctctcggcatcaaggctcccctgataagctagttactcagccaggggtgtcccattccacccatgtggttgtacttgtcttatgtttggatgaaattccaaggaatcggtccttaagtgcgagagcgggaaaccgtacaccccgtacgttccccggtccgcggttttggaaattcatttagttcgcaagcaccgacccgggtgtcgggttttccaagtcttttgtaaaactccagttttacccaagttgttactcagattttaagttcgaaggcgaccgtcgatactcgcacagagtgcacgaatatcgaggtgcaactgggtggttacaaggggacatggtataacaattaacaaaggaaggatcaaatgtaacaaattaggtaggtctgccaatctgccttgcagacgggacaacagattaagtgtgatcctatcaatgaataatatttcgcaagcaatataattaaatttcaaatataggctcaagatgttcaaaggtggcttgccttgctcgagatccggagcttgatcctcgaaatcctcgcactgcggatcttcgggctccgaaactacacgcgaaacaggacaactcaacaaacggcgaaaataaagccctattaatgacctctaagcgtgtcattagatagatctcgagatttgaggaattttggaagttgaacggagtcaatcggatttacggttgggaagatattgaatttctaagattattggatttttggtctaaaggaaaaaggatttatttaaatcctttttgaaaaagaaaaaagaaaagaagggagggagggaatatagacttttctcggacggctagggcgcggcccaagagaaatggagcggtccggccgagctaaatgggccggctggcccaaggcggcccaaactcgcgcgcgcgcgggagggaggagatagagagccggtggaccgggctcaccacgcgcggtcccgggtgggacccgcttgtcagcggctcggctcaccgtgcggagggagcatgcgacgcacgcgcgcgggcggggacgggacgcggtgcatgcgcgcggtccgcggtggacgcaggtgcggcgggcccacgcgcagcctcacggctcgcggtggatcgcgcgcacgcggagggaccgaccggggtcggcccgacccggtctggctgagctggcgccgacgtggcgcctacgtggctgccacgcgggccggcgggaggtagacgacgacccggcctcgaatggacggcgggcggcggcggcgagcggcgaagcgaaccacggcgatacgggcaaaagcgtgcacaccgggcggttgcacgtg

SEQ ID NO: 25856 - DNA, 893 bp, Oryza sativa
gtcggggaggacccctgggcttcctggcacaagtatggtctgggacctaacctgttgttggtctgggacccctctcgtcggcatatggtaaacctgtatcggctttcgaaatgccttgtcatgaaagcttggaggtctcccgacgtggctgatccccacgggctgggtgacccgggttagtaatgtcgtgtgggtaaagtgtaccccctctgcagaggtcattgaactgttcgaacagccgtgcccacggtcaagcgcggatgtgaggtgattcctagcgtagttttgtttgactactgcttgtgaaattgctgttgtaaaaggggttcgatgtttgaaaaatctgtagctgatgggatcagctaggcccgggtggccgtttgaaaagttgttggcccgggtggccgtttgaaaagttgttggcccgggaggccgtttgaaaagctgttggccggatgccagctgttggccgtttgtaaaactccagttgcacctcgatattcatgcactctgtgcgagtatcgacggtcgccttcgaacttaaaatctgagtaacaacttgggtaaaactggagttttacaaaagacttggaaaacccgacacccgggtcggtgcttgcgaactaaatgaatttccaaaaccgcggaccggggaacgtaccgggtgtacggtttcccgctctcgcacttaaggaccgattccttggaatttcatccgaacataagacaagtacgaccacatgggtggaatgggacacccctggctgagtaactagcttatcaggggagccttgatgccgagagacatgtggattcgccggggtggtgtcggggaggacccctgggcttcctggcacagtatggtctgggacctaacctgttgttggtctggg

SEQ ID NO: 25857 - DNA, 697 bp, Oryza sativa
ttcctgcgccccaaagtcggagggctcgccgggatttcctacgtcctgaacggggaagtgtgcaaagcatgcagcaatcgaaatttgcaaacctcggtgtgaagctcctgctggcgggaaggcagagagatctctgccaggtgtggctcagggtggacagggtcggtgacgttgtccacgtcagttgcaccagcgtgatgacgccggccgccatggcgactgtgccctcccctgtcgcactggcgcggggagcgtgtgcgttcacggcggtaatcttgatcaatcgcacgttgttcgccgcggccacgcccgaagtctcgtccccgttcgtcccgatcgtcgtcatctcgatccctgctccgccagttttgattagccctggggtggtcgttgttgtgcccccggcggcctcttctcccgccgcgggcacggtcgtcatggtcggccggggcgtcacgatcatcatcgccgcggccgtcttcttcttcatcttggtcttgctcgatgcacgccgcgcatccgcggcgagaccgatcacgcacccgcgcacgaccgccgtgatgtgcgccgtcgtcacccctgtttccccgctctccgcgctcagggcgacgcgatccacggagctcgtcctcccgatcgtggtcgcccaggcggtcgtgaacagagcgcggcggctgtaggtggtgtgggaagtcct

SEQ ID NO: 25858 - DNA, 1202 bp, Oryza sativa
agcctgattttcgttttaggatttataaattatctaataaattattaatagaatttatattaaatattcattaatttacaagtgaagttaaatgtgggaaaaaaatttcctaaatataaagcatggctggatttaatttttattaaattctccatgattaattatactctctgaaattttctcggatttttcaaagctcaaatcctaatcttaataatacaaataatatttcagtaattagttaatcattaaattaatcaattaatgatctaattataatgttaagtgcttttcttgtttaaatatccttaaattataaattgttgtttaaaaggacttattagaaatgatcttaaaagcctaaaagagaagatctaattttaatttgttaaatctcaacataaaagtgggctagaaaaaattttgttaaatatttctcttgtttctatagttcctagatttttctgggatttatttgagctaaggaagtatttttaatccatggaatatcatttcatgaataatttaaatagaaaaaggttttaaaatctcccttgtggctttgggcccaagtcggcccaagtctctcccttcgcctcggcctgctcgcgcccggcccaagccggcccagtccgccgcgccctccctcctctctctctcggtgccgctgataggtggggcccacctgtcagtagtcttcaacctcgcgccgccgtaaccgcgccctagccgcccgagccgctgccacccttccaaaattcggccactcctttccttctccggccaaatcaattgaggggaaatgatcctcgggatctcctcttttggaatcttcgtctagtttcgtttggaaaccgacggatttgagctcgattcggatcgatctctctcctctaaccctaaaaccttccatctcgccgccggtcgccatgggcctccgtcgccgcctcctagcccctataaaaggatccccgggacctcctctctccgtcgccaacctcgtcttagcttgctgccgctcgtagcgccctagccacgagtgcccgtgcgccgccgccgccgccgtgagtccagccgtgcgtcgccgccgctccggtcgtcgtcgtcgctcgagaaggccaccgtcgggttcatcacgtcatcgccgacctcgtccacccctctgtcgtcaccgaggatcgccggaagaccgccgtcatcat

SEQ ID NO: 25859 - DNA, 717 bp, Oryza sativa
gtcagaagttcagaacttcatcagatagtactgtcagaaatccccatcgtcagagagttcggagacgtgtttccggaagaactacccggtatgccgcccaaccgggagattgagttccggatagatcttgctccaggaaccactccgctgtacaagcgaccctaccgtatggcagcaaatgaactggccgaagtcaagaaacagttggaagagttgaaagaaaaggggtatatacgtccgagtacttccccctagggtgctcctgtgatttttgtggagaagaaagacaagacgaagaggatgtgcgtcgactacagagctctcaatgaggtcaccatcaaaaacaagtaccctcttccccggatcgatgatctgttcgatcagcttaaaggtgccacggtattctccaagatcgatcttcgttccggatatcaccaattacgcattcgtgaagaagatattccgaagaccgcattcaccacgcgatacgggctgtatgaattcacggtgatgtcgttcggtttaaccaatgctcctgccttcttcatgaacctaatgaacaaagtgttcatggaatacttggataagtttgttgtggttttcattgatgacattctggtatactcacaatcagaggaagaccatcagcaccatctccgtctggtgttgggaaagttgcgggaacatcaattgtatgccaaacttagcaagtgtgag

SEQ ID NO: 25860 - DNA, 5306 bp, Oryza sativa
  unsure (1)..(5306): unsure at all n locations
attaagcaaagtatttaataaaattttatctggccccattttatattggaatttattaattaaaattagatcttctcttctaggcttttaaaataaattctaataattccaattaaacaacaatttatatatttttggatttttaggatgtgacagcggtcctcggctcaccctaggtcgacggcgacgacgaaaaaggctgtcggagcggaggaaggcggcggcgcggctcgggtcgtcggggtcgacggcggtccggcggtccgcgggctcagcgaggggttggacggggtcgacggcagtgcggcgaagccggaggaggcgacgccggggcgggagacggtccggcgagcggagaaggccggccggaggtcgtatgcgactgatgaaagagagagcgacggcgcgagctcgattccggcagggagacggtgcggcaagggccgaaaccggcgaaggaagccccgggagggtttatatagggttgaaaggggagaaggccgcccgaagggaaagaaaccggcgcggcgctctcgggctccatcaatggcgccggcgggattaggggagggtttccaaacgaatccaagggagagagggggggaaaattgggggaaaagggagagggaatcacggggaataattcccccttattgattgcacgcggggaggacggaatgcggcgtattcggcgncgncgncgcggcggcgcttggcgcgggcggagaggcgggagcggcgggaggaaggggatgacgggtgggccccacccgtcagcgagggtggtgggcgggcccgcccgtcagcggcgcgcgcgcaggaagaggctggatgggccgcgggggagaggagaaagggggagggagatgggccggattcggcccaagagagggaagagggatttttagggtttttcttttttaaaaccttttcaactttgtttatttcttaataattattatttgtgctctgaaaattccactaaaatttatttacgcattttaagcttttaggaaatttacaaaaatcctctaagccttatttggcttttaactttgcacattttaattgttggtggggttgggttggtactcttgtttatggctaggatgggttggaaactatgtcatgtcttccgtccggataccgtggtggtatgtggccgcgccctcggttatgggcaagccgagcaatgtacccaagttagtgtttttaattcttaacacctgcttaacaactaaaatgtggaatggttggcctgggttggcttgggacgagctgggacccagggtcgggttgccagttcggtctgaatcatcgtaggccttgggttaaggcaggttcgtgtgagttcacggccttgattaataatcttgtatagctctaggaccgtgtttacaaaatagctttgagcaactaagtgtcttttagtgctgtttactgcaaaccctaacccccctatattatggctcccttgtactcccttgcatttattctgcacttgtgggtgtgtcttgttgagtacggtggttgtactcagtcttgctcaatttttcccaaacccagaagagaagcccctggatgatgaaggctttggtgtctagctcgtgcctcccgtcaagcgcctgtggtcgtcgccatagtctcccgctgtttcccgtttgtctttgtgtgtgctgggccttcgccgcccatgtaataaagtaaccatttacgcctccgcttgataaactctgaaatgtatcaacttttggtgtaccttgcctcctgggacaaggaataatacacacatgtaaggaacgcccgttgggttatttccggtcgtgacatatttctccgtatttagccccggttgtatggttatgacgggctgtcgtaaagaactcggcagtcaggggtggctcctcgaagtaccaggagggcatcggaaagagggtattagctagtatgttggttaactagaatgtatgtatactatgtatattagaagtatagtaatagattatctttctattttcttcctacctagcttagataatatattataagaatgagtagcttatgcttgtgtgttactctacccttggattatcttaacccatgcttagaatatgattatcacaaataatatataaattgttagtcaagttctctctatatgatcttcccacgggataaaataaatacaatacccttggaatactctcgggtgaaatgctacaatggtatatccgtgcgcttgcggatgaactctgtaaccataatataccagaagtatttgtgtgccattggtgggaattatatttctagtaatgtcgttaagaaataccaacagaggggagaattatacccgaacgagtaagctctccgcagccgcgcaccctacgccgaactcattatgctcggtgatggaactanggccaccagatacagaaataatctggcagaccccttcaacaaaggaaccgatctcgggtcggaaggtaaagtcgncagagacaacttggggcgcggtgagtgtcatatcagacactgtcatttagatcgccactgcctggccctctcgctggcgactcgccgaagcaaatgtcacagccccaccagcgccagaggctttcgccgtcgccagttgcaatgcttggtccgaagcaacagcgttggccgaagtgctgcccccggttggcgcgtccgcatcactagcaggcagtggagacaggagcctcttttgtggaggtgggtgtcgtggccccgacgaagttggcatcccatccgaagatgtttcgctgtccgagaagccaccggccacctgcaccacccctttcttcttcctttgggcggcggcaccggccttcgacgacgagccagtgatggttagcaacgcattagcactagcgatgttttgaggacgcgtgggcgaagcgctagagccggccccagccttcgcccgaacagggcttggggtatagccgtgtgacccagcatcgtcgtccgacccgtcttccctctcatcgtcgttgtcgtcgtctgcgttggtctccacggcgtccttgcccactcgccgagttcaaacctggcttctcttggccacgtcgcgcttccacttttttgacgtcccaacgtcgtgatcgactctcgcagggttcgcccggctggctagcgtcccgtcgtagacgcgattcgcctgtccattggactgttactgaagcaggcgagcgtactcggcggtaattaaacccccgatcattttcgccgactcagctttggcatcctccagcaaacgaactaattaaaaaggggaaagatgacaaaaattatataagcccaaacaagccccaagatgtgagatatcgaaggaggggagggaagcttatgattgatgccaggaggaagcacgaggcgggaaagaccgagcacttcttcaccctctgcggtagtaatcccccaatctcgcgcgaggggagaaatctgtagcatgcaaaatttttcgcagaggtcgcgggtgctcaaccgatgcgcaaccttgcgaagaaggatgagccgtgcctcaagcacgccatcaacatccacgttcggcttgatgatcatggcgatagaaagacgccggaagcgaagccacttcgccttgtcatcttcggcggaatcgtctttggagaagtaggggttggcgatgtagaaccatttttgcatcgaattgcggtcccactttgccatcgacacaaggacaggccatgcatccgagcgctttggccgaagcatgaagttacactgccaaaaacagtcttctttggccccgccagagtgttgtcgtccttggtccccacgcacaccatgaacagggtggcgaagagctccgcggtaggagtaaatccacacgtccggcacatccagacgaacacgaccaagttgagaaatgccgatgggctgagctaggggagcttgatttcgtacaactccagcactgatggcagaaagttgtcacatggaaggcggagcccggcggtgaaaaagccggcgaacaccaccgttcgcccgtccccggtcgaagggacaacgtcttcgcccgcacaggacacctggcgctccgcaaggacgctggagaggacaagctcggccaggtcggcctccttgacaagaaacttgccaaggtagcacgaccaaccatcgctgaggctgccagggtcttcgccagacgatccggccttagtaggcttgcgaggagccatcgaatccgcgatgaaagaggtggcgaagacaggaggcgaaaagctagagcaggaatgatagggctgaaggcacgagagtctgacagcggtaaaaacgagaagtggggaggagtgatagcgacctgggatgagggttgtatagcccgatcgcacgacggttcgactcccacccaaccacagcctgacacatgtcaaatggtagacggaacggtaaattcccatcgagccgggccacacagtggcaggctagaaccaaggaaaaccaagaggcccacggagcccgatactgttcactttcaatttcaaaccacctatccatttcgccataacttgggcgaaataagaaaagattactaacacaggaactaagctctttgtaggtgcaaaaggataggtttcagtaggaacatcggccgaaagggggcgcctcatgccataccacacaatttgcatttgcacggtatcggtggaagctccctacttacccttggccgtgaggggcttgttggaggtataccacgagggccttcggccagacctgcagaaaccgttgtcacaccctgattttcgtcttaggatttataaatcatttaataaattattaatagaatttatattaaatgttcattaatttacaagtgaagttaattgtgggaaataaaatttcctaaatataaagcatggatggatttaattttttattaaattctccatggttaattatactctctggaattttctcggattttttcggagctcaattcctaaatgatacaaagaacagttcagtaattatttgatcaataatgatctaattataattgttaagtgcttttcttgcttaaaatccttaaattataaattgttgtttaaaaggaattattagaaatgattttaaaagcttaaaagagaagatctaattttaatttgctaaatctcaatataaaattgggttagataaaattttattaaatactttgcttgttcctctattttctagaattttctgggaattgtttgagcaagggaagtatttttaataaatgaaacatcatttcacgaattattttaattggaaaagtt

SEQ ID NO: 25861 - DNA, 2330 bp, Oryza sativa
taattattatttgtgctctgaaaattccactaaaatttgagggctccttttaggccaaggagaatttaacaaaaattctccgggccacatttgaatttttcttgtacgtattttagggtttgccaatttcttttcgaattttaattaattctattattccttttagaagatgatttttatttcgggatgaatttatcaggacgtgacaaatccaccccccttacaggaatctcgtccccgagattcgaggatgggttgggcggtcttctcttcttgtctgacttcttccgtcgcgtcttttataacaaacttgcctagcaaaacttctccactctggactgcttggctcgatctcctattgcagatggaatcttctcttcacctgacttatccctggttgcaccttttggctgactcagactaggttgcggtagttcagtgatgcttccgttccagaacttctcatgattcatatcttcggagtcaacctcggacaagttatcaacttcatgtcatgcgtcgtaacctgcttgtcattactaggataccatgcttgttatttgcttctaactcgccaccaactgcctcatattagcttccctggtctccgggtgatagctacttctgctatttgatgcaagggtcgataactttacctttgaattatgcttcccaagagagccaacttatcctacttgttatactttgacgtcttcccaaatggctttactgctggatttgttattgtctaatcattaccctgtcaaatctgaggcttcgttgtgagaggtgattttaacctgacctctatagactatcttcgaacatatcactggttctataactgggaatggctctcacgaacaagcagctcggattcactttctttacattcagtttacttcccattattatcttcaggttgtcctcagttagcattcaacgtattcctttacacttttaaccttgatgtgttctttcccattggatcatctcccaagacttggcattacctggtaaccggtgcttgcacttttcacttcgtgtagcatctgataccgagttgaagatttcactccttgccttcatagaaacacttttacctaggtcatcttgcttacttaatgacaaggtgactgttgcggggcaattacaatcaggggtcttccttgagcgatgcagagcatgtttctgtttatcaatcacctttcggcctacttcttttatgctagagaacatctttgccaatctcttttatcaatcatctttcggcttatctctaacaggtggtattcttgaatgtggattgcggacgcttctggggatgatgaggtcctttggcttgctgcctttcggtgaaaccttgatgtggttcgtcaaaagctgcactgactaccttcagggaaatacattgtctgctatctgtatctataccactagggtttaattgccgatggtcatctttagtgcttcctcgagatggggagcatccaaattgttcttctgccacatcacctttgacctttttctgataccagataaactaattaccaaccatcgactattatgttctcaaatattgatgtctcctggatctccttatctgttggcaggtatatccgatcttatcaatgtagaggtatggcgggtacccttcggggtttcctccaacaatccttatcttgatctgtaaaaggcgtatccgaactcctatcctcaactactgtctcgttagctttttaacccaacacagtttaattgtttttcttttccatccacaggttggctattaactcgaggttagaatatagttcctctgacacgagaccctaggtctcctttgtcagtaaacaattatacacatgatcacatatccgcatctttcaaacgaatcctcatggaacttgtctgtattacacatttctccctcattacatgaatacgaggcactgccttaaacaaaaagggacggtgcttaacatcggtacattgtattctcaatatgaatcatccataagcatagcaagctcactgtttatagacatgaatatatttatgtattacatgattgctgcaaactttcgattacaccatgataagtagcggactgaaaaccacaaacatggctgctcattttgattctggagagatatagctggcattgttccagtgactgcatcctcgattggttctgtgatgatgtgataggactgcataatgctatcattcacaggagaagcttccttctgattgctggttgaagcggatgacggtcttctgcttggtatcgccctccggaggttgattgcccttggctaggcctggagtag

SEQ ID NO: 25862 - DNA, 4087 bp, Oryza sativa
gcctatggccgccgtcggcgaccataggggcgcgggcgcgccgctcccgtggctgtgccggcgtggccggcttggggcgcgttccgcggctgccatgtggggcccggccgtcagccgcccgcgccctcgggtgcggctgacgcgtgggacccacggcgccggccgccgtaagccgcgtgcacccagtccaccgtggaccgtggggctgccgcgtgggccccactcccgtggacccggtccgcgcgcccctcccctcggctgacgcaataaatccgattttaaattaaaatttaaatgaagaaattcgcaaatatccatttaaagagcatataaacttcaaagggccatatcttggccatttgaactcggaattggaccgttcaagtctctaatttttccttaagaagtcaagaacccatttttgtgctttgttcctgcttgttatttggagtttattagtgtgtaagccttttcttttccgttggtcgtgtagacgctgcagcttcggaagatccgcttttcgtggaagtcgaagccggcgtttgggaaagcgagcaaggcaagtcacatcatccttgagcatattgaatcccagtttataaaattattttgatttaaattaatgcattatcgctttatttaaattcccgcgttatcactgttttatttagccatgcctatttacccttgttatgaccttattattattgctattgttattatttccttgttcaccctagagtaaacaaaaccccaactagtggacactctactcatggcaccactagtttaattttaggtagatgcttcgcaatttaattaggcaacattaggtggttttataactttagactttgggaattctcatatcatttggacactatggaatggttggcttatgttggaattggacacacacctccccctcttttcaaaacccccaaaatggtttaggctgggctcgaggtgcgtggttgggttttgttagtcgtacctcgggtactataaggattaagcttgggcctctgttgcaaagcactaccgtacttccacatgtctaatgggtaaggcttagtttgtggctcagtctagtcataaacaaaagtacacggattggagatggatgaagtcgggtgtcgatggacattctccagggcaaatgaaggctacacgagctgcggcccggtagtcgagatgtcatatggcagagggttggtgccctgctgctaggggctcagttccgcctgcctgtcccgggtatcccggccgtaggtgggattgggtcggtactcttgtctaaggctaggatgggttggaaactatgtcacgtcttccgtccgtataccgtggtggtatgtggcgcgtggttacacgtgaggaagatgtgtcttgtgggtaaagatgtacacctctgatcagagtaaatctattcgaatagccgagccctcggatatgggcaagccgagcaatgtacccaagtcagtgttctaattcttaaaatttgctcaacaactaaaatgtggaatggttggcctgggttggcttgggacgagctgggacccaggtcgggttgccagttcggtccgaaccatcgtaggccttgggttaaggcaggttcgtgagggttcacggccttgtttaataatactgtgtagctctaggatcgtctttataaaatggctttgggcaactaagtgacttttaaaggctgttactgcaaaacttaacccctatattattatccccttgtactcctttgcattaattatgcatctccggtgtggcttgctgagtactgtggttgtactcattcttgctctatctttctccccccttcagtaagagaagctttggagaagatgtcttaggtggagtcctggcttataccccagttgagcgcctgtgaagatggagccgtaggcccgctagtccgctgctgtttatttttgattgtcaggcctgaagcgcctttgtaataatgtaaatattatcgatgtaataaagatgtgtcttctatatcatgtttgtgtggtgtaccccggcctttcctgggacggggattaatacactagcgttcgggaaaaggcaattttcccggtcgcgacaagctggtatcagagccatctcgactgtaggataagccaaatggataaaacctaaggacatattttataaataaaattatttgcgaaagttcctctttttctccttcccctaatgctatttgcaaaaggtttactcttttcttccttcttcaaatttcaattagtactagatggtcagctttgcgaagaagaagatgtcgtcagttgtttgccgaagctccggaagactgcaggatccgcttgagaagtgcaggaagcagtgaagccagctgtgaaggagtgaagatcttgggaacccgtcgcagaacctaagccaccctatagggtagtgttgttagtcgtgtgttccttgcttgtgtgtgtagcgcgtggtttgcatcagtgggttgtgatgtaaccatgctaggttgtttgcttaatcaacctgcagaataagcaaaacaaacaacacatcaacaaaaagagttagttcctgtaaggtcttgtccctagttctggtctattctttccttgtatgctttccctctcaacctctaccttgtgacagatggataatactggtaacaaaggctatgggaatgatggatccgatgactcaagaacccaagccaatgggaatgagagaagcatcaacgaaacctcaccagagctaatccaagttgtggttaaccaaaccaacatgttggcaacagcctttcaactattacagaattggaacaacccagcaggggcaaccaacgttcaagtgcctacagtccagcaacagtgcaagttatcagaatttctcaaaactgagcctccaacctttgccattgccgtcgatcctatggaagccagtgattggttgcgcacaatcgagaagaagctagggttgattcagtgcaccgaccaggagcgggttggcttcgcaactcatcagctggttggaccggcttcagagtggtgggatagctacgaggcatcacggccagaaggacataccatcacctggaacgagttttcctctgtattcaggagatcacatgttcccgcgggaatgatcacactaagaaaacgagagtttcgctacctgaagcaaggggatttgaccgtcacagagtacctgcacgagttctatcgtttggctcactatgcaccagaagatgtggaaacggatgaagacaaacaagagaagtttctccaggggttaaaagatgaacttgcagtgcaactactcctagaggattatgaagattttgagaaacttgtggacaaagccatgcaactcgagagtgagcataatcgaatgacgaactgcaagagaaggattgtcaacatcccagtaattccatgtggtaaccaaaggcagcgcactgagccacttcagatcaccgggtcttctgttgtgcatcaagagttcctgctccaagaagacggacgcgatgcagacaacaacactagcaatactaatgatgatgataccaccaacaaccatggttcttgccccattagtgaccactcgaataaagcgtgcaatgtcagtagcattcaccaagatgtcaatgatagtatcaatgttggaacccagaatgacaaccttagcaattttgacactgagaaagactccaatggtgatagcaactatggtaccactgatgccaatgttagcaaggattggcaaccaccgattccaactccaagtcagaatgatcgccctcagacggatagctcagcaaagaagaacgttgatttgctacaattgcaaagaaccagggcattactcgagggactgcctgcaaccaaggcaaaatcgacctccacattaccggcaatttacaagaatcagacatcccaatcctattgggggcactggagcaaacaccgtacccgtgaggccttgtggtaatcaaaaaccatagcagaaacaatgtaccgaagttaagcaccttccctttttgtttaaagcagcgcctttgattcatgtaataaggagagaaatgtgt

SEQ ID NO: 25863 - DNA, 766 bp, Oryza sativa
cccagaccaatttagtattgcttattttgctacaatctggttaaaatatcctatacttagattgggacaatacgtaagatttggatgatttccgggtggctagtattgtctcaatcgatataagatttaccaggtacttatgtcgaacgaacgagtacgaccgcagtttctagaatggggacagacctagttattaggttaattggcaatatggcacctctgtatagtggttcttatttttaagtcctcgcgcaggaggcaactatagccgcgaagggcaatttctaccattaccatgtacaggtaattggtttattgagctcaattataattatggttatatttctaaaccctgatcgagatgacatggtgtcatacgatcagttccccttaaatacctcgggaacgccagaactcctcttgctgctgttaatattacgttcagggcatatgaggatataagttcatggaacaggtgccacaattgttaatgacttaatactgggccatgactgaagccgatgattatcagcaagtcgtggactgcgggtaaagcgtacatctactgcagtagaatatctttgaaactattcgaatagccgtactcatggaattgagtaccgggactcatatggtaccctggttagaaacctaaagtttatatgttataaatcctgctataattcttccagattgtccaatactactttttgcaaagaaccctattatatgtcagtgcatatcatatttccgagataacttgctg

SEQ ID NO: 25864 - DNA, 586 bp, Oryza sativa
ggctggcggcctcctctatttctcctttatgtagatttgtgaattttggcccagtttgacgtgtcaattctgagttcttggcccattcatgcataagtttgattgtcgacatcgtccgatggacttatcttctatgttgatgtcgattctcctccactttattgtcattctctgcaaaatgttagtagacctaattctagtagaatattattattctgacatatttatgcattgcaagcatcactagttctcctctattttggtaatattgacggtcgaaactgatcgataacgactgtcaacacctgtaccggtggcgcggtgggaagtcggaggtgggcatgatctgggagggcggtgtagaaccagtcgttcttccggtcgtcccactttttgcgcagcatgcagttgatgtagcggtgcagcgtgtgggcgtgtggctggaagaagctgccgcaaacctccatcgctggggacaccagctacaaggtgaagaaccagcggaagaggcccaatgaacatctcgcacagatgtgcgaagatggccagtatcatcatggtgttgggggtgtggtgcgccatctgg

SEQ ID NO: 25865 - DNA, 1694 bp, Oryza sativa
gaaagatgtgaagtacaagtggtcggaagaatgtgagcagagtttccaagagttgaagaatcacttaatattagctcctattttgattttgcctgatccaaagaagggtttccaagtgtattgcgatgcatccaaacttgggttaggttgtgttctgatgcaagatgggaaggtggttgcctatgcatctcgtcagttacgtccgcatgagaagaactaccctactcatgatcttgagttagctgcagtaattcatgcgttgaaaatttggcgtcattatcttttcggtactcgtacagaggtgtataccgatcacaagagtttaaagtatatctttactcagccggatctgaacatgagacaaaggagatggttggaattaattaaggattatgacatgggaattcattatcacccgggaaaggctaatgttgtagcagacgctcttagcaggaaaggttattgcaatgctacagaaggacgacagttgccattggaattatgcaaggaatttgaaagattaaatttgggaattgtcagtagaggtttcgttgccgccttagaagcgaagcccactctaattgatcaagttagagaagcccaaattaatgatcctgatattcaagagatcaagaagaatatgagaagaggaaaagctatcggtttcttgaaggatgagcaaggaactgtatggttgggcgagagaatctgtgtccccgacaacaaagatttaaaagatgcaattctgaaaaaagctcatgataccttatactctattcaccctggtagtacaaaaatgtaccaggatctcaaggaaagattttggtgtgcaagtatgaagcgtgaaatcgcagaatacgtagcagtatgtgatgtttgtcagcgagtcaaggcagaacatcagaaacccgccggtttgttgcagcctttgaagattcctgaatggaaatgggaagaaattggtatggattttattactggtttacccagaacgtcatcaggccatgactctatttgggtgatagtcgacagacttaccaaagtggctcatttcattccggtaaagacaacttattccggaagtcacttagcggaattgtatatggcaagaattgtgtgtttgcatggcgtccctaaaaaaatagtgtctgatcgaggcagtcagtttacttcaaatttttggaagaaacttcaggaagagatgggttctaagctgaactttagtactgcttatcatccgcaaacagatggacaaactgaaagggtgaatcagattttggaagacatgttgagagcttgtgctttagatttcggtggaagttgggataagaatctaccctatgcagaattttcgtacaacaacagttatcaagctagtcttcagatggctccttacgaagcactgtatggtcagaagtgttgcactccgcttttgtgggatcaaacgggagaacgtcaggttttcgggacggatatcctaagggaagcagaagaaaaggtaaagatcattcaagaaagattgcgtgtagcccagtcgcgtcataagagttatgtcgacaatcgccgtagagatttgagttttgaagaaggagattatgtgtatcttcgtgtcacgcctcttcgaggggttcatcgttttcacaccaaaggaaaattggcaccgcgttttgtgggaccttataagattgtcagta

SEQ ID NO: 25866 - DNA, 4479 bp, Oryza sativa
ggtgacgtcaacgctgacgtcatcggggtcgtccagccgtgagccggtcgtgaacgttcgatatcgtccgtccgttttggattgaatcgatctcgaccgtcagttcgcgtgaccagtcgccgtgcgcccggtccaccaaaaccgtagcccgctgatgcaataacgttcttttccttttcaaaaataattcattattgcgtcataattcaattttaaccgatttaagtgttttaatccgatttaatcttcaaaattcataactaattcatcttagctccgatttagttggttcaagtctctaaatttttctaaaactgagatctacacattaaaaatatccacatgtactgttcatgcttgtttatgtgctgttttggtgattttgctcttttctgcttagattccgtcgtttccggagagtccgttttcgccggagaagagtttgaagagttccaaggccagcaaggcaagtcacacagatcccaaacaaccctttgagcatgttgatcctatttaaagctattatttctattcaactattgcatttattttcgaatgtcattgggtggaattaacctattctttgttatagcccttttgttcttgattactttattccttgataccttgggttataataatttgactggttgaactttatttatattggttcaactagatattagatataattgcttagccctgcttagaaacattagcacactattgggataactataattcacttttatttcatgatggcttaatgatagttcacgatggtcaatcgtgattggttaattaattaatgtgccaactaaaacctggtaatggtgggttgtgagcacatggttttgatggtcgtgctcatgacaattaaggaccggttcacgagtttcggttgtgaaacattaaccgtgccaaccacaagccagcatgggcaacggctttatcttttgtatagcatggttcattgcggggcaccagactgagaagtggcggagataagcccacgggggtcgctggggagtccatgccttgtttataagggggtgattatgatccaggaaggtgcgctgcggtggattgtgttgtgcaaggggtattgtcacaactcctttccgaggtaccgtggtggtattgaggcacatggtgacatgatgtggggttgtgtcttgtgggtacagtggtacacctctgatcagagtaaaactattcgaatagccgtgcccgcggttatgggcgagtctaacaatgtcttttgtgattagtcccacacttctcaccctaatagaagatgctataattggtaataatttgattagctcctggtttggaatggtacattcctggtttggagatagatctgtacagccgggatggttgttcagaatggttgggcctatacaacagggtacgttgtatagtgttggattaatattgtttaattattacttaactgttttattaaattctcaaatgtttgctaaatgctgcttttgcaaatggaaccctattatgccatcctttgttatcctgtgcacttgcatatttgatgcgtggcttgctgagtatgtcatatactcaccttgcaatcattcatcagaggaagagttctacaatgatgctgatggtgtgaaggattaggtgtagccttggtcaagctgcctgtggagtggagtcgtctgcgccgtttatcttattttccgctgcttagatctttattgattgagaggaactatctacctctgtaatgacattttatacgcttattaattagagtaataattgtactctattatcaatttgttattgtgtgcctcggctgattcctggacgagggttcacacacatgaaagcgtttggaattttggatagaaattccgggcgtgacagaaaacaatgcataagttgaaataaatcaatagctttaaacaggttcagcatgctcaaagggttgtttgggatctgtgtgacttgccttgctggccttggaactcttcaaattcttctcctgcgaaaacagactctccggaaacgtcggaatctaaacaaaaaggagcaaaatcaccaaaatagcacataaacaagcatgaacagtacatgtggatatttttaacatgtagatctcaattttagaaaaatttagagacttgaaccaactaaatccgagctaagatgaattagttatgaatttttgaagattaaatcagattaaaacacttatatggattttaattgaattatgacgcaataatgaattatttttgaaaaggaaaagggatttattgcgtcagcggctagggtttgcggtggaccgggcacacggcaacggttcacgggaacgaacggccaagatcgatccatccaaaacggacggccgagatcgatcgggtctacggcggctcacgagagacgacgacgatgacgtcagcggtgacgtcacctccggcggcggctcggcgactcggcagctcgggcgcacacgctcgccggcgaacgacggcgcggcggcgcgaacggagggcacccacgggtagcggactgcacgacgaactcaccggcgaccaaagcaacggtggaaaatcaacggacggcgacggcgtcgaggaagagcggcggcgacgatcggcttgacgacgacgacggtgctccggcggtcgacagcgacggcgtaggggcggacgaggacggcgacgagatggcgaccacgatggcgacctccccgagcgacgacgacgactggagcgacggcgaagcacggctggagcgacggcgacgacggcggctcgaggttacacggcgctagggctcttccgatggcgagaggcgaaagcaaaggtggcgacgggtagaggagacaccggggatccttttataggggttgaaaggcggcggcgaatgcccacagcgaccggcgacgagaaggaaagattagggttcgggagagagatcgatccgaatcgaactcgaatccgcgaatttccaaacgaaattagccgacgattccataatagaaaagatagaggggatcccggggatcatttcccctctactgatttcatcgaaaacgaaaaggggccgcccgaattttgaaggagacggcggcgcagctcggctagggttcgggcggcgggcgcccggaggttgacgacgaccctgacaggtggggcccacctgtcagcgggagagagagaggagagcggcggctcggttgcggactgggctgggccggggaggagagagagaagagagattttgggccgactttcggcccaaagccaaaagaggatttttaaaacctttttcaatttaaattatttattaaatgcaattccatttattaaaaatactttcttagctcaaataaatcccagaaaaatctaggaattatagaattaagcaaagtatttaatgaaattttatctggccccattttatattggaatttattaattaaaattagatcttctcttctaggcttttaaaattatttctaaaaattccaattaaacaacaatttatatattttgaattttcagggtgtgacaaacctaccccccttaaacagaatctcgtcctcgagattcggaagaactggtgaacagatgcggatgagctgacttcaattcatcttctcgttcccaagttgattcttcttccgagtgattactccactggactttgcaaaaacggataactcgattcctggttcttctctcatttgtttccaagatacggattggtttttcaacataggtcagatcctcttggacttctatctgttcaagattagcttcttcggtaggtacccttaaacacttcttcaattgcgacacatggaacacattatggactcctgccaaagattgaggtaactctaactgataggcaacctcgtacggagtgcgacacttccgaccatacagtgcttcgtacggagccatctgtagactagcttgataactgttgttgtacgaaaattctgcataaggtagattcttatcccaacttccaccgaaatctaaagcacaagctctcaacatgtcttccaaaatttgattcaccctttcggtttgtccgtctgtctgcggatgataagcagtgctaaagttcagcttagaacccatctcttcctaaagtttcttccaaaaatttgaagtaaactgactgcctcgatcagacactattttcttagggacgccatgcaaacacacgatccttgccatatacaattccgctaaccgacttccggaataggttgtctttaccggaatgaaatgagctacttttgtaagtctatcgactatcacccaaatagagtcatggccctgatgacgttctgggtaaaccagtgataaaatccataccgatttcttccacttccattcaggaatcttcaaaggctgaacaaacccgcgggtttctgatgttcttgcttgactccctgacaaacataacatactgctacgtattctg

SEQ ID NO: 25867 - DNA, 1889 bp, Oryza sativa
gaacgacgacgtgaacccggagcaacgatggctaggtccgcgttcccataaaaccactgcattttaggggctgagattagaggggatggaaccggcatcgagactagattaaggaacgcaaaagaagatgaaacggccgctgctctatttcgttggcgaccttcgtcttcttggtggccgacgatggagatgaggaagaaaggagcagccggagctcgttccctcgatttgcccggatcagaagtcgtaatggggaggaggcgatgcagctggcaggaagtgaagacgaggctcgacgttgccacgtcgaggccacgcatcgaacgcacctgagagttgttggcgccgatctttcctctctcacgttctctcttgcctgctggtcggttggaggattgcacagggtgaggacgagccacagccactgataagtgggcccaaatcgatgacaccaaggttagggagaaagggaagggtagaaacaaaggtagacttgattttggacgattttccaggatttatttctcttccccttttttgttaattcatatattaatttgtgttgcagatgtgttcatgtggattttattgcaggtggatgaatgtacctagtttccatttctttggttgcacttaaaaattatggataggttgctcacagaaaattgaggaatatgggctatttggaaactagtttgaatttttaggaggtctaaaaagaggataaaaattctagaaaaattatatttagttatgataaataatctagtatttaaataaattatttaaagtatacacttttatgcattttaattcactttttgggtgaggtatggttttagccaataaaggattataattagtctactatgtgactgttttgactaatttatttgaggcaccaaacttagttattaagttgtaccaaaattacagtaagttgtatgtgttaaatagagactacataaattttcccatgattttaccttgcatattttattttaaataattagcaggatctttctatatatatgtcccactttataaatgcatctaaagatttttatgtaaagtacattaaacttctttcacttgtgatggcattattttgacttccttatcttatcttttaaaattatacctcatgaataacttttgttttgcttagtgaaattatttcccttaattatgttcatgagtcctaatatgcaatgccaaccaaaatccaaatgcactaagaagactcaagtcaaaacatgtcttatgcgagtatgcatgcttgctcttacgtttgcatctatgccctaggttagagatgaaaaaggttttaatttgttctcaaattttaatcatgcaatggtttaggtcggttattacctaagttaaaacgaaaatttttggctgtcaaaattggaaaagttaatttcaaactattttgacgagaaatttttaagtccgagaatttcaggtatgtgacagattcttttggtaaccgcgcgcaattaaggcgggcgtggctcgccccgtcttgaccgcaacgaccgcacgcctaccacgcgtgtgtcagaagcagcgcgggaaatgagagggtggagttagtggccgtgagaaacaaggagccaggcgtgggtgaggggagtacaacagggcgccgcgtaaggatttccttcccttcctttcgccacttcaatcttccacgcttaccgtgccctagccttctcggttcttcgcctttctctcgccgcgcacactcgctcgctttgtccctgctccgccagtgcgatggcgcgtggttccacaccactggacgacagcgtactgcctccctcccgcatcgtcagcgagaggcaggtggggctgccgcggaaatccatgccaacactgcccag

SEQ ID NO: 25868 - DNA, 2409 bp, Oryza sativa
ttttggtgtaccttccctctgggacaaggattaatgcacgcacgtaagaacgcccgttgggttatttccggtcgtgacaagcagtcgtgtcatgggcttagcaatcttagaaaaattctctataaaccttcgataatatcctgcgaggcctagaaaactgcgaatctctgaaactgtctttggttgcttccaattagttacggattccacattactaggatcaacggcaactcctcctgctgagatgacgtgaccaaggaacttcacttcagacaaccaaaattcacacttgctaaacttagcatacagttgatgttctcgtagcttctccaatgcaaggcgaagatgttcttcatgctcttctttggttcgggagtagataagaatatcatcaataaagaccaccacgaacttgtctaggtattccataaacaccttattcatcaagttcatgaagaaagcaggggcattggtaagtccaaaagacataacagtacattcgaacaacccatacctagtggtaaaagctgtcttaggtatatcttcctctttgattctcaactggtgatatcctgatcgaagatcgatcttggagaaaacagtggcacctttaagctgatcaaacaaatcatcaattctgggtagcggatacttattcttgatagtcacatcgtttaatgcacgataatccacacacattctctgggtatggtctttcttttccacaaaaataactggagctccccatggagatgaactcggtctgatgtatcccttctgaagcaaatcatctacgtgcctcttgacttctgccaactcattggctgccattctataaggtctcttatggatcggagttgttcctggtaccagatctattctgaactctatatcccttttaggcggcataccaggtaaatcatctgggaacacatcgggatactcccggactataggaatctcttccaaagttatctggttcagtcttgaccttaaagactcagaagacaatgcatgaacagttacaactcgaccatcattgctggtgagagttacttttctgttggcacagtctatcacacctttatgtctggctaaccagtccatccctaggatgacatctaggtctttggattctaacaagataagattggccagaaatggtactcctttaatttctattctgacagaggggctacgatgcaaagagagtgcttaattacttggggtactaaccatcaaaaaacgtctaagatcttctacttccatcccatgatttcccgcaaaactcatagataagaatgaatgtgtagccccagaatcgaaaagtactgttgcaggacctgagttacaaggaacgtacccaaaatcacatctggagcatcttgagcttctgcagcagcgacatgattaacacgggcctttgatgctggtacggtagagttgctctgggtagggacaaccttcatgcgtcggggcttcggacacttgtcagcataatgtcctgggtctccacagttgaaacacaccacgggcttgctgccttgctccctcttggcaggttgttgctgtgttggagctgcaacagggcgtagagcttgattgcggatgttgttgccaacattgttgttgaagaactgacgctgcggacgaacaacagacgaagaacctccctgtggcattgtcacgtcctgataaattcatcccgaaataaaaatcatcttctaaaaggaataatagaattaattaaaattcgaaaagaaattggcaaaccttaaaatacgtacaagaaaaattcaaatgtgacccggagaatttttgttaaattctccttggtctaaaaggagccctcaaattttagtggaattttcagagcacaaataataattattaagaaataaacaaagttgaaaaggttttataaaaagaaaaccctaaaagaagttctttttccccccccccttcctctcttgggccggctcggcccacttctctccctctctctctctcctcccctccggcccatcggcttcccccgcgcgcgcgcgccgctgacaggcgggcccgcccgccactctcgctgacgggtgggacccacctgtcatctccctccccgcgccgcgcccgccgccgcccgtgccctagcgccgccgccgccgccgaatccgccgcatcccgccttccccgcgcgccataaagaggggcgaattactccccgcgtttccctctcccgattccccctcttttccctctctctctccctcggattcgtccgatttgaatcccgcaatcatcgccggcgtcttcaatggcggccgagatctccgcgcgcgattccttcctccccgccgccttctctcccttccgacgctataaaatcgtccctcgtgcttcgctcttccgtttccg

SEQ ID NO: 25869 - DNA, 809 bp, Oryza sativa
caggcggaagtgatcccaccattcagaggcagggccttgcaactgatgtgatgcaaatgagaccttctcctgatcagtgcactgaagtaaatccaacttcttctctatggcatgcagccaatcaccagcttcaacaggattagtggtactagagaaaacaggcggcctcacacgaagaaattctgctaacttattctgaggaggtacatgattatttccttggttctgctggttctggagttgttgcatcatcatgttcattagctgtgtctgttgagcaagaacttgagcaagagtgggattctctccattgttattgttactggggccattcccgttgctgcgagtgttcaccatctggcagggcacaagaagagaaatcgggggaaactacttaggatagagaattactttaacttttattgatcttaactgagttttattattacaaactgaagactcccacaccactaaactcaccaacttcctaacactcaaaagcacctaacactcaaaaacaaacaaacacatgcaattacatcccaccactgatgtaaatcacatgcgacccacacacaagcaaacttaaagcaagcaaactaacacaacgatctaagaccacgatttaacaagtcactctagttcttccgagcatcggaggtcgattgaaggctcgttctgctcgtcttcatcatcttgagttgctacccactcaatcttggaatgggtgcgcttggattcttcttcttcatcatcacttatgatgatgatcggaggatctgctaaggtaaaggcaacttctttctcca

SEQ ID NO: 25870 - DNA, 2700 bp, Oryza sativa
agcttgtcgtttccgtcgttgcaaaggtttgtgagtgcgtcgaaagtgatcaagaagattattgaagatcgattatgcaaggcaagtcacagatcctaaacacaatccttgagcatgttgatcctatatttaattctctatttatttcaactgtgcatttattttcgaatgtcaccgggtggtgtgaacctattcctttgttatggccaatttgcattgaatgctctattccttgataccttgggtaataaattgattagcttgaaccttgtatattagattggttcagctaaatgctatatgtaagtttgcttagctatgcttagaaacattagctaactaaaggggttaattataaactatgttatattattattattaattatggttacattaaatggtagctcacgatggttaatcgtgtgatgttaattaattgataattaaaatctggttaaggtgggttgtgagcatatggttttgatggttgtgctcatgacaattaaggaccggttcgcgagctactgttgtgaaacatttatcgtgccaaccacaagccaccgtgggcaacagctttatcttttgtatagcgtgattcattatagtgcgccagactgagaagtggcgagaagtccacgggggtcgctggggagtccatgccttgtttataagggggtgattatgatccaggaacggtgcactgttttgagttgtgttgtgcaaagggtattgtcacgatttccccatttgcaatgccgtggtggtatttcggggcatggcaacatgtgtggaatcgtgtcttgtgggtacagtggtacacctctggccagagtaaaactattcgaatagccgtgcccgcggttatgggcgggttgagcaatgtttttcgtgattagtctcacacctctcacaataattatggatgttaatatctggtaataatttgcttagctcctggtttggagttagatctgtacagccgggtatggttgttcaggatggttgggcctgtgcagcatgggtgtgctgttcagtgttgattaaaattaatgattaattactctactgttttacttatcttaaatctttgctaaatgctgcttttgcaaatgagcctatattatgccatcctttggaatccttgtgcacttgcatacttgctgtgtggcttgttgagtatgtcatatgctcattcttgcaataatcatcaaacctcagttgaagataaaggatccagaaggagaagacgtttggcttataccccagttgagctgcctgtgggagtggagctgaagccttcgctagaccgtaattccgctgctgttttcttttctttgtaagtatgtaacgttattattatgatggatttgtatataaaattgtcagtttgtgtacctcggctgattcctggacgaggattttacgcacaaataagttcagaaattactagtgaatttctgggcgtgacaacgccctactgctgtggaagtagaagctctcgtggtgctaactatagttgctcctcaagttggctgacgtgctcctggctttctctcagctgctcctcaagtgtatccatcatcccgcggcgatcgttgcactgatcagatagctgctgaacctggtcaccatggacctagagctgtgccttcagtgagtctatctcactgccccaagcctgatgctcctcctctagctgaagctgctgcactgtgaggtcagtcacctcggtctctaactgtcccacacgcctctgctggtcgtcgatctctaacagagcctcctcgtcgaagttgtctactgcctcagcacatcgggacagtcaagtcactatcgggttgtagcagcaaggtgtgtcctggactgtgcagacggagttgctctcctctcgaaacgggtggtgagcaaactcggtactcgccaactcagctcggtgaatagagctaagtcggagaaggcctcccgggctgcgtcctgcatcgcggtctccggtaagtcgcgacggtggcgtgtcggaaagctgtagcctgactctgaaggaactcgtgtatgagcctcaatctgggcctcccaaacgggtccacactgtctcactcggtagatcggaaatctggggtaccgtaggcgcctcatcactcgatgtagctcaatgacgtatccctctgagtggggtacgcccatctcccaggtagtgggtgaatcctgatctgtcatctatttttaagaaaaaccaaagtcagctaaaagtaaaacttgttttgtgaagaaaatagttaagagtaagatgaaaatcgtatagagttttgtaaacatagcatttttatttttttttgaaagtattactaaatgggaatttctcccttggccaactagaaaggggtggggtgccatttggtctttcctacagtcgtatggctctgataccagctctgtggacccccgtttttataacaggaatcaatcgtgtaaacagtatcatttccctggatcaagtagtctggtactcacgagttcatagctgaaataccaagtgcacatacacgagagtctagtgcgaattattacatcataggcccccaggcatagtcttagaacataggaccgaacggtccggaatacattccaaaagcaaaagtagataaggcagcggagttaaggcagcggcacgccatcgccataggcaacgaccgtaactaagac

SEQ ID NO: 25871 - DNA, 5359 bp, Oryza sativa
tcataagggcaaccatgtaaaatcccctataatcataaaccctagaagaacagagcctataatagggttataaatagccccctaaggccatgtaatggggggatccccaaaaaatttctaatcaaccaatacagtcgtctttatttccaacctgttgagagagccacgtcgttcgacgtgacgcagttatcgttcgacaacaaaaactaagcaaggaaatagaaagtggtactctatgatctgttctgtctctcaattgcctaaggtggtgacaagcgtgtattccacaaatgttagtcgtaagggtaagcctccgtgcatatttaattaacatgagagagagtactcaaactgtgcgcttgtacattttagatatacaccattgtagcaactcctgattaacaaccaagtttttgtttccctttcgtcctttactcgggacgagcaaaggttcaagcttggggggttttgttgacggtcgttacagacaaatttcgaccgtcaatataactaaaataatggagaattagctatgcttacaatgcattttgtttccaaatagtatatatatttccacttgtacatggaaataacatgttacaggaatttatcaaataaaataaagagaaagcggagaaaacctcactcctaagcaatcaaatggataaggagggcccacatgtctggtgtaaccggcagaaaccgctttaactgccataaccacctaaaggacccacctgtcagtgccctgcccgaagctagaggcctgctgggccggcctaagttcggctgaactgccgaaccctaatggcgacggctcagcttggccctccacgtgcacgctccaaatcgcatactaatgacggttacaggggcaaaatggacaattcgcatagctacaaccgtcataaatacccaataaaaggaggagctcattcactctctcaacacactcaagcaagctcaaattcttcttcatactttagtattagtagtatagtgctaagcggagtagagtagattagtattcggagtcctcgaggtctccggaagagttttggtatggctctagcagctcttgtattctcttctgtaatactttccgaattaatgaaatactcatttttatacatcttcggtattttgttcagtctgagtactggtcttacattatatctgtgttatattaattatgtgggtagcctaccagagaggtgtaatggtgcgggtttaatgtctggttaaccagttgctctatgtcgtgtgcgcgggtatagagtagtatttagtaatgtaagtgtggtacttagattattaaatatcattaattgggcatatatgctgcgggacagtagaggtgggccgctgatggtgatagctcagtactggtattcctccacgttagtatatattcctaagacaaattcctggggagggtactcctccgtatttagccccggttggacggccatgataggttgtcgtaaggaactgggcaacccggggtggtctctcgatgtaccaggaggacactgtaggggggtattggccatatgattgtatattagcagatgtaaactaggaattgagtgtatgttagaagtatagtaattgagtgctttctattttttcttccacttagttagaattattttattatgaggagttgaatagctttgcttcgtgtcactctacccctatattaaaattaacctctgcttagattttgataaatacaaataatgtatgtataaagagtattagcatagtctactcatattatcttcccttggaattaaaaatacgataccttggaatacttccgggtgaaatgctacaatagtatatccgtgtgcttgcggataacttccgtaaccataaatataccaggacaatttctgcgccattgctgaacagtgactactgtgacgacatgggtatcaagctctgcttcacctcacccgcccaccccaagagcaacgttcaagcggagcgtgccaacacggaaatcctcaatggcctcaagacgaaaacttacaacgtcctcaagaagctcggggactcatcgatcttggagctgccggcagtgctctaggccgagccgcgcaatagaagaaactccatgtttcctcgtgcacggggctgaggcggtcctcccatccaagctgaccctggggtcaccctgggcatcactgtataacgaaaatgatcaagatcagcttcgacacgacgacctcaactaccataaagagcgaaggcaacgtgcagcccttcgggctacccgttaccaacaaagcctgcggcgctaccatcagtgcaacgtccgggcctggtcactgcaagtcaaagaactcgtcttgtgccacgtcccaacgcgtgcaagattgagcaaactctcacccatttgggatgatgttgagggtcgttagcgatcaatttcgaccatcaatattatcaaaataaaggagaactagttatgcttgcactgcatatccatgttagaataacaatattccacaagtgttaggttcattaaccttttgcagagaacaaccataaagtggaagagaaccgatatcaactcaaacgataaattaattggacgatgtcgagaatcagacttatgtccgaatgggccaagaactcagaattgacacgatcaattgggccaaaattcacaagtctgcgaagagaagcaacagaggaggcagccagccaaaacctgggctggttgggccggcacctggttcggccgaacccccctggcgccgttggatgcagggtttcttctagacggcgtggatcactccccaatgatggttggagggcagttccgaccattccaactgccacaaccgtcattggcagcctatttaaggagctcctcttctctctccacacacgcacctcaagcaagagctctctcatattcactcaagatagtttagtagtatcaagctagtggagtaggaatagagtagaaatcggagtccggaagccttcagaagagttcgggtatggctctagtagctcttctcttctcttttgtaagctctgtacttttattagaatactattctatatacatttatggtattgaaatactttccgagtacatgggtacctactttacattatgttcatgttatactgaatatacagctagcttatctgggagaagctgtggtgtgggtataatgtttgcttaagcaattactctatgtcatgatgatgatattagagtagtatctgttagtttaggcgtggtatctagatttggggatatcattatttggggttatatgctgcagatgagaggtgggccgctgatggtgacagctcagtacgggtattcctccgcgcgtgtatatagtcctaagttaattccctggggagggtactcctccatatttagccccggttgtatggtcatgatgggctgtcgtaaggaactcgacagttaggggtggcttctcaaagtaccaggagggcatcggatagagggtattagctagtatgtcagataactagaatgtatgtatactatgtatactagaagtataggaatagattttctttctcttttttttccacttagcttaggtaatttagtatgagaatgagtagcttcctgcttgtgtgtcattctacccttcgattatcttaacccctgcttagactatagttattacaactaacatataaattattagtcaggttctctctattatgatcttcccatgggattaaataaatacaatacccttcgaatactttggggtgaaatgctacaatggtatatccgtgcgcttgcggatgaactctgtaaccataatataccaggagtatttatgcaccattgctgggaattatatttctagtaatgtcgtttagaaataccaacaagcatttctggcaccgttgctggggaagatttgtaatagagattaccataactagtactttatattttcctctgtataatcactgtcctttgcaggctaaccttggttgttttcacttttattatggaaacagggtagtgcacgactggttttaagttgccagaaaacttcaaagaaaatccagaagctttcttctggagcgtcaggccgcgagtcgctgctcgacagaaaactctaccaacagagaaaccagccgtaccagcgtcaccgaccttcaagactatgactaacaagactctccgtgaattcgctgctccctctgctgacaatgtgaccattgggccacaaattaacctgggagacgtggattttgatttgaagtctagcctcatcacgatgcgcaggctagccctttctgtggcaaccaaatgagaatgccaatgctcatttacagtagttcctagagatttgcagcacatacaccatgaagggtgtcagtccaaacaacgttaggctacgactgtttccgttttctctccttgggaaagcgaagaagtagttttatgctaaccatgctacgatcaatacctgggatagatgcttcacgacattcctctcaaagttctttccgatgggcaaaaccagcgcccttcgcggaagaatttcaagtttctaggagacaagggacgagtccattcctgaggcacgggaacgacttcaagaatatgtggccgcctgtcctcatcatgggatggatgactggctgatcttgcaaaatttctataatggactcactcccatgtcccatgaccacctagacacggcagctggatgagatttcttctcaaagacggttcgaggagccatcgatttgatagagaagatggtctctaatatgggttggagcgaggaacgactccaaacccgtcagcgaggcatgcacaccgtcaaggagatggaaatgctcgctgccaagatggacctcctcatgaaatgattggacgaccatgacaaaaggccacaaggcatcgtcaaagccttggactcacacgttacatgtgaagtctgcggcagcacgggtcattctgggaatgattgcccggaaacccatgaattggcgatgtacatgggcaacaacaacaatgggtatcgtccacaaggaggtcaggggtggaatcagccatgcccatattatcaaggagctaacaacaacggtaacttttctaaccaaccctccttgaaagatctcgtttttgtgcaagctaagaccactgatgctttaagcaaaaagctagctgccaattacaagatcttagaaaacattaatgttaagctagatagcttcgcttctgctttccaaaaccagctgagctttaacaaaatgatagaaacttagttagctcaattagctgccttagtacctgcaaatgagtctgggaggattccggggcagc

SEQ ID NO: 25872 - DNA, 1066 bp, Oryza sativa
ttgtgcaagctaagaccactgatgctttaagcaaaaagctagctgccaattacaagatcttagaaaacattaatgttaagctagatagcttcgcttctgctttccaaaaccagctgagctttaacaaaatgatagaaacttagttagctcaattagctgccttagtacctgcaaatgagtctgggaggattccggggcagcggactcctccattgaaaatgttaaggtgatcaccacgaggggaggtaagtccacttgtgatctgccatatcctaaccctgtaggaactaacaaggaagcgccatctggtacttcagctgacaaaaagattcagctagagaaggttgtgccacaagcatactatgacacgcaattgctgccatttcctcaaaggaacaggaaaccgtcagtggacgagcagtttgctcgttttgttgaagtgatctagaagattcacatcaatatgccgtagttggatgctatataagtgctaacatacgcacgttacctcaaggatatcctcaacaacaagagaccgctcccaacaatggaggtggtcaagctgatggagcagtgcaacaatgccatactccacaagttcccggaaaagaagaaagatccggggtgtcctacgatcacctgctcgatcggggcacaacagttcaaccaagccttttgtgatattggagcaagtgtcagcgtcatgcccatggacgtctttgaaaagctcaacttcacgatgttggcaccaacgccaatgcacctgcagctggccgactcattagtccgttacccaacagggatagcagaggatgtgccggtcaagatacgggattctttcatcccagatggtttcgtggtgctggacatggaaacaggaaaggaaacactgctcatcttggtgcatccattccttaaaactgcaggagccaacattgatgtgggaacgggaagtatccgtttccgtattaacgggaaggaagagaaatttgagtttcagccaaggactaaacactgctccatggtcagaatcaagtacgggccaaacctaaaaaatatcctggtg

SEQ ID NO: 25873 - DNA, 2224 bp, Oryza sativa
caaagccacgcagcaaatatgcaagtgcacaggataacaaaggatggcatagtagggtttcatttgcaaaagcagcatttagcaaacatttgagaattataaaacagttaagtgataattaaacaatattaatccaacactatacaacataccctgttgcataggcccaaccattctgaacaaccaccccggctgcacagttctatctccaaaccaggaatgtaccattccaaaccaggagctaatcaaattattaccaatttaagcatcttttactatggtgagaagggtgagactaatcacgaaagacattgttagacccgcccataaccgcgggcacggctattcgaatagttttactctgatcagaggtgtaccactgtacccacaagacacaaccccacatcatgtcaccatgtgcctcaataccaccacggtacctcggaaaggagttgtgacaataccccttatacaacacaatccactgcagcgcaccttcctggatcataatcacccccttataaacaaggcatggactccccagcgacccccgtgggcttatctccgccacttctcagtctggtgccccgcaatgaactatgctatacaaacgataaagccgttgcccatgctggcttgtggttggcacggttaatgtttcacaaccgaaactcgtgaaccggtccttaattgtcatgagcacgaccatcaaaaccatgtgctcacaacccaccattatcaggttttagttggcacattaattaattaactaatcacgattgaccatcgtgaactatcaataagccatcatgaaataatagtgaatcataagttatcccaatagtgaatcataagttatcccaatagagacttgaaccaactaaatcggagctaagatgaattagttatgaatttttaaagattaaatcggattaaaacacttatatcggtttaaattgaattatgacgcaataatgaattatttttgaaaaggaaaagaaggtttattgcgtcagcgggctagggtttcggtggaccgggcgcacgggcggcggttcacgcgaacggacggccgagatcgatccaatccaaaacggacggccgagatcgaacggtccacgaccggctcacggcggacgaccccgatgacgtcagcgatgacgtcaccgacagcggcggcggctcggcggagcggacggctcgggtggcgcacgctcgccggcgaacggcggcgctaggacgcaaacggagggcaccaggacgtagaggacgacgcggcgaactcaccggtgaccaaaacggcggcggaagatcaacggatggcgacggcgacgaggaggaaacggcgaaaaccttcgggttgacgacggcgacgaggctccggcgatctccggcgacggcgaaggggcggacgaggacggcgacgacttggcgaccacgacgacggtcttcccgagcgacggcgacggctgaaacgacggcggcgcacggctggagcggcggcggcgacggcgaagctagggcacacggcgctagagctcttccgacgacgagaggcgaaggcaagggtggcggcgggtagaggagacaccgggggtccatttaaaggggctcggaggcggcggcaaaggcccacggcgggcggcgacgaggaaggaaagattggaagaacgaatccgagacgaactcgaatccaactcattccaaaacgatttagccaaagattccaaaggagaaaaggtagagaagatgccggagattgtttcccctcaattgattcggccggaaacggaaaggaacgcccggattggaaaagcggcggcgggggcgcgaaactaggtgtacgcccgaaggaggacgacgatcctgacaggagggttttttaaatgcaattccatttattaaaaatactttcttagctcaaataaatcccagaaaaatctgggaattatagaattaagcaaagtatttaatgatattttatctggccccattttatattggaatttattaattaaaattagatcttctcttctaggcttttaaaattatttctaaaaattccaattaaacaacaatttatatattttgaatttccagggtgtgacaaacctaccccccttaacagaatctcgtcctggagattcggaagaactggtgaacagatgcggatgagctgacttcaattcatcttctcgttcccaagttgattcttcttccgagt

SEQ ID NO: 25874 - DNA, 4064 bp, Oryza sativa
ccgcgccctcgggtgcggctaacgcgtgggacccacggcgccggctggcgtaaaccgcgtgcacccagtccaccgtggaccgtgaggttgctgcgtggccccactcccgtggaccggtccgcgcgcccctcccctcggctgacgcaataaatccgatttttaattaaaatttaaatgaagaaattcgcaaatatccatttaaagagcatataaacttcaaatggccataacttggccatttgaactcggaattggaccgttcaagtctctagtttttccttaagaagtcaagaacccatttttgtgctttgtttctgcttgttatatggggtttattagagtaaaagccttttcttttccgttggtcgtgtagacgctgcagcttcggaagatccgctcttcgtggaagttgaagccgacgtttgggaaagcgagcaaggcaagtcacatcatctttgaacatattgaatcccagtttacaaaattaggttgatttaaattattgcattatcgctttatttaaattcccgcgttatcactgttttatttagccatgcctatttacctttgttatgaccttattattattgttattgttattattaccttgttcaccctagaataaacaaaaccccaactagtggacactctactcatagtaccactagtataattttaggtagatgcttcgcaatttaattaggtaacattaggcggtttacaactctagactttgggaatattcatatcacctggacactttggaatggtttggttgttgtggaattggcttcacaccgccccctctattcaaaatccccaaaatggttttaggctgggctcggggtgcatggttttgatagtagcacctcggccatataaggaccggttttcgggcctctgttgcaaagcactaccgtacttccacatgtctagtaggtaaggcttagtttgtggctcagtctagttataaacaaaagtacacggatggagatggacgaagtcgggggtcgatggacatctccagggcaaatgaaggctacacgagctgcggcccggtagtcgagatgtcatggcacagggccggtgtcctgctgctaggggctcagtcctgcctgcctgtcccgggggttccggccgtaggtgggattgggtcggtactcttgtctatggctaggatgggttggaaactatgtcacgtcttccgtctgtataccgtggtggtatgtggcacgtggttgcacgtgaggaagatgtgtcttgtgggtaaagatgtacacctctgatcagagtataatctattcgaatagccgcgccctcggttatgggcaagccgagcaatgtacccaagttagtgttttaattcttaaaacctgcttatcaactaaaatgtggaatggttggcctgggttggcttgggacgagctgggacccagggtcgggttgccagttcggtctgaatcatcgtaggccttgggttaaggcaggttcgtgtgggttcacggccttgattaataatattgtatagttctaggatcgtgtttacaaaatagctttgagcaactaaatatctttaaatgctgtttactgcaaccctaaccctttatagtataactcctttgtactcccttgcatttattctgcacttgtgggtgtgtcttgttgagtacggtggttgtactcagtcttgctcaatttttcccaaccccagaagaggagcccctagaagatgaaggctttggtgtctagctcgtgcctgccgtcaagtgcctgtggtcgtcgccctagtcttccgctgtttctcgtttgtctctgtgtgtgctgggccttcgctgcccatgtaataaattaactatttacgcttccgcttgttaaactttgaattgtatcaacttttggtgtaccttgcctcctgggacaaggattaatgcacgcacgtaaggaacgcccgttgggttatttccggtcgtgacaagttggtatcagagccacccttgaccctaggacgagccgtagatcccaagccatagcagtattttcgaaataaaaatcctttgtatttgtgaaaaccctctagtctctctctgtcttgctgcttcatttatcgccaaaatctgacctttttaaatgttgcttttctttttggttttgtttgtagatggccggcagcgtcagccgtcgtggcttggacatgactggtttcgtcttggagctgcggggcatgtgcgttgtcctggggtatccgcatggagtggactaccaggccaggccgctttcggatcaggagggtgacgatgcagagccccacgctgcgtgggaggttactgcagtgatcctcactggctctcccgagcggacttcgctggcagtcaccgcgggtggagattctttccccgccgcttaccaaaacgccgctctcctcgccatcggcactcttcaccagcgctacccggacgagttgtagcacttcgcctaccggtaccacccctgccgtggaggagcccgcgactacgccaccttccgggatgctagctcgaagaatgacgctaccatcgtgcacctggcgcgcatggtggaggcgtacgacgcggctcgtatcgacttccatcagatggtgcgccgtgggatggtcgagaacaacttgaagatcctggagctgcatcaggagaacctgcagctcaagaaggacctagacgcagtggaggcgcagctgcatcagctcaagatcgcccagggagaggtctgccgccccaagcgccaccgcgtctaccgcagccagaagatcaccgcccgcaaaagcacctccaggcccgagcttgttcgtcagtccctggcgtggacctgcttcgtggagacccctcgtgccgagcccgcgcccgtggttccccaggaggggaagcctccggcgttggtagcacggaggatgcgctgttgctcaccttccgtcctggcccgtcgcagcggtagacgagcagttagtaggcttgcgcgtgtgttctttctcgtttgtcttcttgttggagtcgtgtggggcatggttatgccgtgtgtggtataactgtgtcggagcctgtctttattttattcgtctaagcaacttgaactttaatgaaccaatttaatagcagtaataaattcaagaattatggtagtcgtgggtggttagctttaattgtcagctctctctctgtttgctggttctgtgtggggttttcagatggtgatgaccaggagaagtgctaataccggtgatggcaaccaacctgaaggcagcaaccacaaccaccagggcaggccacctccacctcctcctccgcctccaccaccaccaccagataccaacgccattctcacccaaatcctcgcccagcaggccaacatgatgactgctttcctccaccaacctccaaaatccgccacaacagaatgctccaccaccacccccacaacactctaaactcgccgagttcctccgcatccgcccacctaccttctctagctccaacaaccccgtggatgcgttggattggttgcatgccgtggggaaaaagctagacactgtgcagtgcagcgatgaggagaaagtcatcttcgccgcccaccagctgcaggggcccgcatctctatggtgggaccatttccaggctacgcagccagaggggcagcctattacttgggcccgtttcaccgccgctttccggaggacccatgtgcctgccggagtcatggcccttaagaaaagggaattccgggagttgaagcaaggcaaccgctctgtgatggagtatttgcatgagttcaacaacctggcccgttacgccccggaggatgtgcgggaagatgaggagaagcaagagaagttcttggcaggaatggaccctgagctgtccgtccgtctagtctccggggactatccggatttccaacgtctggtggacaagagcatccgcttggaagccaagcacaaggaactggagtcgcacaagcgccgcttggcgaatttccgcaatcaacagatgctaaccaaagggtccgctacaccaatccctatccagggggatcct

SEQ ID NO: 25875 - DNA, 1897 bp, Oryza sativa
attttcaacgaaaatttattgtgccacgaccacattgaccgttgaaacccaacggccaaaagtgcggccggtgggcccacaggggttcggccgaaccggccaggcaacggttacatgccacttttggcagggtaacggctagtgggtcccacatgtcatttctaaccattgtaggtgtccaatataagccagccagccaagagagggaattccatcccatttcaacacattttcattccctctctaaaggtttctctcaagttcattcaagctttgatagttttccttaaattcaaatacttagttgcatacatacaagttgctttggtgaaactaaccagcgggtgaaattcttgctattctaaccctcgccgagttagtccgttcttgctccattgtgtagaatgaggaggcgattgtctcgtttgttcaaggggtccgactcttcatcaagtcatcatgactagtctatagctcgttcatcagccgatgtctcgatggaggacgccgacgctccgcgacgtctcctgaacgacgccgacctcgatcttgtcgacgatcgggaaagacaagcttactacatgctgagtaatcgggagtatgctcacacgcgagaatactctccgaagctgctgaaaaagataggtatggaaacagacttttgtgccatctggaaagctgttggttggcagagatttactgtggtagatgagcctggttctcgtttacttactttgcaatttttgtgcactttgaaagaaatagaagatggaatttccttttgctttttccataaataatacacacttacatggaaaggattaagtacacttcttggttttcacgattcctgtaaatcaatctccagaaatgaatttttaggttcgagaaaaataggttttgggaagatatttgtggtgctccaatttgcacgaaagctaggacgaatgacgtccataattctacacttaggctcatgcacaaatggattgttatgactttgtttcctagaggtgatcttagacccattaggggggatgaattaattatcttgtttgccatggttagaaagatcaaagttgctcctgtcaaatgtatgataaggcaatggttagaaagtataagattttttgctcctgttgagtgcacttccttgattactcggatagcaaagggactgggggtcatcaatgaccagattgcttatatcttggccgcttgtccctgtattgataagaattatctagtgcaagggcacattcttaaacatggagtagatggatctttgatatactttttccccggttgtacaaatgaaatcccgctgcctaatgcggggtatcatttgtacaacttccataaactaaccattcccctgcatatcatagaagaatctcgtgtaggtggaacatacagggagacacgcaacgtggcaagaaaggaacgagaaggttcatcatcctcaacaccgtgcagatgtatgaggcaggttgggaggcaacttgggatgcgcccggatggacccaagctccacgccacaacatcggagtctcaagctggacaagtgccagtgaggaccggtggcgtgcacctcatgacatacagtgggggacaaccaaccctccagattaagcagtatgcctccatccccaagtgaatggcgctcaagttcctctcgttgggtcttgagtgaaatcaccagcagaatgtataccctcgatgtgcagacgggagatatccaaaaaaacctcgcggaacacatagcacagacgcaagaatggtaacagactgctgatgctcagttcgccaacatcaacaacatacatgatgcagtaacagcacgacgaccttcaagcatactttcgctttcaggggttcaatcattatcaaggaccct

SEQ ID NO: 25876 - DNA, 757 bp, Oryza sativa
agaaaagttatgcagataaccgacgccgtgacctggaattcgcagtggatgactttgtgtatcttcgggtcacgcccttgcgcggtgtacacaggtttcagacaaagggaagctcgcacctcggtatgtgggtcctttccgtatcattgctcgacgcggagaagttgcttaccagttggagctgcccgcctccttgggcaacgtgcatgatgtgttccatgtgttgcaactcaagaaatgccttcgagtgccatccgagcaggccgactcagagcaaattgaagttcgcgaagacttgacctacgtggagaagccagtgaaaatcctggacccatggaacgcaggaccaggaaccgggtaatccgtttttgcaaggtccagtggagcaaccacgccgaggaagaagctacctgggagcgtgaagacgagctgaaagcagcccatcccgatctcttcgccagttcttccgaatctcggggtcgagattccgtttaacgggggtaggtttgtcgcgtcccaaaacgactctaaaacacatcctcaaaattatgcttagaagaagtaaaatccttgtgaaagcctccaacaattaaaatgtgcgaagttaaaagtcgaataaggcttggaggatttttgtatatttcctaaaagcctaaaatgcgtaaataaattttagtggaattttcagagcacaaataataattaagaagaaataaacaaagttaaaatggttttataaaaagaaaaaccctaaaag

SEQ ID NO: 25877 - DNA, 1546 bp, Oryza sativa
  unsure (1)..(1546): unsure at all n locations
aacctctctacgtctacagtcgataattcctttgttctttgttaaccaatccatgcccaatatgatatcaagggtctgaggtatcaaaaccataaggttggagggaaacaccacatccctaagatgaataggtacgtcgatgcaagcatggcttacggttacctcacccccaggcgagtgtactatcataggctttctaactcctaccagagttaagttgtgctgttgactagcctccagggatatgaatgaatgcgatgcaccagaatcgaggagaactttaaccggggtagaattgatagaaaacatacctatcagtacgccctggtcttcctgggcctcttcagctcgaacatggttcacttgtccgcgtccaaatccggtggcggtcctgttagtctgaggagtcctgaacagacctcgtccagcagcaggggtagcagccccgtgaatagccattgcattagcttcggtgcgaatgggtgtcttgtttagatgaggacattngttggcgaaatgcccatactcttcacaattgaaacagcttnctggcctcattactncagtagcggcctgattccgtgcangagcttcgntctgaagtgtaacccgcctgtggaagtngctatgtgccgtaggaccggttcgttgtaccaaccggtggntttcatcctgatgaagtagcttctttaggatgcttgagtgcgaacttgaggtggggntcatgggcaagctnctcttacgattgtgctncacaaccttnncnngtcgtttncaanctcacgaccttattgatcaaactcttggaactctnattgatcttggccaatcataggcccacgcaactcatcattcagcccttctatgaacttgtcgatcttttcctcttcatctgcgaggtctacgattgcgtagcgggtcaactgagtgaaccggtttagatattcttgcaccgttgtgtttacttgtcgcggacttctgaactcggtcttcttcatacgcatcaccgcagcaagcacgaagttctcatgaaaagctgcagtgaattcattccaagtgggttctccagcatcttcttcccgagcttccttgtaagtatcccaccaatcgccagctggtccctccagttggtttactgtgaagatcactttgtcggcttcgcgcatccggacaagggtcagtttcttctctatgatgcatagccaatcttctgcctccataggcttgtctgccgtagcgaatgtgtgtggcttagtcctcataaactccaaagctcgatcctcgacagttgccttgattgtttgcaatggtttgcagaagttgggtttgggtggccataacgccagccagggtggttaggtcgggtgattgagtctcttcattgctggttgacgcccgacgtcggcttgccatctgtgtaggccgattaggtaagtaacctagtttcctaactagcccttatggttttattctgttaaggaaattgttttgatgtgaacttcgttttgcaagcatggtggaataaactcattcataacacaacagt

SEQ ID NO: 25878 - DNA, 2364 bp, Oryza sativa
ccgcctcttgcgtcgtcgccggccgtcgtcggttgtcgtgggacgttttggtgagtaccatcggttcgtctcgtcgtcctcttcgcgtaggtgcccttggataggccggccgacctctctatcgccggcgaggtcgtctcccgtgtcatgccggcgatgatgacgtcagcatgacgtcatgattccttttttccagttttttctaatagattaaatcttctgaaaatcatatctaaataaccgtagctccgtttcaggtggttcaagttactaaatttttctaaaataaagatctacatattaaaattgtccataaattgaattaaatttatttaattctttttaaatgggctttaattagatttaatcttgtaaaatttataataaattcacttggagtcagaataaggccgttcaagtctcataattcatctaaaatcatgatctacatgtttgtttactttatatgtattgtttatttggtttttattagtcttttacttcgttttgcgtgttagcttgtcgtttccgtcgttgcgaaggtttgtgagtgcgtcggaagtgatcaagaagattaattgaagaccgattattgcaaggcaagtcacacagatcctaaacacattcctttgagcatgttgatcctatatttaaattctctatttaattcaactgtgcatttattttcgaatgtcactgggtggtgtgaacctattctttgttatggccaatttgcattgattactctattccttgataccttgggttattataatttgactagttgagctttatatattggttcagctagatgttagacataattgcttataccccggttgagctgcctgtgggagtggagccggagcttcgctagaccgtaattccgctgctattttcttttcttttgtaagtatgtaacgttattattatgatgaatctgtatattaaattgtcagtttgtgtacctcggctgattcctagatgaggattttatgcacaaataagttcggaaattactagtgaaattcgatcctcgacggttgccttgattgtttgcaatggtttgcagaagttgggtttgggtggccataacgccagccagggtggttaggtcgggtgcttgagtctcttcattgctggttgatgcccgacgtcggcttgccatctgtgtaggccgattaggtaagtaacctagtttcctaactagcccttatggttttattccgttaaggaaattgttttgatgtgaactttgttttgcaagcatggtggaataaactcattcataacacaacagtaaaatatcataaataacaacacagagttccacagatagtacataaatcatgatacaatcgactgcacatatacgcagtccaaataaagttcatccaaatggtacatcgaactaatcatcaagctactcgtcaatctaggtaggggggtgtgtctcgcatgctatccaaaaaccatctgaagcgagatcgaagctgcaatagtcctccagtctagtcatccaaccatccgcaggaacctggggcaggaagagggtggtcgctggctcgtgcaaacctgagtccccacggctcggaagtaggggtctctggatctagcttgggcttcttgcccgagggtcgtgtgctcttgcaggcagtgctgagggtacgagggcctccgacaaaggtgatgcggtggacaggagtctcgtcctctgaagggtcggtgatgtccggctctatctctggctcggtgtcggtcccctctgtcttggagtcgacctggatcggagtctccaaactggaacccagctgcggtgaaagagtggagatcagtggagtgtgcacaatcttcggggcaggtggctgtgtcactgtcgggtccaccaagtaaggtgctgactcggtagctagcatatcaacctctcccaacagagcgtggaacgctggcgggtacggcggggtaaggaagaagtagcggtcacgcctgtcacatcctgattttcgtttcaggatttataaattatttaataaattaatagaatttatattaaatgttcattaatttacaagtgaagttaaatgtgggaaataaaatttcataaatataaagcatggttggatttaatttttattaaattctccatgattaattatactctctaaaattttctcggattttttcggagctcaattcctaaatgatacaaagaacagttaagtaattagtaatcaattaatgatctaattataatgttaagtgcttttcttgtttaaaaatccttaatttatagattgttgtctaaaagggaattattagaaatgatcttaaaagcctagaagagaagatctaattttaattaat

SEQ ID NO: 25879 - DNA, 2203 bp, Oryza sativa
gtttactttatttacttacctttttactttgactttctaaactttattcaaattaatccaaaaacttgtgctattaattggataaaggtcttaactcactcctttcacttgtctttagatgccgcgctacaagcctgagtacctgtttggtgttgagggttttgtccaggagttgcgtacgatgtcctttgtcattggatttgggactgcccctttttatgcccagattcctcatgatcgtcatgaagagaagtgtcgagtcaaagtcactttgaacagtaatagtgaagaggtcccctcagtaatgttcgaagctggaggaagaactacatccatgcatgtcaggaggtggcaaggatcgccataggagagctccgcgatcgctacagtgatcagttggccgacactgagtatcgctaccatcctcgtcaaccacagggaagtgaccgtggcagttaccttgagactgaaggaattgaaaatgatgctaccacaaggcatttggttgagatgttgtgggctatggatgaaagtcgtgcggagactgtgttagcagctcaagatcgtgaagatcggaatcgtggtaagatttgtaagctcgaagacaaggtggatcgtttggagaaggaactagccgcattgaagggagaagcaccgccgcagaaggccaggattcgtcttaccgcaaggaagagagctctatttgtccctcgttatcaattggcgccaaaggttcgtgtggtggagaaagaagttgccccaaccctagcggatcctccggtcatgatcataagtgatgaagaagaagaatccaagcgcaacaattccaagattgagtgggtagcaactcaagatgatgaagacgagccaaatgagccttcaatcgacctccgatgcttggaagaactagagtagcttgttaagccgttgtcttagatcgttgtgttagtttgcttgctttaagttggttgtgtgtgtgggtcttgcatgtgctttacatcagtggtgggatgtaagtgcatgcgtttgtttgcttttgagtgttaggaagttggtgagtttagtggtgtgagagtcttcagtttgtaataatgaaactcagttaagatcaataaaagctaaagtaattctctgtcctaaatagtttcccctggtttctcttcttgtgccctgccagatggtgaatactcgcagcaacgggaatggtcccaacaaccccaataacaacaatggagagaatcccactcttgctcaagttcttgctcaacagacacagctaatgaacatgatgatgcaacaacttcagaatcagcagaaccaaggaaataaccatgtacctcctcagaataagttagcagaatttcttcgtgtgaggccgcctattttctctagtaccactaatcctgttgaagctggtgattggctgcatgccatagagaagaagttggatttactttagtgcactgatcaggagaaggtctcatttgcatcacaccagttgcatggccctgcctctgaatggtgggatcacttccgccttaacaggactactgctgaacctatcacttggcttgagttcaccgctgctttccggaagacgcatataccatcgggagtggtgtctctcaaaaagaaggaattcaggtcgcttacccagggatctcgctctgttacggagtatctgcacgagttcaatcgtctggctcgttatgctccggaagatgtgcgcaatgatgaagagcgtcaggagaagtttttggaaggacttaatgatgagctttcttacccactcatgactggagattatcatgatttccagaagctagtggataaggctattcgtcaggaggacaaatacaatcgcatggagcagaagaaacgtcggattgctcaattcaagacacaacaggggaataatcagaagccgcgtcttactttaagaccccagtccatgccacatggaggttcttcgtttgttgttcgtccgcagcgtcagttcttcaacaacaatgctggcaacaacatccgcaatcaagctccacgtcctgttgcagctccaacacagcaacaacctgccaagagggagcaaggcagcaagcccgtggtgtgtttcaactgtggagacccacgacattatgctgacaagtgtccgaagccccgacgcgtgaaggctgtccctacccagagcaactgtacggtacca

SEQ ID NO: 25880 - DNA, 2042 bp, Oryza sativa
attgcccttggctaggcctggagttggtcggggagagacacaacttctttcatctacaacaattctttgctgaggctgtcgatgcaaagaatggttgctaagatttattgccgagtcaggtgcagcaggaggagcattggtgcattgtttctgctatgggttctgattaacacgaggccttacgggtacggcgtttgctccagtgaccacaatacgattggaatgtctgcttcgtgtaaattggcggtaatgtggaggtcgattttgccttggttggggacagtttttggagtaatgcccttcttcactgcagttgtaacaaacaataactttcttacactcgggttcttcatcttgtacttgatttctcagctgctgtattggaacttccaaaggtacaacgcagatactggcccctgtcttgtcagctggtggctggggctgaaattgagcattgacaccttgtggtagtgcattcattggaattggagctgttgcaacgcgggctataggactgcttcgggatgcatggatgacaattcgttgaggagcaagcttctgattgcagggagttgcgtggactgacgtgccggcagctatgtttctcggttttgggcacttgtcggcgaaatgacccattccttgacaattgaagcaacagatgtcttcccggactcggcattttcttttctcatttcgattcctctgtcctggcactggagttaggctgaaacggtgaccttggcggggatttgtgttgccttgatgcttctctccgttggaactggcgggttggttggccatcttcttcgtcagcagaaaactgaattgacaatcttttggtacatgatcagttccttcacaaaagaaacaagtgatcctgctcgttggacacctgtcgggtggatggtcttcctcacaatgaacgcatgtagaggcacacgagctggcaacatgaccgatttctccacaacgagagcatgccttaagttctattttattctggttaaagccttggggagacttcgcatcttcatcatctgaggagacttgatctgaatcttcactaccagacactctacctccattagctaaaagatgctctgtcaactgttgtgcaccttgggaggaatttcttctctgatgttttgtcattcctggtggaggccattctgtgctggtaatgatcatcttacggacttcatcttcggttcgcattgggcttttcttttctgctgaggacagttccttgcgtagtgcccttgctcatcacacataaaacagatgatacttgcttcttttgggtcaacatgtggcatggcatgaggggccttctgggatgttggcggagcgctgacttgtggagagagagcttggactgcctccaactgcacttgatgttgcatctgactcgggttcaaaattgcaatccaatgctgctgtagtatctctataagcaattggttctggttaatcaggtgttggacactgccacacaactggtgtctggtgcttcattcactcggagcttgaggtaccaatgtcctgacttctgaccttattgcctttctcattgtcagccatctgttgcaaaggtttggagagggagagagggaaaacaaaggggagagacagattagaaactaaggataggaccttaacagatctaagtcttttgctgttatgatgtatgttaggcttattctgcaagttgattaagcaaacaacctagcatggttacatcacaccccactgatgcaaaccacgcgctacacacacaaacaaggaaacacacgactaacgactctaccctagagggtggcttaggttctgcgacgggttctccaagatcttcactcctgcttcacagctggcttcactgcttcctccacttcactagcggatccttgcagtcttccggagcttcggcaaacaattgacgacatcttcttcttcgcaaagctgaccatctagtactagttgaaaatccgaagaaggaagaacggagaaaccttttgcaaatagcattaggggaaggagaa

SEQ ID NO: 25881 - DNA, 2044 bp, Oryza sativa
  unsure (1)..(2044): unsure at all n locations
ctttgattatgtcgggtccaaacaacgcaggttctccagtctcggaccacattagtggggtacggcatcgtcgaccaaataatgcctcatttggcgacatctttaggctagcttggaaactgttgtcgtagaagagttcggcgtagggcaaacatttctcccaatccttgctaaaatccaacgcacaagctctcaacatgtcctccaagacctggtttgttctctcagtctggccgtccgtttgtgggtggtaagctatgctaaaagcaaggtaactccatagggcttcatgtactttttcccagaaatgcgaggtaaactgtgtgcctcgatcggatataattctcttaggtacaccatgaagacatactatcatggtcatgtataactcggctagcttgacaccgctatagtttgtcttgacaggaataaatctcgccgtcnnnnnnnnnnnnnnnnnnnnnnnnnaaatggaatcataaccatatgcggttttaggcaatccaacaataaaatccatacctatctcgtcccattccactcggaaatcctaaggggttgcagcaaacctgccggtcgctggtgctcagccttcaccttctggcatacgtcgcaaagtgctacatattctgctatgtctcttttcatgttggccaccagtatccttccttcagatcctggtacatcttcgtacttccggggtgcaatgaatatgctgattcttgggcttcttttagaattaatcccctcagtccaccctgtttgggtacgtagatcctcttcttataccatagcgtttccttctcatcaattgagaattctttcgcacgtccagcggccatgcgctccttcacttcttggatcacttcgttgtccttctgggcttcctctatctgggttctcaaaagagggtgaatgtccagggtgtttatctgtccacgaggtactatatgtaggtttagctgggctatttcctctttaagctcaggagccatcccttccattctcagatgattgcaatggctcttacaactcaaagcgtcggccacaacgtttgctttgcccgggtgatagtgaacctctagatcataatccttgattaattccaaccatcgcctttgccttaggttgagatctgactgagtgaaaatatatttcagacttttgtggtcagtgtagatatcgcaatggtttccaatcaaatagtatctccaaatttttagcgcatgaaccacggctgctagttctaggtcatgggtagggtaattttcctcgtgcggtcgcagttgtcgcgatgcataggccacaacctttccgtcctgcatcagtactcctcctagtccttgccttgatgcatcacaatatataacaaagtctttcctattgtcggggagaactagaataggcgtagaggccaatttttccttgagctgctcaaagctttcctggcactgttctgaccatacaaacttcttttccttcttgagcagttgagtcattggtcgagctatcttagagaatccttcaataaaccttcgatagtatccggccaaacctagaaagctctgaatttcggtcacagacttgggtgccttccattccgtacggcctcaactttggcaggatctactgctactccaccggctgagatcacatggcctagaaaggcgacttcctttaaccagaactcacatttactaaattttgcatatagcttatgcttccgaagtttctcgagtaccaaacgcaagtgctctgcatgctcttcctcgtctttggagtagattaaaatatcatcgatgaatactaccacaaatttgtccaagtactccatgaacactttgtacataagattcataaagtataccggggcgttggtcaaaccaaacgacattactgtgaactcgtacaatccatagcgtgttaagaacgcggtcttgggtatgtctccgatcctaatcttcagttggtggtatcctgatcgaaggtcaatcttagagaacaccttagctcctttaagttgatcgaaaaggtcatcaatccg

SEQ ID NO: 25882 - DNA, 10702 bp, Oryza sativa
  unsure (1)..(10702): unsure at all n locations
caatcaagagagtagaatcagggattgggaagagcaacatagagaaggcagaagcatgagactaggattagagaaatagaaattaggggaggcagagttggaggaggaagagagccatggcaaagccagattatatttctgttcatcgatccccttccagcgtgtgtggctgctgcttttatagtagtcaacttcctagctgagtgggccaaggtttgcttcagcccaagagctcactcgttaggcccatatcgtgacattctttcccccttgagtttcggcttgccctcaagccaatgcaacagagtcatagagccgccgggatcccagatcattggaactcttctggtgcaactgaagaacaatatcatgtgtctaaatatgatgctcaccattctgacagaactccaatgcaaaccaagtgatatttcaactggaaccatatagagtatatgcttttgatcctctcatctacacaaaaaccagcccagtacctcattgcagctcaggaacagcagttcaaaaccaaccagcataaaaccattcatgttttgcaccttacagtcaggtagaactaaagttttgatgagtccaagatgaattgtactccagaatctctcaacagatagcaaggttccatgcaattcagtggtgatgatgtggctgaagaatatttgatttgattcacaaagtgctctagcaagatatatactcatccaaaactccacggagagatccattgcatcaagtattgtgctagattgttcacaataaactgacactacccaagttgcactgaactgataaataaataattgcatcacaatgacccaattagattgtttctttagcaaggcttgaaagtgtgttccattggcagctgaaacatccgcaatatctgatctcctttgaaaatgcttgcaccaaacagaacttgctagaaagttgaattgtaacatactcggaacttgttgaataaatgagttttcattcccatatagaacctgcctggttttgcataaacccaggtacaagatgcagcttggatttatcttcgcccaagattgcacaagcaaatcaatgtcacttatgtctccagttggatgatcaagaaggtagttggaaccgaaattgacaactcccagttgcagctgctctctctgtaaacagcactcatttgtcttcccactttgattccactgaagaataaactcagatttaactagtaactgttgcagcctttcccatagttctccccaagaattgacaaatgacagtagcaatagttttggttgcagcattacttccaacccattagtcaaaccgccacaataatgcacatgaggtgaaaataatctcaagatccataaatcaggtggtggccatgtcttccaggaagtgatctctgtcaatgtcaaaaacatcaattccttacttttagtttgaagagaaggtggccatgattgaaagagtttgaccagcacacttctgctgccttgtactgttcgtggatcaggacagggttcaagttgatgctcagcactgtcacctttgcaaatggctccaggaagagatggcccatactgtgagatcttcaccaccacgcttccactgccttgagtaaaccatggatcaggccatagtaaagattgctgctcaacaattgaacctttgcacttggcttgaaaaggaggtggccatggttggagaggctcaaataccaccacactgctgcatcttccatctgcttgacaaccatagagacatatcgtcaaacagatgagagatagatagatagctcagtctgaatcagctatcccgtagtactccaataaacaattggtgccatatactaatatacaaattaatcaaccaagaaccagtcaatgataattgataaagaaatgcgaaattgtgtggcatgcagatcgatcgaatggacagcaacgacgaggggtggggggtgagattccattccacccaactcaacacacaccaccaccacctgctgtgctcgagttcgagaaccccaaccccaactactcccattcctgcctcccctgcgcaaaagccctaaccctgctcaacacggctcttgttggtgggccccacccaggggaggttttaaactaaacaaaaaaaaaacttgagccaatcagcatccttctcgcccttcgccagtaggacaggcaaaaagcagctgcagcatgtttgggatgccacgtcagcaattctagctacgactacgaaatcctccagcaagaagaagaacgcaccatttcatttaggcttctttatctccaaaatctccaaaggcccgggctcacgacaacatcaccgctacagtgtacaggatcggagcgccgccgtatcgagtcgagatccatggagacctatcagccagggcgctgccgccgcctcgccgccgaccaccaccgtcgcggcatcctcgctgcaggtagtgcaagctgctacccctacgccgctaatccctaccgcatggcgccggcggcgagcttgttgcgccacgtcggtgcgggcggcggcgcgatgaacacggcgttcaccgagacgacaaccaacggcggcggcgacgcctcctatagcatcgggccaagcttgagcttgcgccagcaccacaccggtgtgggcggcgccggcgaccggaccacggtgttcgccggcggcgacgcgctcgccgcgaactacccctacagctacgcgataccggttccttactccgctcaaggctggcaccgcatcggtgcggggggcggccggaacacggcgctccccaacttcgacgtggccccttactttgctacggcggatctccatcacatcggtggaggtggcgaccacaacacggcgttcttccccaacatcgacgacctcgccatgaacgctttcagcctcgccgcaccaaaccagtactctgctgcggaattctattacaacagtgcaggtggcgagcagaacatcgaggaattctactacaacggtgcgagtggtgtgcagaacatggtgcccccctacatggacaccctcactgcgaacgctttcagcttcaccacaccgggccattactctgctacggaattctactacaacaatgcagatggtgagcagaacattgaggaattttactataacgctgtaggccatgagcagaacatagtgtcccctaacatggacaccctcaccgcgaatactttcagctttgccacaccgatccattactctgctgcggaattctactacaacggcgcaagcggtgagcagaacattgaggaattctactacaacggtgcgagtggtgtgcagaacatggtgccctccaccgtggacaccctcaccgcgaacactttcagcttcaccacaccgggccattactctgctacggaattctactacaatggtgcaggcgatgagcagaacatagaggaattctactacaacggtgtaggcggtgagcagaacacggtgtcccccaacatgggcaccctcaccgcgaatgctttcagcttcgccacaccagcccattaccctgctgtggaattctactacaacggtgtaggcggtagcagaacatcgaggaattctactacaatggtgcaagtggtgagcagaatatggcgttccccaccacggacacccatgcagtgaacattttcagcttcgccacaccggcccattactctgtcgaggaattccaccaaatcagtgcaggcgccgagcagaacatggtgtcccccaacacggacaacctcgccatgaatgctttcagcttcgccaccccgttcaatcactctgctgcagaattcttccaccacatcggtgcaagcggcgagcggaacacggtgtgccccaacaacgacacccacctcgccgcgaatgctttcagcttcgtcgcgccagtccattactccgatgccaatgcagacctccttctccatgtggtggatgccggcggtgagcaagacacggtggccgccaatgtcgacgtgctcggcatcccaccagcaccggcaagcatcaccaatgccatcgtgaagagcgtgtggcgggagaactacagggagcagttcaagctcgtggtcgacgcgctcaaccaacctcgtcgccacctctacatcgccgtcgacatggagttcgccgcagacgccaccaccaacatccgccgaaggccggtaacctccaccggttgctaccatcacctgcgcgagtttgtgaatcgaggtgacatagtccaaatgggcctcacgttcgtgttcgtcggtgacggcgaacaatcctcctcctcctcctcgccgccgccgataacactagagatcaacttcaaaatcaacatcaaggcgcgcaagtannnnnnnnnnnnnnnnnnnnnnnnnnnccgtcaaggccatgatctgagggagcaccggaggaggggcgtctcgccgcgtcgcgtctacgatggccgctccgtcacctggctagcttaccacggcgactacgacctgagtttcctcctccacctgctgcaacgcggaggccgccgccgcggaggcggcgatctcccgcgtcagctagccacgtttctgcgccggctacgggagaatttcccggcgttctacgacgtccgcgtgatcaggcagatgcggaggatcatggcttcagcgggaagctcactgggctcgccgagcacctcggaatccggcgtaccggcggcgccgcgcaccatgccggctccgacgcgctgctgacactgtcgtgtttcttcaagatcttcagatccctctcaggacagcagctgcatcagctggatgctcggcgagggttactcgctgggttagaggagtggaacatggcgatcaaatgtgctcgccacattgacgatcacactagaaacatcaaggtgatcgaggtggtggcagaaaacctcggcgaagaggcgcgacgaatcggagagctggtggacagcaacttcagcatcattggagtagaggtaaatcaggtagtaatccatcctcaattggacaggaaggcttatgaaatggtcatcgcgttcatgaaccctgaaggaatgttggcttacgggcgtgcctggaaattctgcatcagtcgtttcacgtcagacaatggcaatgtactgaatctgaaacagcttgctgaacttgtgcaatcttgtggagcaaccgataaccctgatgtatcctgggtgacattccacggatcagatgtgatctgcagactgatcaggtcagccaatggtggtgttattccttcatcgatcagcggagagagtttcctccctagcttgtatgatgtcgcattgatcgttcgtcgattccttggcattggcacactccctacaaccgagcgcaatggaggtatttttgatgttgctcgagcgctggaactgaaggccatcgaggccgacaaggaggcagagagggttcttcttactctgagatgcttcatgagattggcagaaatggagtcggctgtccaatggtagcttgtggcgagctgctgcatgctggagcgttcagtgtgcagtggtaccaaatccttgctgtttcttcttctcagaattcatacgtgtgaacttcatatatgtatatgttgtaacagtatgatttttttttatttagaactagggcatgaagataacagtatgattttgtagctttaatttgtgcttatatgactttccttataacttgtacaaattcctagcttggaatataataataagggtgtacatacgtgaattgctctgggtttgtatgctggtgaaaaagtagagattaattggatgttgatggtggatggaaacgaaatgcatcatgttgctcttccgtttggctggaacatgttggcatctggcatctgcagatctgctgtttttttttttttgaaagtacagtggcatctgctgttcgatctcttcgtagcttacagcccttacctttttttcttttcaatggagaattgctgctggagctgcccatcagcaaatcgctcgacggtggaagatgcatgatcgttcagtgtggtaccgaatcatttctgtctgtcaatgttgtcagtgtggttttttagctgttgttgtgatacaaaaaggaattctacttaagactcattcgagtgaacctcatatgttgtaacagtgtaattttgttgcgtttgtgctcatatatgcgacttttttttcttcttcttctttgaagactcatacaattttttagctttaaatagaatttaaatgagtgtttgtttgtgaattgcatgttgaatagcttcatattgattgtgaaagggtaagaggcctaatatgtaagtggagaagcttctcacctcatttactagcttttaagataggaaatgccccggttatgattcaacaatgtacttgtttgtattgtatgtatgcgcagatgaataaggcgaacgaactgcatcagtttgtagatgacattatgaataatcaactgcgagatgaatgatgtttggaccttgtggtccgctctgattacaagtgagcagaaatgctagtcgctaatatgttttagccagcacaatctgatgcaatctgtaacaaaacacatcagttgttttcttcgacatctgtctgaaacagcggtcataacatcacagagacagagattcgtagcagtgcaaaagttttagcgccaagtgcaacgaagcagaggagagcgaagcgccgaagcgtgtgcgtaggatgaattgcgtggttttgaacggggaaaatcacagatacgctttcgcgtgggcccacctatagcctgacttctcatcagtcgctttttactagaaaggggtcatggtagtaggatattctagcggagagggtggtgggccctctcgaatcctcccctttttctctcgcgcggccgtgtgggcgtgtgttgcatcccgtcgcgccgcaccgccaccaaccccacaaaggtggggccacccgagaaacgtgcccaatgctctgatttccctgcaatgcaccttgtacttcttttttatagtaactagctgggtggcctgcgcaattgcgcggctagtatccatacaaaactaccttcttttatatatgagtttacttaaattttgataaatagctatctcgtcatcttaggcctttaaaagaccaaaccttatcattttcatgtttctaattttatagtttttaaaagtcacgacaatcgctacctcttccttctttgtcacccctttatttgcttccttgatctactacggcttctattcatcctcatttgaactttaaaattgaccttataagttaattatctcgttggctttcatttttataatttttaaaagtaacgccaaacgctgccactctactcctcttcggcccatccgctgcctcatctctttattgtcattgggattttaaaaatcgaacgtagttatcatcagtgttcatttttaactttctaaaagtcccgccaaaccgtcagcggcatcaccattatactactctacagcccgcttgatgccttttcttttaattatcattgagattttaaaaatcgaatgtgattacctttgtgatttatttttttactttctagaagtcttgccaaccatagtgattgtgcagcttaacgggttgcctgtcatctctccttcctgttaattgtcattgggattctatttggggtttgtttatagtttttacgcccgctgtcttatctctttattatcgttgagattttacaaatcgaacgtgattatcgctggggtttatttttttactttctagaagtcccgccaaccactgtgatcatgatgttttaatggtctgtccgtcgtcccttctctggatcataaacacattgtttttaatatatataatcaattaattgtatgttcagcactgataaaaaatgatccagtgacatgccttactactgtacttctttaattggtttgttgattttatgtgtgcacgtactccgtatgctgcatgcatgagactacatgagtcaggataacacatagcagctagcacctactgaattacaatccaagtctagtacggattgtttcactcgggaggcagggattccgattcctctttttttttcttttctagccaaaattgaccggtcgatttcctattagattctttctccatctctaaatactttaaatacttttatgtatcgtatgacttatgatatcaatctacaccgttgtaattttgaacaatcatgatctagcggtttatattttttttcttttcttcgattaatgtgggaatttctagcccccacagtaaacgtggtgtctcctttcaaggctgctttaataatataatagatagatgactgggaaaaaaaatacttgtgcgtcgtaatggatgaatgctattttaatcttatcattgttatacggtttggctatggcaaaattgactatgggaattcgtttggatatatttttttagaaaatcatgagctgcaattaagagtccggttttcatctcaaattaacatgcgagtttttttaaagagatttcttatataattcctttgtatttctaaaagcaaacgaaatgaaaatccaactcaaacacggatctgtatttccaaaagagaacgaactttaaaaaaccgactcaaacacggatgatgtaccaaaatatcggcaaaaacatcttcaatttttataatagtagagaaataaaacatcacggttttttctcaacgagctacaaccaattattacggctaacactcttaaaaagaaaattagtagtattaaccagaaaattagtctagtgttttgtgactaatccagttttttaaacagaagacaatgtcactaatctaaaagcaagtttgatagtataacaaactattaactttaaaatttaacacatcactacaatcaatataatagtttatccatacaatattttcatataaatatatatcatatcattatcatttgaacctcttatgcacacataatatcttaaagcccatactgcagttggctataaagtctatatctcgtttttcttcttctcttctacatgtgtgcttatagctagcttatggtctgttgttgttgtactttgctctaatatctactcccttagtctcagaaggttttttttttaggatttagaaccgatatatttgcaccagaggtacctggaatattgggggcatttgcattacactcactccggtgcgttacaaagcagctttcgtttggtttcagattgcatgatcaaatgcaatcatcctgttggataagacataagcaactagcactactgttattttgtattgggaaaaggataacaaagtctaaactgcattaatctgcatccatggagtctgttcaggagagtggctgttattttgacgccaattctccaaagcgatcctgactattcttgtatattgatagagcaggaaaataaagctatttacagagttttgtaggatggggaactactcaccattatacaagttaatacatgaggttaatcctaattgagattagacaatatttgatatacagttcactatggagtctgttcaggagagtgggtgtttttttcttcttgtccttattgtttctcctgttaaagtgtcaggtcctgttgattactgatagcacaagatttaaaatttctctacctcatgatcgtttaattgctataatctttttccctgagcacatgacctttttttattccaacttaaattcatagctggtatgtttttatttcaggtataagcagcatagtaaaatgagcaaagttgacgatttaccttgaaggtaatccatgatagacgtaagttagaaagttgcaatacgactctccagtttctttcatagtgaggattttagagatgaaataataagaactatttgtaattctatgacaggtggatctcaattaatacctttaagacagatagtaaacttatggtcaagaactgcatataccaaaactgtgtttagttcacaccaaaattagaagtttggttgaaattacaacgatgtaacggaaaagttgaaagtttgtgtgtgtaagaaagttttgatgagatggaaaagttgaaagtttgaagaaaaactttggaactaaacacggcgcaaggtctgttctacataagatccaaagtgaagtacacaatctttgtaagatctgttttacggtgaccagatcaaacgtgattatcactcattttcctcattgtatggacaaattacgtactccctttcaaaaaagaacaatttctagagatgaatttggacacatacctgtttagggtcattcccagaaattattttttatgggacggagaggagcatttgtctacttaatacttggcccataattaaaaggaggcccaggactgcaatttgccgggtttgcatttagcatttgcatgtgctaagatagatgagataaactatatgcctcttgtctctttcaagtgcgctctgttattggcctcaaatcatcaatatctcccttaactcgtttaaaatctatacccatgaaatatttattttttttaaaaaaaaaactctcccaaagacaagttacaagtgcagtcaacctacccacgttaattttggccataattatttctagaatctagattttctcataaaaatattaccatacaaaaatttttttgtggcaaat

SEQ ID NO: 25883 - DNA, 4512 bp, Oryza sativa
gtttctactttccaaatgtccctttccaaatagttacaacacccaaattcccttttcataaatctgaaaaaaaatacacaaaatgcaatatgataacgcatgtgaaggtatttgccacaaaaaatttttgtatggtaatatctattatattattaagacagctcgaaaagaaggcaccacgttcgccgtgggggctagaaattcccacattaatcggagaaaaagaaaaaatatcgaccgcttgatcattgatagcctatattttaatggctgagatttaattaaaattttggaagattagacttggtttcacgtatacggacataccaggcaaactggacgtacgtatcagacatggattgacatgtgcagtagtaataggacaccaataagtattgacatgtacaggtaataggacaccaattaacatacgacaacaatagcaatatggcagtagattccaaaataaaaacacccgaaaaggaaaggagagtccaagtagaaatacaatttaaaaatagctgaaattcggaattaaaaataagcaatattgaaagaagtttccatataataatccaatacgagattaattaaaatttaaattaaaataaaataaattctaaaattagaaaaggaaaggggagtccatgtagtaatacaatttaaaaatagctgaaattcggaattaaaaataaggaattttaaaagaagagtcaatataagaacccaatacgagattaattaaaattcgaaataaaaataaaaataaatccgaaattagcaaaagaaaataaaagaagagttcaagtaggaatacaatttaaaattagctgaaattcggaattaaaaataagtaatattgaaagaagaatccatataagaacccaatacgagattaattaaaatttagaataaaaaataatataatatccaaaactagaaaaattaaaagagaggtcaagtaggaatacaattttgaaacaactgaaattgaaaataaaaatttttattaaaagaacacaacacattattaactaatttttaaaaaaaaatcctgaaaattttcaattaggaatacaatttataaataactaaaatttgtgataaaaataaagactattgaaagaaaagacatctaaaacatatgatgagataaattaagtaataggcctataaagaagtaaagtggtggcggttgatacaacatataaaaattattaataaaacaccaaataaaatcctaatgacgattaaaacgtgggatgtcaggcaggccatgaagcaaacgagtaaggcggttgccgggacttctaaaaagtaaaataattaaaccctattgataatcatattcgatttttaaaatctcaataataatagaaaggagaagcagcgggcggggtgtataagagtatagttgcagagccgccgacggttgacgggacttctagaaaataaaaaagtgaattccaacgatagttatgttcggtttttagaatcacaataacaatagagagtagtaggcagacggactgtagaggggcatagtggcatcgtttgatgggacttctaaaaattatagaaaatgaaactacaagtccaatttttaaggtttcggaacttctaaaaagtaaaaaaaaaccaatgataatcatgtttgattttaaaatctcaatgacaataaaaaagagagacagcaggcgagccatagagcagtacgatggcaaagtcgctaatagtttagcgggatttctagaaagtaaaaattgaacccaaacaataattatgttcgatttttaaaatctcaatgaaaataaagagaagagacaatggacgggacgtagaggagtataatgacaacgtttgacgggacatctagaaattataaaaacgaaacccaacgtgacaataaactctaaaaactatcaaatccaatttttaaaggttccaagaaaaatgaatagaaatagtggtagatcgagcgagtaaataaataaggagatgatataatggtagcaactggtgtgacttttaaaagctatataattagaaacacgatgatgataaggtttggtctttcaaagtcttaagaaaatgagatagctatttaacaaattttaagtaaaatcataaaaatatatatatatgatattgtttgggtgttagccacgtaattgcgcgggccacccagctagtttttgtatagaaggaaggagtattatcttttttttctgagcgagtaggatattcttgcggactggtggggccgctagaaatcctctcctctcctttttttttttttaatctcttcctcgcgcggtttcgtaggcgtgggcgcattcgtgtttgccgtcgcgtcgcgccgccaccaaaccagaaaaacgtgcccgatcgagtccgcctcactctgtttctcgctttggatgggcgcaccgcgcacacacacactctgtttctcgctccccatctactacctcctctgcttttcttctgctctgtgttcccctgctctgcaggagtagttcttagtgttcttcctgtaagttgtaattagtattaacctgaaaaatcaatccatgtggctaattcttttctttaacataagacaatgtcactaacactaatggcgtactactactcgactgagtcatttgtcttttttttccttgaaccgagatatttggaggcatttgcttcaggctcagtctgatgcaaaagaaaacaactgctactccttccgtccataatataagtgattttggatgaatatgacatatcttagtataatgaatcgtctgtccatattcattgtattaaaatgtgtcaaatccattcaaaatcccttatataatgagacggagggagcatttcgtaacgttttgctttagactgcatgaccaaacgcaatcatcagaacctgttggctaacacatgctaggagcagccagcatagctgttaatttgtaattgtaatcaggaaagaatcatcaagtccaaacaacattcacctctcactcacaatctgcatttacaattggtcattcattcatctgcattcgacaactgatgcgtttttggttggcacccgccattcacatccaactgctctactcattcatcttcatgcaacccagtgcaactcacaaaaacaaaacactcttatttgtatattacaaactataaatgtatgagccttaaaacaaagaagagtggtatgagaaaatgagctaataaagttataccgttgagttttaaaaggataatttcgtgtgagcacaaaggctacaaaactacacggacaagtgacaacatggcattgacagccacagcaaggattcgattaccacacggagttatcatgcatcctccatccatcagcaatttgctgggcatttccagcagcagttatccttaagcagcccttggacagccatcgccatgcctgggaaatcaggacgttctgccaatttcatatagcatctcagagtaagaagaaccctggctgcctcattgtcagcctcaatttccttcaggttcaatgctcgagcaacatcaaacaggcctcctttgcactcagttgcgggactgtgctgatgtcagagcatctacgctcaagcaatgcaacatcgtatatagcaggaaagaatgctctgcggtgtccaatgtaagaacaccattagcaggaaatcgcgagaagaatctattgagcctaaataatcaatcattagcacatgtaggttagtgtagcatatatggctaatcatggactaattagactcgaaagattggtctcgcgatttcctccctaactgtgcaattagtttttttaaaaatctatatttaatgcttatgcatgtgtcaaaagattcgatgtgatgtttttaggaaaaaaattttggaaactaaacagacctaagtgtggtgtgcagtacaacctttccatgtcagtcaagtcaatcgaatgatacattggatttaggcggaatcgtagcaggcgatttcgcgtagtactcctacaatattatcttttttttttctgattgatgagtaggatattctggcggacaggtaatcctctcctttttcttctttctcgcgacggtttacgtacgtgggcgtggccgcgtgggcgctcgtgttcgcagtcgcgtcgcgccgccaccaaaccccagggacggtggtggaggcgtggagccacctggagaacgttggccaagaccgcctcactcagtcactctcacccgttcagagcgtcgaagggagactgtttctcgctccccatctactataccttctctgcttttcttctgctctgtttcccctgctttgcaggagtagtagttcttagtgttctccttgcaattagtattaacctgaaatttaattcctctggctaatccttttctttaacatgagaaaatgtcactaatactaatggcgtactaatcgagtgagccatgtgtgtctctttctttcctttttctttttttctttcttgaatcgctatatttgcat

SEQ ID NO: 25884 - DNA, 6543 bp, Oryza sativa
taaagtactttaagcacaacttttcgttttttatatttgcacaaaattttttaataagacgagtaatcaaaccgtataagaaaaactcaaaatctcttatatgatggaacgggacggagggaatatttgcctacttggccaataattaaaagagggggaggggggcaggtctgcgaatctgcaattagcctgtttttgcatttatcatgtactaagatatagggggataaattatatgactcttgtctcgcttgttattgacatcaaatcatcgatatctcccttaactcgttaaaattctacacccatgaaatatttatatatttttttaaaaaaatctctcccaaagacaagttacaagtgtagtcaatccacgttaattttggccatattatttctacaatctagattttctgataaatatattactataaaaatgttgcaaatactttcacatgtgttattgcactttgtgttttttttcagatttgaaaaggaaatttgggtgttgtatctagtacctactccctccattctaaaatataagcatttttagaatagcgtcaaatcaaacatttttaactttgactattaatagtattttttttaaaaaagatcaatcatgtaaaattgatgttaatagatttatcattaaaaaaaactacaatacttcctccatctatttttgataggcatatttccaaattttaaaaaaatatttttgataggcatatttcaattcaaccacctatcatcttaatgactttctcggatttaatgcgcgactctccattcttccacacaatattggctatataggcatcgagaaacgtaaatattaatgaattgtttgtttacgaggaataactagtagcatatttaaatggatgataagtagaattacttaggggtgtttgattgggcttttcaacctgcttttgcttttgtataagccaaaagccaaccaaaggcctaaaaccacagctgcttttgtccaaaatcagcttttggtgtagtataaatcaaaaccacttctagccctgctttcgtgcttttggggggaaatattacccacctgccacagcataacggttaccggttctttttttttgttgttttctttcccgtccgtgacttccctctcctcctgttcgtgacttcttccgcggcggcctcgacactggcggcagcggacgcggcccggactagcacgacccccgatccggccggcctcgacgacctctctccctctgccctggtgcacagtggccctcccccggcgagccgtgcatattctgccccccactcgacgccgccctgccctgctccgacgacaccgacgccgtccctggtctggacgccgccctgctcgtccacgccatcgccgccgaggaattgagccgccggcatctgctcttccccgtcgccgccgccgagaaatcaagcggacgaggaggagcagccccggctggcctcggttgcccactcagtcggggacatcatggccggcggtggtggcggcagaggccggggcgggggcgcagcggtccatgggcgccagccgcgcgcgaaggcagcgggcggagccgaggaggcggctgcgcatgccggcggtggtggcggcggagaccagggcgggggcgtggcggtccatgggtgccagccacacgcggaggcggtaggcggagaccaggaggcaggacagctcgtcgcatagcgcctccatctcgtcgtcggcggcctccacctcccgcaaaaacgtctcgagcttctggtcgatggaaccccctgccgtcatcttgccgatccagcggcgccgccacatcttggccgcaactgggggagattactaagatcgatctcccaaatcttcctcctctcttcccctccctcttttcctacggtggaagatcctgtgtacgacatgtggggtccgcttataagcatgactattatttcaaaagcttcaactattgaaccaaacgagtttttttaaaagccacggcccatattccacagctgctttttaaaaagccacagcccacagctactttttcaaacgccacagcttaaccaaacacacccttatacttgatcattgtgtcaagatgaaatatgactattaaaagtaaatggaaagagtattatgtaactttttttaaaaaaaaacatatttcttttacatatattgttgatcaaaataacatattaaaagactgtgtcaaaatttaaaaatacttatattttgagacggatggagtatttggaaaagtatacttaggctgtgtttaaatccaaagtttggatccaaactttagtccttttccatcacattaacctgttatacacatacaacttttcagttacatcatctctaatttcaatcaaaatccaaactttacgctgaactaaacacagccttagtggggtgtgcattacaacctttccatgtcagtcaagtcaatcgaatgatacattggatttaggcggaatcgtagcaggcgatttcgcgtagtacagtattatcttcttttttttttctgattgatgagtaggatattctggcggataggttggtggggccatgggcccgcctagaaatcctctcctttttcttctttctcgcgacggtttacgtatgtgggcgtggccgcgtgggcgctcgtgttcgcagtcgcgtcgcgccgccaccaaaccccagggacggtggtggaggcgtggagccacctggagaacgttggccaagaccgcctcactcagtcactctcacccgttcagagcgtcgaagggagactgtttctcgctccccatctactatacctcctctgcttttcttctgctctgtttcccctgctttgcaggagtagtagttcttagtgttctccttgcaattagtattaacctgaaatttaattcctctggctaatccttttctttaacatgagaaaatgtcactaatactaatggcggactaatcgagtgagccatgtgtgtctctttctttcctttttctttttttctttcttgaatcgctatatttgcatcagccatcaggtgcctggaattttgggcgaatttgcttcaggctcagtctgatgcaaaagaaaacaactactcctactaagtaacgttttgtttcagactgcattaccaaacgcaatcatcacaacctgttggctagtaacacatgttagtagcacctagcatcactgcttatttgtagtcaggaaaggatcattcacctctcactcacagtctgcatttacaattggtcattcattcatctgcattcgacaactgatgcgttttttgttggcacccgccattcacatccaactgctctactcattcatccgcatacaacccagtgcaatttacaaaaacaaaacacttctatttgtatattacaaactataaatgtgagtcttaaaacaaagaagagttttgattttgtaatgctttccagtccctgtcccctgctgctctctctttaaatgtaaataacttttatttctcttaatggaaaaaattcgcctctggcgtattcccgaaaaaaaaaacaaagaagagtggtctgagcaaaagagcaactgaacttacaccgttacaacataagaaactcagtcatgtgagtcttaaaaggaaaaattctgtatgagcacaaaagatacaaaactacacggacaagtgacaaaatggcattgacaaccacaacaaggattcggttaccacaccgagtgatcatgcatcctccatccatcagcaatttgctgggcatttccaacagcaactctccttaagcagcccttggacagccatctttgtgcctgggaaatcagggcgttctgccagtctcatatagcatctcagagtaagaagaaccctggctgcctccatgtcagcctcaatttccttcaggttcagtgcttgagcaacatcgaacaggcctcctttgcactcaatccaaggaattgtgatgatgtcaaaggatctacgcacaagcaatgcaacatcgtatatagcaggaaagaatgctctccggtgtccaatgtaagaacaccattggcttggaaggtcttggggagaaaggaatgacctgatcatcctggcgatcccatgtgctccgtgaaatgtcacccaagatatgttggggtcacccaatgccccacaagatgccataaacttagcaaactgttgaggatgcacacaggcattgtctgccctggaactgatgcagaatttccaggcacgactgtaagccaacattccttcagcgttcataaatgtgacgatgatttcgtacaagtcagaatccttaagaaatgtcttgatgagttcataattttgttgggcttcaactgcgtaggagcgcttacccaattgagcatggattacctctactcaaacgatgttgaagttgctggccaccagctcttcaattcgtcttgcctcttcatccaacttatgtggtagcatcttgacaacgtagatgcttccagtatggtcgtcaatatggcgtgcacatttgatagccatgttccactcctccaacccagcaagcaatccccgccgagcatccatgcggtgcatctggtgacctgaaaggctgacgatcttgaagaaacaggacaatgtaagcagcgcgtcggagccatggtctcccccttgcagcaagcggaggaggaaagccaagtcatagtcgccgtgataggcgacccaggtgacggagccgtcgccgaacgggaggtggcgcaggagcccctcgtaaacaaactccggcgtgacgcctcttttgctgtgctgcgtgagatcatggccttggctggataggaaatgtatcgactcgccatggtacttaggcgaattgacgttgaagtcgaagttgatctccagtgctatcggcggcgagggggcttgttcgccttcgacatcaccgacgaatgcaaatgtgaggcccatctgaactatgtcacctccgttcacgtacctacgcacgtgttggtagcagctggtggaggttactggcctatggctcatgttggtggcggcgtccgctgtgaactccatgtcgacggcgatgtagaggttgcgatgaggttgatgaagcgcttccagcacgagcttgaattgctccatgcaattctcctgccacacgctctgcacggtggccatggcgaggtagtgcgcgagcgtgatgtcgtccgcagcgtcgaacacggacgacgcagtgccgagatcatcagcgccagcgccgaagtagtcgatgatgcctgtggcagcgaagttgttcacgccgaagagttggaggttgtggatttgatcggccgctgcgagtgtgtagctcggtgcggcatagagatgggcgccgcggccaccagggacgaggatgcggcctggcctagtgcagaggcggcctcgggtgtgtagaagttgccggacggacgattcatcgtgatggtagttgttgccgaggtggtcgctggactgataatggttcactttgcctgtcgacggtggagcttgttgtgctgctggcatgccaagtgcaccaatgttgtcgaacaccttgttctggtcaccgccagcaccaacgtgatcattgaccatgctatccttgccgtccgcgccgatgtggtttatggttgcggtgtggtcaataacgtcgtacgccttgtttttctcgtggcctgctccgatgtggtgcagaaccactgcgagggtgccgttgtcgtggtagagctcgtcgtccaagcccgcacccggcttggcgatgacagcatcgtagagcatgctctcatcagagctcactccgctgcccgcaccgatgtggctcaaggtcgccgtctgggggatcgagctgttcttcttgcagctcgctccaccatggtgcaagaccactgcgagggcgctgttgtcgccatagagctcgtcgccggagcccgcacccggcttggcgatgacagcgtcgtagagcatgctctcatcagagctcactccgctgcccgcgccgatgtggctcaaggtccccgtctgggggatggagctgttcttcttgcagctcgctccgccgtggtgcaagaccactgcgagggtgccgttgtcgccgtagagcttgtcgccggcgccgatgtggttcaaggtgtccatgctgcctgccgccggtggagcttagtgacgcctttgcgacgtcaggaacccgagggtcgacagtgagagagagagacacctctacgaaatgtgcttttgtctaatgtggtagtatgattttgaggcgaatcccctgtcctctcgcgcttagatagaattgttgttttagcttaggacaaatgtgcccctaaactctaatgatctgcagtggcaactgctgacgtggcatgccaacactggaggtcgcggctgattccggattggctgtaataataccgtcaagtttttataaatttaaaccaatacgggccccccaacccaagagttcgaggctttgagccggtatactagtgcgcaggattctccacagtggtagttaatcgctggaagcgaacg

SEQ ID NO: 25885 - DNA, 8079 bp, Oryza sativa
acgccggcggtgaggtgatgcagcggggaggtcgtcggcgcgtagagagcatggcgggatggatggagactccaatcccatggttatgcccgcaaggaaggcgggggaaggctggaggcaacgtttctgttctaccagcagctcttcttcatcaattcatggtgagcagcaagaactagggctggaaactgtcaatcaatttttctttaatacgaatatgatatcctcctcctccttttttttttcttttcatacaattatgctagtggtgttagacgactacttttaattcaatggtaaccgtgatgttaggacataagattgcagtttgatgtagctgatgtaataatgttcatgctgctacactactgaacatctctatatacagtatgagcaattttatagtccttgaggagatactatgaggtaccattttttctattgtaaatttggtatctcttggtatctagatactatgaggtaccaaattttacactaaaattttgatacctcacggtacctcctcaagaaccatagaattgctcatatagtatagtttctgttctccatttgcataacaccaggctaaatttttctgggccctgttttttgagagactatttgcgactgatctgcgaacaatagaaaagacttactttctttagggtgtggattgtcttctgtttggggtctttggcaaaccagaaacaaaatggcgattgaatcagtgtttttgttcccctgttaggccctgttgatgtttccttcgtttgcaaaacttagatatgttagtcttttgtttccttcatgtttagctgttgtccccagccctcaaacttctatatcccaaactcgctctcaataaaatcaagggccctgccctttatccaaaaaaaaaagttatatatgaaaacgattcaacttgaatatccttaggtttaatgaagtgaaaatttaacagttaggacgaagcatcacctaaattcttttggtcctttttcgtattaattgtgatgcactctagtcttatttacacttcatctcatttgttagtatgatccaagaaaattactgtatggctcgagtttgtccctggcataatctgttataatgtatcatttgatgaagatgtaccaaacatcacgttgcctagttcttcttttgattgttgatctaattattgggcacatcatagctgaaaataggacttgattactgattgcacaaggtttaaatctttctatctcatggccgttgaattgttaatcttttccctgtacacatgattttttttctaattgcagctcaaattcataggtggtatgtttttccttcaggtataagctgcactgtaagaagagcaaagttggcaatttaccttgaaggaaactcatgataaatgtgaatcaagagaaaattgctataggtctctccagttgcttccatgctgagtattttagagatgaaataacactctttgcaattctgtggctggtggatcaattaatacatgtaagacagatactaatgcatattccaacttttctacataacattcaaagtcgatctctatccaaaaatagaaggtacaaaatcttcgttaggtcaagctttgcagacccaactaagttgttcaaggtctttttgaagaagcctgaagaatcagtgggaatgcaatattcagatccagaagggctccacaataagaggtatgccattgattattgattcagttgatctttgggataaccaatacattttctaaaaagcactatggcataatacactactatctgataagaataagactaaatggataagacaatgtttcctgttatgcccccacacctcttctatggtcaatgatcccttgaaacatgaacttacaaagcatattggtgttgatgcctcctttacccggtctcattgccatcagaaaacaattgctcttcagtattcccttagaattgcaagtagcagttttttttttcactaaatcgcaaactcgagagcatcatcggcttccttcatttactcaaaccaatgcttcagatcctccccttccaccttgagtttgaaggggggtgttaagtatatcaaacattcaagcacatatcttgtaggcccatgtggctcatgaggactctgtataacatcatcatccctgagggataatggtctttctcaaatctccaaggtaattaacagaccttagagggagcaaaatacaccatgctaaagtagacgatcaggctatcactgtaaaatcaaagtgtttttgattattattctgtgatgaacaattggacattggagattattggttttgttatttagaatctattcacgaagtggtttttgagatgattggattttacaggtgaatcgcaggatcgtcattttatgtgaccggtcagaccgggtagtgtgtgccggtcagaccggcgtgtaatgcgcggtcagaccggcgcagcccacggtctgaccggccgacactgtgtcggtttcggttttgagttgtttatttggatatccgaatttattttatgattatgacttctagatgactcgatgtcaagttggagatagcttggtctcggaatatagtttctttgtttatttcatgtgtaggtgactcgatgtctcgggagagtatttgcggtgatggaccgggagtcggcttggggataagatgacgtccatggtggtcagagatcatgtgggatacttaggctagagttgatgcacatggttgatggagattccatatggcatacgatggagttattgtgtgcgtatgggatgcggagtcgaatttggaaggagtctaaatttggggcgattggttatgtaaagtttcttacttgtactagaggatttcctaaagtgtttagaactcctagtatgagtttggttcgtggctttaggctgcctacctcatgtataaatagaagggggagcggaggccttccggtatggcttttgaaagcaatagaattgagttttgagttaaggtttcgagtttagtcgagatttttgtaaagagtgatgttggtgcactttgaaaacacagagagaatcaataaagtcgtcatgtactttaagagttcttcgatttgtgtttcatcgagtttcggcggtctaaccggcgatctaccggcggtcagaccggtgggagcacggcggtcagaccggcggcggcgacaggcgcggcaggcaatctcggcggtcagaccggagattcaacaccgggctgtcacaccccaatctgataccggcgtacaacggcacctgataggagcgtgtcgtatggaaaacagcgcgaacccgttttctacgaaaccgcgatctcggtaccagtcccaaggacatagtgcttgtacccacggtgacaaatatgaatcaaagcaatccttaaataaatagaggacttatttaccttaacttaggttgcagctcagacagcccgagaatacaaccgacgacgcggacgaggaaacaccaacagcagcagcagcagcggaaccaacggtctaacacccaacaccacaggcgacggctgggaaccaggacgaaaccctaatcttcacttcactttatcttctcttcagggcggaggaactatatatatatttatatagagcaagggtgagtactttcgtactcagcaagtcacgggaacttaggtgtttaatgcaagcttggaagagaggcaaggttgttttgcaaatcttttatttgaagatattttgaaatcactaagtgatttatttctttctaagtttgggccgaaaagagacttacgtctcgtttcgaccttaagagatgtttttcaacagctcatttggtaatgtaccgacctcccgggtcagatcattacttctcggctcccagagccattccacttgattaatcggctcccagagcctttttcattttctcggactcccagagtccagctgcccagcagcacaacaatccgcttctactcgggaagcctagtctatgatgccctcagacatcccgaatcacacagattcgtttctgaccactcaggtcatccatctgtcacataggctgattctggttacgattcccacaccacaacaacttttcacaaagcacaggcaaacaaatctacgcaacgggaaccacctcacatccgcccatgaccgtgggcacggctgttcgaacagttagttaacctctgcagaggggtacactttacccacaagatacgaacttattccgaacacccgtcggtatcggaggttcgcaacaaagcctttcccaagccgacccagggttacctcatgccacatagaaggatcaaatcctcacataaacataggcctttttaggcgttcacaaatcaaactccaaccaccttgatcggtaagtgagcaagcttctcgtccttgccttactaagaacccggtttgtccgaccccgccccggcgttcccaactattggcatgcgaggcttccctgaatcgactagttacttagccagggtgtcccattccaccttgtggttgcactttgattatgttcgatgagtttcccacaggaatcggtccttatatgcgaatacaggacagtgccacataggcacaacccccgcatcgcgagttttcacaattcattttattttcaaacacaccgacaccacatgtcgggttttgaaggcttcacaaacccatttcccaagttttcgacaaacaacggtgtatgtgggatatttggtatacgcgctcagagagcacgaataccgaggtaccacaagggtggagcgacaaggaatcagggtagtacgacctacggaaattagtgcgactactgggtaggtccgtcggtttggcacgcaaaccgaggccaagcaagttaagtgtgtgattctaataatgccagttgcaaacaaaataataatgattttccaattataggagcaattggtcaaagggtgacttgtctttctcaaggtcttcacgaagctttacgaatcttcgagaaatcccatgatcgacgaaaatccgataaccgcaactatacgcaaacaatcgaaaacctaaacaaaagaccaaaagaaagatcctatttagactaaataatagtgccattaaacagatctcaattttacggaattattggaagtggaacggagtcgatcggagctacggatcaagggatatgaattttggaggtctaaatggattttctggacaaggaaatgttttgtcggaatttatggaaataatattctcaagaatattattgacagtcactgaccaaggaaaatgattcatggaattttggaataaggaattgatttctgaaagagggaaaaatgatttattgaatttatagaaaagagaaatatttgtggagtattggaaaagatattctcaagaatatctttgactcattgacaagtggggccaacaagaagtgagagtgagagaggatagatgggctgcggtccaatgggtggcggatgtggtagggggaggacgagggagcaaagttagactttgttccacggcagctggtttggaagagagacgcaacatagactttgttccaaggagcgaggagagaggtgaggcccatcagctagcgagagagagagagagagaggagatgggccggctcgggttgggcggcccacggccgggtgggcgtggccgagccgagccaggcctgcgcgcgcgggcgacgctgaccggtcgctgcttgacccggtcaagctgggccggcgggccagggtggcggccacgttggcacgggagagagagaggagaggagccgggccggagatcggacggctcacggcgcgcggcggaatccggcgaacggtggcaatccggagcgagcggcgggcaccggaagcgagagggggtcacggaggttccatccaccggctcggatatgggagagaggcgcgacggaggccggcgacggcggccgtgcggcggcgggatgggtggcatggcgcgggagcaaaagaggaggccggcggcggaattggcggtttggggtggttcattggagctcaaggtgggtggcggcgaggggattcggcacgggaccgaccggcggcggcgcgcgactgcgcacggcggcggcgggagcaaggcaccggcaagggcgcgatttggaggacgaacgcacaaactaccatgccccagtgctgtttaggagtcgctagaggatatagatgagaggatttgggcggggagctcacccatgagcgggaacggcggggcggatggagtcgcggcgaggcagacgtgacggcgggcgggcacggcgcggagagtgaaagggaagggcgcgggcttataggcgaggaggaaaggtcggtttgaaggagggaaaccgacattggcggtcaagggagctcggctggtgttcacgggcggcagcggcggtttcgtgggcaaagcgaaggcggcgacggtgtggatgcgttgggcggcgaagacggtggatcgagcggcggaaaatcgaaccgcgggagcgggaggattagcgcgggctggcgcggtcaaggtgggggcgacgagctggcgctggcgtctgtgtctctgcctccgagcgctagcggccaaggagcggaggcatggcgtcgttgcttgggagggaaaaagagaagggaggacggtggaaaggggggactttaccatgccggtttgggaaaaaggaggtgggagagggagtgctctgccttcgggatttggatggacgcgggtggagcggcttgggcacgcgctgcagagcttgcggcaggcagcggggccgagcggcagcatgacgcaggcgctaacggcggcggcgaccgggcggttgcgcggcgcaggcgcggcagggctgacggcagcaacgaccggccggtcggccacgcgcgagcgcgggaaagagcaaaggcggtggcgagttttgggcggcgacggcgggaagcggcgtcggcgcgagagagagacatcgagagagagagagagggagaaacagcgagagcgagagagacagagagagcgagcgacggctctctctctctctcggctcgcatgcgtgcaacgcacgtgcgaggggggggagatgatgggctgggaggggagatgggccggggaggagagtcggtccatccaaaaacatagggaggtaaagtagacttttacagagaaaactgatttggatagaattggagagatttagggtttggattcgaattcaaatttgatattcaaactcgagggtttagggatatatcaggggaaactcaaggagaagtcatggtaaggattcaaaaggaatacttggatatttgttctcgggaacatagggtggagtctaggaaaggattcgaggcgggatttgaataattctggattcgtagaagtatttggcgaggattcaaaggaaggatttgaatttcagaatttgatttcagagactcgaatcggaagaggaatttggatgagggggaggatttttgatttcgatgagagggaacaacgggattaaattgggatccttggcacaacttagactctcacacagagaacgaaaattttcgcatttaggattttgccgaattagttttttaacgtctcacgaaaagcggagcattacacggtcagaccagcggcatccactcggtcagaccagcagatcaatctcggtcagaccgacttccgtcgatttcgagggtaacttttatttccgctaaaagttttcggtttttgggtataccaaccattcaacccccctctggttggcttagttcttgtgattcgatcctacaatcacccctcatggtaacctctgcaccaccaggaattgtaccttaaaatatagcaaatgaagtgaattaccttttctaaattcaggcacaaatggaatctctatgtgtagttactttattgatcgcggtttatcattgacttcattgtgaactggagatatgctttatgtaccagtatttttactgcctattacagagagcagtgcgcatcaatatctgtatgtggaacctataatttcctattcctttttgctaaccgtgacattctttagatg

SEQ ID NO: 25886 - DNA, 1970 bp, Oryza sativa
ggcgcagcgcacacttatccggtccgcgactggtcgcggtgtgtgaccggtcacagaccggtcagatcgcgggttaggtggcaacaggtggtctgtcacacgcctcgccccgtcccgtcggaatgatgagagcttcctggctctcgtccctagccggagccggcgtgctaactcctggagttggtatgtcagtcccggtcagatccattccaggcttcagcgcaagtatggcaaggaagtcgctggccattaaatgaaggttgaaatgggcgtccaccggaaaagcgggcgagcggggcaggagacgtgcgctctgcttgttagaggtcacttccggctgtagactagccctcattgtaaaaagcatgtttcccttcttaggcagctagaggcccatgtggtgacccctgaccagataaaaaggaggcccaggcctaggaaaaaaagggggagagagagaagaaaggaggggagttgggactctggcgaagggtttctagagcctgaactctctttcgctctcggcctctcgggattccttcacgcaccgatccaccagaacacaggagtagggtgttacgcttctcagcggcccgaacctgtctacgtcgcccgtgtcttgcgtatttcctctctcgctgacgttcctcagatcgagggcgaagaatctcacttagcgcccccggccgaatcggcaaaggggggcctgcgcggtctcccggtgaggagcctcacgctccgtcatctggcgcaccaggtaggggcgcgcgtatttttctaagccctcgtcctctttcgtgtgcgccaagcttctctcgctcagcccaatggtcgaacgggcagtggcgcacagcctctctccgaacgctagcggtgacgatggggagcagaacccgcgccgtcgggctcgcaccccaccgttcccctatcgccgaaatcctgggcggggggtggcgctcggggaggtcgaaagatccgtgacttctccgcccgcgggcgacgggggaggacggcgagacggggcgcgtcgccgcctcgtctactgcgatggcggcacgccccaaggcgcgctccaggctgcgggcgcgctcctgcgtcacccgcctgtcgtccccgatccaaagactccagcccgcgttggctggatgacgtggccgacttggtcatgacgcgcagcggcgcctaggcgccggcgggcggtcctcccacaccgaggcctctggcgctgccgccgccggctccatgtcgtcgaggcggagggcgcggcgagcggcggccgttacccgccgttcgtccgccattccctcgtcaacgcctccgacccaagaatatgtgcgtggggggccggatgcccgcctcgatatcgagcgccggcgcgacgctcgtcgcgccgcccacgcaacggagggcgcttcctcgtccggagcgccacttcggtccgggcacgggggccggccccccgtgtccccggttggcggtgccggctgtcgagcctttgtggcgagcctttggaacgtccgttagcccccaaggttccggcccaccatcaccgaaaaatacaacggaagcgtcaaccccgccgagtttctccagatctacacgaccgggatcgaggctgccggggctgacgacagggtcatggcgaatttcatccccatggccctgaagggtcaggcgcggggttggctaatgaacttgccacccgcgtcggtccactcttgggaggatttgtgccagcagttcaccacgaacttccagggcacatatccgcgcccaggcgaagaagcggacttgcatgcggtacagcgaagggacgatgagtctcttcgctcgtacattcagcggttctgtcaagtccgcaacaccataccgtgcatccccgcacacgcggtgatctacgcgttcagggggggcgtgcggcacaaccgcatgctcaagaagatcgcctccaaggagccccagaccaccgc

SEQ ID NO: 25887 - DNA, 1784 bp, Oryza sativa
tagacaccgatgacaatgaagaagagagacatcatgggcagatgagtagttaggtaacaaaggaaagggaggcgatggttgccatggaaaacgggccaagggggcaacaaacgagtgaagtggtagcgctggtttctaaatccaataaaaaggaacctcaatgatgataagattttgattttataaggtaccgataataacaaagataaaagacagcatgacaaacggataacaaaagagaagagagagtgagagacagcggttgccatgggacagtgagccacgaggggtggcaaatgaccgtaaagaggaaggagcaggtgggctgtaaaggattaggatggcacggttgatggaacatctaaagactataaaataaaccgcaatgacgataaaaaaggaagggcagcgggcgaatcctaaacgagtgtggtaacggcgattgacatggcttctataaagtaaaaaataaaattgactgggcttgttaaaatcccaatgtcaacaaagatggctaaaagaaggggttgtaggtggactgtaaagaagtagagtagcttcggttggcagtactttttaaaactatgaaaagggaaacgatgatcaggttcaatttttaaaatcttaatgataataaatagaaggggttgaaggcaggccataaaagagtagggtggtgacgcttaactggacttctagaaactataaaaaacagaacttgacatgacaataaactctgaaaactattaagtctaatttttacaggttccaaagaagattaaaagaaatcatagtgtgccgggcaagattaaaggggtggtggctggtgtgactttataaactggtttttttaaatcttaaaacaatgaggtaactatttaataaattttaaagaaatttatgtgtaaaaaattagataatattatatggatgctagccgcgtaattgcgcgggccaccctactagttgtagtagaattcctcaatattctgctcaccccctacaccattgtagtagaattccacagcagagtaatgggccggtgtggcgaagctgaaagcattcgcggtgaggttgtccatgttgtgcggcactatgttctgcacaccgctcacaccgttgtagtagaattcctcgtaattctgctcgctgcctacaccgttgtagtcgaattccgcagcagagtactggtttggtgcggcgcggctgaaagcgttcatggcgcgggcgtcgatgttggggaagaacaccgtgttgtggtcgccacctccaccgatgtgatggagatccgccgtagcaaagtaaggggcgagcacgccgaaagcgtgatcgacgttggggaacaccgtgttctggccgccccccgcatcgatgcggtgccaatcttgagcagagtaagcaaccggtgtcgcgtagctgtataggtagttcgcggcgagcgtgtcgccgccggcgaacaccgtggtctggtcgccggcgccgcccacaccggtgtggtgctggtgcaagctcaagctcaagctcgggccgatgccgtaggagtctggcgtcgccgccgccatcgccaagggttccaggtcagcttttccagtctcctccttcccctcttcttcctcggtcctctgattctttccgccatgagttcttgttgttctaccagcagcaagtgttatgtgcaaaacacagggcgaggagcaaacaagatgcagatccagcgccatcgatggctgtgtcggaagaattaattaatcctggtttggataaatcttcccaagcaaccgaat

SEQ ID NO: 25888 - DNA, 11341 bp, Oryza sativa
ggcaccgattgtttaatactacgggatagctgattcagagtttcagactaagctatctatgtgttcgaccaaatgtctctatggttgtcaagcagatgcagcagcggcggaggagggaggatcgggccggggcgacgtcggggtgggaggagagagcgccgcccgacccgagacggtggaggacgccggcggtgaggacatcatggcgggatggatgcaccgccgccgccatcgccaagggttccaggtcagcttttccagtctcctccttcccctcttcttcctcggtcctctgattctttccgccatgagttcttgttgttctaccagcagcaagtgttatgtgcaaaacacagggcgaggagcaaacaagatgcagatccagcgccatcgatggctgtgtcggaagaattaattaatcctggtttggataaatcttcccaagcaaaccgaattaatcttggttaaattgaggagtttagcgctagacaatcttaataccattggatggtctctcctaggacagccattccggataaaaaggagtttagcaggcagtaggctaaagaatttgatgcaaactctccaaaatgtgatcctggtttggaagggacaatatttgatcatttcaatcttcttgaatgtataaggttaagtattagtaacatttaggagggagcatcaactaaaacagagcctgaaaaattattgctggcccataacattcatttcattattggtatgtattccggccttatttatgcttcatcttatctgttagtgtgatccgagaaaattagagtgtggccacgcctgagtttgctctgtgtatatacacttcttcgacacaatgcaggttttgatatagcatttgatgaagctataccaacatcaatttggttcctcagctctttccctggtgtaccattgtagatctaattaaagagcacagttcatagctgacacagagacctgattacttatagcacaacatttaaaatctctctcctaatggatgttaaattgttataattttttccctgtgcatgagactcttttttatcattacagctaaagttcatttctgatatgtttttgtttcagatataagatgcatggcaagaagagcaaagttgacaatttacctcaaacctaaggaaatccacgataaatgtaggtcaggagaaaattgcaattgcaacacactctgcatgtgtggttgcttccatactgagattttttttcaatgagataagacctctttgtatttctatgacaggtggaacaattaatacgtgtaagatagatactaaacttcaggggggggaggactgcatatatcaaggtctgttctacaatctacataacatccaaagttctctccccaaaaatgacagaagtgcaaaatcttcattgcgtccgttttgcaatattttgaagaagtctgatggaacagtgggaatgccaatattgagatccagaagggttccaccatcagaggtatgctttgatcattgaattgaattatattgtaaaaaaccaatgttagaaactgaaaaggctccatgacatactaatatttattttgattggctgataggactaaatggccaagacaatatttttgaatttcaaaacttttacatccttgatcctagatgtatcgaatacaccatgcgaaggtagatggtcaagttgtgcccaactgcctatgtccctcactggtaacctctgtgcactttcaggaattttactgtacaatacagaaaatccaagtgaacatcttttgcttaacttatggcatacatggtatctctaagagcagctaatttatccattgcagtttatcattgactggagttatgccttatgtaccagtgcttttttactgcctagggagtattacagagagcagtgcgcatcactgtatttgtgactggtacaggatcaacatgattttgtctcgttcttcttttcaatgttttttttttctggagtgtttcttgttggaaaaagagatgaaccgagtgcctagttctctcgcagtactttgtggcagctgagaacagtacgattgctgattatttaagtggatgctgacagcagttgatctcttggtttgcactaatctgaatgtttttgtttggacgtttttgggcagatgatggtcattggtgatgaaggagatccgtagcaagatgatgaccatatgaatttggtgagacagttttagctttatcatcttagcatcagtcaagtctagagagttgaggtggtgattgatgtctgaccatcaagcaggtggtgcttttcgcaatttcacctgacctttttttttttgttcaattgctgagggaaatcatatgtgatgcctcaagtctctctccaccaatgccagatttcaatccagaacttgaacatgaatagcaaaattgtaaatgaatttgctaggaatttaccatttcaagaaatcttggaatattaacaggcacaaattgcggagtagccaacctccatatctttcgttagaataaggccatcaccaatcaaggataccatatgagtgtcttcactaactgaagatactgtgcgggaaacacctctggagaataccctggtgacccaatgagtgttcctaacccaaaaagcctacgtagttattttactgtactacccctctcttctcccccacttcctctctcttccccacatttactcatctaccggacccgttcacatcgtggtcctcgccgccgccgctcgcctttccctctcgccgcggggccactcgccgtcgccggtggccgcgagggctgcctccctccctctctctcctcgccgtcatcgtcgccgctgtggccgaagcgtcatcgccgtccgccacctccgcctccctccctcactctcctcgccgtcgtcatcgccgccgcggccgacacgtcgtcaccgtccgccgcctctgcctccctccctcactctcctcgtcatcgtcgtcgccgccgtggccgaagcgtcgtcgtcgtccgcctcctccgcctcgccggtctcctccgcctcgcaccgtccgcctccctgatctcctccgcctctcgccatcacaggtcgggggcggcaaaatccggcgccgtagcgggtggatctagcccccccggctagatcggggaggagatggtggcggccgtcgcgctggtcgcggggtcggcgccgtcgccgtcgcggggtcggcgccgtcgcctccgactcctccccactgccgtgtgcctcccgcctactccaagcgacgaggccgagggtggaagggcaaagttgtggtgggggagccgtgtccacgagccacgcgctcgtgcaacacatagccccaagcggtggctcaagaaaaggagcttgagccacccgtcccccgcctgagggtcacgcctccctcccaggagacgacccggcgacggaagttggttaccgtttgcgaggctacgggctggagacacgcattggtgatgcccctaagaaacatacgagtaaacaactaacgatgattattttttgctttcaagtggtaacagcaacaacgaaatacaggttttttttaacagcttctttcagggtgttcgaccaggaatgacatttgcaagactgaagtcaccatcaggatcatatacacacacgtcagtttcacaatctcaaagatgcaaaagcatcaaacaggtcatgaaagaggactaagattacaaacacaattacagaaaggccctttgctgtgcctctatttgcacttgttgtactcagtcaacacgtgccacgtgagcttggaacgaaccaaagcgtgcagagaaggggcgccacacgagcttcatcgcatacttgctgctccctttcccttaggaaggtcaggaaagaagggttttcacttttagaaataaacagaaaacagtttagaccaacaaattccctgtttccatttacataattctcaaaaaaatatatatataagtcttgtaacttgtatgaaagtgtttgcaacgaaacacttgtatattgttttcatgaacccccccccccccctaaaaaataactatggccaaataggttgaccacatacacttatctttagaaaaaaagaactttgtttgctcgaggacgtacaaattatacttcctccgtttcacaatgtaagtcattctagcattttccacattcgtaatgatgttaatgaatctagacatatgtatctatctagattcattaacatcaacacgaatgtgggaaatgatagaatgacttacattgtaaaacgaagggattaccagttaacgatttcactgatgatttcaaattaagaacagcgacatatgaaagagacgaggttatcccctaggttggccaagtaatgtgtccaaccgactacgaaaatgacctgaagcctcgaaaatcaatagatttcgtgtcgtcatggtgattggactgtcagctgtagattgcagccaatcgaccgcgcatttcctggaaaatcttgctcggtagagccagtagaggctacctaggacttttgtaaaattgaagttctaatttctggagctaaaagaattttaattccaaagatcgatttcttgtccttttttatgttcgatttgttgtcgttgttgcctgaactggtcagcttgcaaccaaccatatatcctttctgaagtgaagtgcatctctttaattaattcgtcgtgtactcgtgtgggcagtgggccagccagccgcccgccactctcacctgtacttcataccaaaataaaacaatcaatctagtactactagtttaagatatggagtacaatctaatatttcatccgtcccaaaatagatgagacacttcctagtataacaaatctaaatagtctctttgatcagattcactatactagaagtatctattaacgaccaaatttggtaaatcatatattggatttggagccaaagccgaagcggatttggaaggagttcgttatttttggggaacaaagtgtgcatcggctatggattgcatcggctagtgtctgcatcagtgaatcggataagaggaagccaatgtagccgatttcggcaagataattatagaatcattgtcaaaatcgactgaagtactgtacaactattgctaaatacggattgagtccgaagaaggcaattgtatctattaattaggatattctagtagtttctttatagatattttcggtaagagttcgcctaagggacttgttcgtgttttaaagttgtaatagaagtagagtcgtgtccgacaaggacatattatatattatgggtataaatatgaccccataccttgtaaataattaacatcagttcaataacacttcaataatactttcagcgcatcaccacccttttctattttcattgtttcgacgagttcttgctttcgagttgggctgcatcggttgcaatctccgacgaaaaggtaaaacttgttatggcggcttgcgttctcaggattagtgcttacatccttatgacactctaatcttgtttatgtaaatcgccaagttatcatatatgctatataatctagatcgataattttatatagttctatcggctagtctctattatcgaaaccagccaataagattaggtaactttgttgagttagattatatagtatatctaccatctcgaaaaagttctcatgggcttgtttatcagatattatgtttctctttatgcttaatgttgcatcggttaagtttgaactattaagtaatatctagaatcataatctctagcttgcttcatgattaccgatagagatagcattggagtttcagccgatcttacctggtttagctatcttgttcttgatttatctactcgatatgttaaatctgccctttatatcaagatctcattaagaaaaaatatattaagctcgatatcaatctgcttagattaaactaataatagattgattcttgttcaatatatttaatctataatgatatcttagtataaaaaagtatcagagcaatagccgatacacactagatttgcctatcggctatgatatgagtttatataatcttttgctttcaaatacttttagacttgagtgatttatactgctttggcagccatccgatctatccaatcacttggtttaaacatatttagaagaatagattatattgtgttgatatttacagccgataaagtgaatttagtccccttttcactatatacgttactgtcgatccaaattatattgcattggctcgatttagacaatatgtcattggcaatttagctgatcggctatcgtttatggatttaactttgaattctttgtttcttgttggttgcaggatcaaaccaactggcacgctctaaacccgaaagcaaatctttagacctgcactagagtaaaacaaatctctcaggccagtgtgtgtttttttgcatcaacaatgtctcatccatccaaaatctcttatattttgggacaaaggagtagtataagatgtgacgtattcacgtctattcagatttgtactagtagaatgtcacatttcgtattaggtttgtttactcatattttgtattccgtattaggtttgtttttttaattttagtagtcacattttgtattaactttgtttattttactatactagaaaaatgcccgtgcgttgcaacgggtgaggccgtgagggtgactttaatcttattattgttatacgggtaaattaaggtgaaattcactgtgagaatttgcttggatatatatattttttataaaatcataagctgcaattaggagtccgatcatcccaagttagcatgcgagttttttaaagagatttcttatacgactccttctgtatttccaaaagttaacgaacttaaaaactgactcaaatacggatatgtatttccaaaagcgaacgaagttaaaaaccgactcatacacggatgacgtaccaaagttccagcaaaagcattttcaatttttataatagtagactagaaaaaatgcacacaacgggtaaaagcgttttttctggtataatagctattaggagctaagcaataaattgaaacattaagatcgctaaatacattataatgaaaatctttcatttgttttgggctgaaagcctatagcttattccttcctttttagcccctccgtacctccctcctcagcttgcctctctttagcccaacccataagtgaagctgcaagcccaactagcacaacgtcttcaacctccggaagacgagatgtttacctatttgccactcttacaagttgcaattaaggatatgctactggacccacacgttatagatacatgagggctcacatggtagcaaattcttaattgccacattttaaaaggggttaattggatccatgccattataaaattgtaggtttggaaaaataccattgctatttatgaaattagaaacatgccattactattcaacatgtctttgagacgtaccactgcttgtcccttcaccgtgatttctaaacttttctgatcaaattacccccgtcttgttcctccttttcttcctcccacctatttctctctctcctctcacccctcctctctcttctgaccaaaaattagaaagcagcttcggcagcacagaggagaggagaggagcgtgatggagaagaagacgagagaaaggggaacaagaggatggaggaagaagataagggcaatttggtaaacaaaaattagaaatttcagcaaagtggtaagcaatggtatatttcaaagatctgttaaattgtaactagcatggtgcccgcgcagattacgcggctagcatcattatattttctctcatataatagcatatatgttttctcattatattattcaaatatattaaaatgacaacataattttaaattttgcaataactttacaaaactactaatgtgtaatattcatattatattttatatacgtgttagttattaattatttttaatatcaaattttagttatttgtaaattatatatattcctatatggactctagactcgtcttttaatatttcttttttttaattccgaattttctgtaaattgtatttctatatagactctatgctcttcttccaatattatttatttttatttctgaatttttattatttctaattatatttctatgtggactctaaactcatctttcaatattctttaatttttaatttcgaatttcaggtacttctaaattgtattcctatattgactttaaactcttcttcccatgtttttcttaattttgaattttagttatttgtaaattgtatttttatacggactctaaactctacttttaattttattatgtttattccaaattttagttagttttaaattcctatatggactatatactctacttctaatatttcttattttttatttctgaattttttttcttaattgtatttctatatagactctatactctacttctaatattccttatttttaattccgaattttagttatttcctaattgtatttctatatggactctctactctacttctaatattccttatttttaattgttatttcctaattgtatttctatatggactctagtctgctcttctaatattccttattttttaatttcgaatttcaactatttctaaaattctatctagactctagtctcctcttctaatattccttattttttaattccgaatttcagctatttctaaattgtatttctacatgcattctgctttttatttttctctgattaatgtgagaatttcttcaggtatttctaaattgtatttctatatggactctgctttttctttttcttcgattaatgtgagaatttctaggccatgagagcgaacgtggaggctcctttttctattcctttaataatataactagctgggtggcccgcgcaattgcgcggctaacacctatacaaaattatatattttatatgataaggtttgaaagaccaaaccctatcattcccgtgtttctaattttttaattttacaccagttgctacccgttacttctgtcatatccttctttatttgcttgcttgatctatcactgtttctattcattctctttggaaccttttaaaattggatcttatagtttttagagtttatcgtctcgttgggttttgtttttataatttatagaattcccgtcaaacgctaccattatactcctctacggcccgtccactgcctgttatctttattgtcattggtattttaaaaaacaaacataattgtcgtttaggtttaatttttttagtttctagaagttccgtcaaaacgtcagcgactttgtcactgtactccaatacggctcgcccgctgccttccttctttattctcatcgagattttaaaattaaacatgatcatcattggggtttattttttttacttttccgaagcccgaaccttttaaaattggaccttatagtttttataatttattgtctcgttggatttcattttttataatttttagaaatcccatcaaacattgccactatactcctctacgacccgtccgccgtctattctttattgtcattaggattctaaaaatcgaacataatcgtaggaattcttttttttttactttctacggtagctttaccaatgtactcccgtacaacccgcccgctatctcttctttcattggggcttattttttttactttctagaagtcctgcaaaccgccttgaccgggtgcttcactacctgcccgccatcattctatttggtgttttattaatagtttttagatgtcctttataggcctattacttaataaccaaccctactcatttatagctctattacttaattaatcacgtcatgtgtttttgatggtcttttcttccaatagtctttattttcttatcaccaattttagttatttataaattgtattcctagttgaaatcttattttccttttctaatttcagattttattttattttttatttcgaattttaactaataatgtattgtgttcttttaatattttattttttattttcaattttagtcgttttaaaattgtattcctacttaaactatctttttcatttgtccaatttcggattttattttatttttcattccgaatcttaattaatctcgtattgagttcttatatatactcttatttcaatattgcttatatttaattccgaatttcagctaattttaaatagtattcctagttgaactcttcttttcttttattttttaatttcgattttttattttttttattttgaactttaattaatctcgtattgggtttttatatgtactctacttccaatttgcttaattttaattccgaatttcagttatttttaaaatgtattcctactcgaagtcctcttttttcttcttctaatttcgaaatttattttatttttattccgaattttaattaatcacatattgggttcctatatggactcctctttcaatattgcatatttttaattccgaatttcagctattttttattgtttttctatttggactcttcttttcttttttccgattaatgtggaaatttttagcctccacagcgaacgtggtgccatttttttataatttttagaaatcccatcaaacgttaccactatactcctctacgacccgtccgccgtctattctttattgtcattgggattctaaaaatcgaacataactatcgttggaattctttttttttactttctatggtagctttgccaatgtactcccatacaacccgcccgctgcctcttctttttattgtcattgagattttaaaaatcaaatatgattatcattggggcttttttttttttttactttctagaagtcccgcaaaccgccttgaccggttgcttcactacctgcccgccatcattatatttggtgttttattaatagtttttagatggcccattaaccgccaccaccctactcctttataggtctattacttaattaatcacgtcatgtgttttagatggtcttttcttccaatagtctttatttttttatcaccaattttagttatttataaattgtattcctagttgaaatcttatttttccttttctaatttcagattttattttattttttatttcgaattttaactaataatgtattgtgttcttttaatattttatttttaatttttaattttagtcgttttaaaattgtattcctacttgaactctctttttaatttgttcaatttcggattttattttatttt

SEQ ID NO: 25889 - DNA, 7661 bp, Oryza sativa
gcgcataaccatgggacgggacagaggagaaaggggaaagagccaaaagagagggggaaggagaagctgaccaccaatggccgcgctgcgtcggcggcggcgcctccatccatcctcaccgccggcaatccccatcgccccgatcctccctccctccgcgctccgctctgtgtctgccgatcctgatctgctccatcctccctccacaaacattgacataactactagtactaggctgcatcagccacatggtaatactaataaacaaggcatatgtggtgattgaatatcaatgggcgactcaataagaaatgtttggattggcacgtattgcaaacacaaagagattcttttttgcttttttttgcaggacattcaacacgactacggagaacacaaatcaactaactctcctaaataaatcaactatactgtagtaccgaatacttctcctctagtactcctcgctcgtccagctcagcggcttggcacttgaagaagtctggaaccgaatgtccctggctggttggtggggccatcaagttctcctattttttttttaaagaaaagccacttggccgccggattggcagcccggcgcgcgtgacgcattgagactttaagccactgacatttaggccccacatgttagtggcccaatttcccggtggtggaggaggagtacagcacagcttatataaccacccccaattcttcttcacgaaatcacaattcacaaagcctcgcatctgcatttcgcaagcagcctcacgcgccagcagcttcaccgtccgcaccctccagtagcctagccctccgcagcgccaagctactcgtcccacaccatgggcgtccaccctttcgccaaggcagccaacggcttcgtcatgcaagccgatgccccggacgccaagctcgccgacgtccaagccgtcgcggacgcaatacacggtaacaccaagctcgccaacatccaggccgtcgcggacgtcatccacgggaacgccaagctcgccgacgtccaggccgtcccggacgccatccacgggaacaccaaggtctttgacatccaggccgtcgcggacgccaagcccgacgtccaggccgtcccgggcgccatccacgggaacaccaaggtcgccgacaactcggtcgtcgcggatgccatccaggggaacaccaagctcaccgacgtccatcccttcatggaaggcgactgctccatcaaactcgccgacgctcaagtgcgcaacaaggccgtcgatggcttcgacgccacgaacatgagccctttggtcgcgcggtgtctcgcgcaccaccttgccaaggtgtccgtgcagagggtgtggcaggggaactacccggagatgttcaagccagtgctggacgcgttcggtcagcctcatcgccgcatctacatcgccttcgacttcgagttcgccgcggacgccttcaccaacatgcactgctggccaggatgtaccaaaaccaactacgaatacttgcgccggtacgtgaacgagttaatgtcgtttagtttggcctcgcatctctaattatccattcaagaatgatgtcgaagaagctgcaattaaccttccttcacaaagatattaatttcgacttacaacaaaaaaaaaaaaaaaaaaaaaacttgtgcagctacgtgaatggaggcgatgtagttcagatgggtctcgcatttgtatttgaggatgaagtcgacgaagaaccgacattcacggcgatggcactggagatcaatttcgacttcaccgtagagctgcgtaagtacaatggcgaggccataagcttcctgtctgaacaaggccatgatctcacggagcacagggacagaggcgtcgtgccacactttgtttatacggggctcttgagccacctcccattcggcaacagctccgtcacctggattgcctaccatggagattacgactttggtttcttcctccgcctgctgcaagggggatgccgtggcagcagccatcttccacttgagctgcccacatttctgcaccaattgcggctcaacttccccagattgtacgacatccgtgttcttgggcagctggtgcagcatggcttccgcgggagcctcaccgcgatcgccgatctccttggggtcaaccgtttcggcagagggcaccacgccggcgtcgacgcactgcttacactgtcatgtttcttccagattgtcagctgtctttcagcctcaggagaccaccagctgcatcggctcgattctcgccagggtttactcgccggaatagcccaggtgaacaaggctatcaaagatgctcgccacattggcgaccgtaccagcaacatcgatgtcatcaaggtgcaagcaggaaacttggacgaagaggcacaacgaattcaagagctggtgccaagcaacttcaacatcatcggagtagaagtaatgcaccctcaattgggcaaccgctcatatgcaatcggcgcccaacaaaattatgaatcgatgaagacctatctgaaggatgccgactcattcgaaattgtcattgcattcgtgaactctgaaggaatgttggcatatgattgtgtgtggaaattctgcatcagctccacaccacgtagtggctgtctgcatccccgacagtttacccggcttatggcgtcttgtggagcaacgagtaatcctaatgtatcctgggtgacattccacggagcacacgggatcgccagcctgatcagctcattctctgcacctcaagaccttccaagcgactggccttcctacgtcgagcaacggagagcatatttccctggtatgtatgatgtcgcattgattgtgcatagataccctgacattggcatacttcccacaacggggtgcaaaggaggcttgtttgatgttgcccgagctctggacctgaacttcatcaaggacgacaatccggtaaccagggttcttcttactctgagatgctacatgagattggcagatcgtggtgatttcccagacaagcagtcagctgtccaagggcagcttatggaaaactgctgctggaactgcccagcaaaacggatggagcatgcatgatcactcagggtggtaccggaatccttgtggtggctgtccatgttgtcagttcagtttagtggtagcttttgttctcgcacgaaattttcctgtttgagactcagacgagtgaacttcctatgttgtaacagtgtaatttttgttgccttttgttctcacacgactcctctttgttttaagactcacatttatagtttgtaatataaaaataagagtgttttccttttgtgaatcggcttgtatatatgcagatgaatgagtagagaagtaggatgtggatggcgggtgcgaacaaaatgcatcaattgtccactacagatgagcgaatgaccaattgcgaatgcagactgttagaggtgaatgttgtttggacttgatggtcctttcctgactacaaatgagaagtgatggtagctgctattagtatgtgttactagccaacaggttgtgatgattgcgtttggtcatgcagtctgaaataaaacgttactagttgttttcttttgcatcagactaaaacaaatccccccaaaattccaggcacctgatgcaaatgtctcagttcaagggggaaaaacaaaagacataaaccttgagagatgttgtatcgttttatcctcctcctaaaatgaaattagcagagctactgccctttctcctcaaagaaaatttgtacgccattagtattagtgacattgtcctatgtgaattagttttgaggttaatactaattgcaagaagtaagtgcagagcaggggaaacagagcacaagaaaagcagaggaggtcgatggggagagagaaacagatatctggtgtgtctgcgcgcgcgcgcccaagctgctgatagtgattgttggccgtggacgctttcaacgggtgagagtgcgacggagttgggcacgtttttgtttttcgggtggcaccacatccacaatcgtggattggaatcctctgccgttatgccgttagcacgtagtaacacggcaagagagctatgttatacgggaacagtgtatcattggatgcgtgatggatggtttagatgaactgctagacttatcttaaaataaatggtgccgtcttataaccacggtgaaaagttactcattccataaaagaaaattaggatgaaatgtgacacattatagtattataaatctgagtctattttgtattactaaaatactatattacatcatattctatgattgtttttaagagataaaaggaagtatatctatcactgttctactcacgtcaacagttaccctctaccttactactcactccgtttcaggttataaaacattttgacattggtcaaagtcaaactattctaagtttaatcaagtttgtagaaaaaaataataacattttcaacccaagacaaacttgttatgaaaatatattcgattattgatttgatgaaactaacttagtattataaatattactatatttgtttataaacttagtcaaacttaaaataatttgattttaaccaaagtcaaaacgtcttgtaacctgaaacggagcaacggagggagtagtagtctaagagcaggtacaatagcaggctattagccaactacaaacatattttaatgagataaaagatgagagagaagatcagcgggctacagatctgtagccagctgcagcacggactccaagacgcaatgtgtgtatgacaggtgggaccatatactaatagtatagtaagcaattattgtatgaattggctataaatgaattggagcttagtaatgggctgtactattaaacttgctctaagaggaaccaggttggtggtggcgtggcgtttaatcgcgcgatgaagaaaaaggagaggatttctaggggggccaccaagccaccaccctgtccgccagaatatcctactcactcagaaaaagggataatattctaggattacgcgaattcgcctactacgttttctagaagccaatccgatgttcattcgcttgacttgacttgacacttggaactgaaaaattggattgaacaccagattaagatatgcccggcttcattatttcactcatgtttatgcgtatctttataagttagaatttaaattttaaaacttaattaaagttaatttacaatatttgctttttatcgctaaggatacatatatataaattttatctaaaaaattaatttttatttgctaataaatggttaatgaagcattacgtaagcgaactaatatgaccggctttcacaaagcgccagtactgcacagtgcacaccagacagttcagtttagcatggccagactcatgtttgaataagtatttgtttggctgcaaggtgcaagctgaccaacgcagggatattaacttcctatcccatttgctaaattgtggcattctttggatgttctgcttgcgggatgcagtttgcatgatacttagggttctatagctgcatgtgtaacgtgttcctcctctaaggcacataattcctgatatgaggtagagaaaaagggttctcggttcataatttaaaacatgggtaaaaatatttaacaataaattgatttccgatgcttctcatttactccatccgttttaaaatatttgacaccattgactttttagcacatgtttgaccgttcgtcttattaaaaaaacttgtgaaatatgtaaaactatatgtgtacatgaaagtatatttaacaatgaatcaaatgatatgaaaagaataaataattacttaaattttttgaataagacgaatggtcaaacacgtcttaaaaagtcaacggtgtgaaatattttgaaacggagggagtatctcataaggctatctcttttcttctaccgtggagagatttggcgccaatgaaggagaggagtgccatggacgttttaaggggcttactgcttgccagtacccgaaggacctgatgctgcgtgattgagttagcaacaacccctttcagccctgcttgggaatagtagtagtcttgctttgctcctggcttgtctaagagctgtgccagcagctatgatgcttcctttggtgaactggagtccccagtctttatgttttcttttactctgtttgtaagaactattatggctttttaatgaaagctgggcattagcctcttttcccaaaaatgttggataaatacataagcaactagctttactgttattttgtattgagaaaaggataacaaattccaacttgtgtttttcgaagcacagaaatcacgccaaggccactcgcgaacaaaatcatggatgtactaaaaatgtaggaaatgggagcgaagggagtggtgtgagtaattacgagagaatagtactattgctttttctttttctccttgtaggcgggaagcgcttggccgccatgctatgctgctacctttcctccttaaatttttgtactgtttctactcttctataatataaaatcagcgtgcttggttcttttaaaaataaattaattaacagctgatccagatgccccaaatattcctgctaccttgtgcaaatatttcggtacgaaaatgagattggcaaacattaggataagtggcatcaccttgtgttaaaaaaggattaatcaccgcaccatgctggattaatttttaggttaatgctaggtgaataacattaagaaggggcagagcaggggaaagcagaggagagtgaaaaacagggtgggcgcggcgtgtattgtgttcggaatttggacgtgtgcaggcttgaaatgttttcgggtgggccccacctgtgtggggttgttggcggcgcagctgaccaaaatatcctcctactaggctgctgaccaatgcgccagattcgctttccagtaaaagctcactcggaacatcaatcctgcatttttttaagaaaaaaaagaagtgtactttaaatcttgaactttttaatcatttattttttttggctaaagttacacaagatttgtgattgtgtgtgagagagaggtcaatagtcacgactgtctgattgaggaatactagtgctgatttctctctttggaacggcgaggaagaagcaggtcacttggaattaaaggttcgtttttgggccacttggcttcaccagattaggagatgctttttggaaagcgcctgaactgcacaacagttcagtttagcacgtacggtcagatcacatgtgattattagtccctccgttccaagatgactgagaatcagtcattttcctcgttgtgtggacagatttagggctgtcaacgagccgagctcgagcgagctcgcctgtccaagctcgagccgagcctgttgcaccttcgggcttttaggcaagctcggttcgagctcgagctcggtgccgagctcagccataagtagtataatatatattttaataataatctcttgataagtataattattttctagttaatcacactaataaaatagtagaaaatgattaaaataaatatattgtgctaacacatgctaatttattgtgtaaatagatactaatatatatatttatctattagtttattatattaataaggtgaacatgcaatat

SEQ ID NO: 25890 - DNA, 12651 bp, Oryza sativa
  unsure (1)..(12651): unsure at all n locations
catgtcagtatctcctgtaagcaacatcttccggcttcaagattcagaaaggttatctctgtattcctttaggttaaagaattcagaaatgtagtaggtcgcccacgcgtgggcgactcggggggaaacctagcaccgccgctgccactctctcctcctctccctcccctcgcagctaccggagaaccgagcggccagctgggacggcggcggcaaggccaaacgtcgacggcgctatgtgcatggaaggcgggccggcgcgcggagcagaggttgaagacacggcgtggaggcggcagattcagcgccgccgcggctggatccggcctccccatgggtggatctggatctggccggagcaagccgctctcgggcagcgacgacgggaggcgaaggcggcggcgtctggtggctggcggcagctggtgaaggaggctagcgcgtgcgaagctgcgaccggcggcggtggagactggcacgcgcggaggacgcaatggccgccggcggcggaggcagtagaggcgtggctggcgacggcaaaaaccggcgtgtgcaaaggcgcggccggtggcagcggaggccggcgctcgtggaggccacggtggcagccgcagctgaagctggcgcgcgtggccggcaacaggagatgactaaacggcgcgatggagcggctgagggcggtgtaaagcctgtcggcggtggcgacgctcccggtggttggcagtggacggtgaggaggacggaggctgccgcagtgagagaatggaggcgacgacgatgcgaccaggcacccgttggaacacgagcgccctggtcgaggcggcgacgacggtcatgttgtgaggggggtgttgaagcctacggccttttgcggggaagaggggatccattcttttctcaccctctccctctccaacccaatcacgtgggtagcggaagctggtgcgcgtggccggcgacaggagacgactgaacggcgcgatggagcggctgagggcggtgtaaagcccgtcggcggtggcgacgctcccggtggtcggcagtggacggtgaggaggacggaggctgtcgcagtgagagaacggaggcgacgacgatgcgactaggcacccgttggaacacgcgcgccccggtcgaggcggcgacgacggtcatgttgtgaggggggtgttgaagcctacggccttttgtgggggaagaggggatccattcttctctcaccctctccctctccaacccaatcacgtgggtggacttgaagcacgacaagggttgagactcttctttgatggccggccggcggcgaggcgtcgacgtggtggttgcgcatcgaaggggattagatggtggttttgctgaactggcatgcactctttagcgcgggagagtagaacaatgggtgagccggcaatggcaacgcctgcgggcgtcgttttccccttggggcattgttgtgttttctatcgtttcccaatgggttcttcaggtgaaaacaacgtcctggttctcaaggacaggcggcggtggcgcttttggcgtcgttttcctccttggggcattgctgtgttttctatcgtttcccaatgggttcttcaggtgaaaacaacgtcctggttctctaggacaggcggcggtggcgcttttggcgtcgttttcctccttggggcattgctgtgttttctatcgtttcccaatgggtccttcaggtgaaaaccacgtcctggttctctaggacaggcggcagtggcgcttttggcatcgttttcctccttggaagcgtcgtttagaagacatattccttgggggtgttgtgtgcatattttgttttgttttagcagtatgatcaaacgtagacgcgtggtgtggtgaacgcacgaactttattagcttcaaaatgtttttatttcctgatacaatgcacaggctattctattcatcaattttcgttgtttgtattactatcatacgaaatctataaacaacatgtgatgtaattattattagtgccatattaaagttttcatcataaaagaattacacttaataattatttattaccttactgtgtggttttaaatcggtgtataacttttacctggtactcgtgacacatcctaaaactgtgaatttggaagagagcatgtccaaatttctacaactcccaactacctaatcacccataagcaaatatcatttaataggatattctagtattttaatcttacccagtagagaataatcccttatattatagaatgaagggaatatccgggaagttgggaagtatccagtgcaatagtacttctcggtgggagaatgcgatatcctattgctagcctttagatttgaaatggacgcggtagattggagcacttcctattctcttagttgacaaatgcaaaaaaaaggaccctataatatgtgccaaaatgttacgagcccttccgttctcttctactctaatctatctatggctatatttagttccacaccaaaattggaagtttgaagaaattagaacaatgtgacgaaaaagttaaaagtttgtgtggctaagaaaattcgatacgaagaaaaagttaaaagtttgaagaaaaaaaaaagttatgaatctaatcgggcatagcctatgcctgaggctctatctcccttgtggccttatctgaatcatttttcattgttcacctcttgttcggatacttgtcccctatcttttcccccttccctggcgtaaaagaaaaaaaatatctcccgtctccactccactccttgcgccatctcgcggctgaacaggggagtggaggggagggccgcctatctccatctggcgagcagagcaagagcaagggaggggatcctggtgtggtgagcatccacatcctcttcctgattcatctctctctctcccaccgggactacttttgcctggaatttgctttgctttcgttaagctcctctcttaatttccgatacttaaccttaatacaagtagtaacagtttgtttgttcgtctcaagttggattctcgctgatgtttcttgaaattctctcagtttcttggtgcttcttgggaatttttcaggtgttgttgttgtcgttgttgctcgccggatgttggaggtctgctgctgctccggcgtcctcggcgggtcgccgccgtcgtcgaggactgcgggggtttcctcacctggactatcgccgtctcggcccagtaagcggcgaatcggccgcgcccgggtgcagccgcgcgcgccgccgccgtgcgacgagcggagggcggcggaggacgtcatccacgcgctcaggtcggcggatggccccgccgaggcgcttgagcggttcaggtcggcggcgcggaagcccagggtggcccacacgaccgcgtcgtgcaactacatgctcgagctcatgcgcggccatggccgggtcggggacatggccgaggtgttcgacgtaatgcagaggcagatcgtcaaggcgaacgtgggcacgttcgcggcgatcttcggagggcttggtgtggaggggggactccggagcgcgccggtggcgctgccggtcatgaaggaggccgggattgtcttgaacgcgtacacgtataatggcctggtttatttccttgtgaagtccgggtttgatagggaggcgttggaggtttatagggtgatgatggtggatggtgttgtgcctagtgtgagaacctactctgtgctgatggtggcgttcgggaagaggagggatgtcgagacggttctttggttgttgcgtgaaatggaggctcatggcgtgaagccgaatgtgtatagctacaccatctgtattcgagttcttggacaagccaaaagattcgatgaagcttatcggatacttgcgaaaatggagaatgaagggtgtaagccggatgtcattacccataccgtgcttatacaggttctttgcgatgctggccgtatcagtgatgccaaggatgttttttggaagatgaagaagagtgatcaaaaacctgatcgagtgacctacattactctgttagataagtttggtgacaatggtgactcgcaatcagtgatggaaatctggaatgcaatgaaagctgatgggtacaatgacaatgttgttgcttatacagcagttattgatgcattgtgccaagttgggagggtctttgaagctttggaaatgtttgatgagatgaaacaaaagggtatagtgcctgagcagtattcatacaactcgctgatatcggggtttcttaaagctgatagatttggtgatgccttagagctgtttaaacatatggatattcatggacctaaaccaaatggttacacacatgttcttttcataaattactatggaaaatctggtgaatctataaaggcaatacagagatatgaactaatgaagagcaaagggattgtgccagatgttgttgctggtaatgctgttttgtttggtcttgccaaatctggtagacttggcatggcaaaaagggtatttcatgaattaaaagctatgggggtttctccggatactatcacctacactatgatgatcaagtgttgcagcaaggcatcaaaatttgatgaagctgtgaagattttctatgatatgattgaaaataattgtgttcctgatgttcttgccgtgaattctttgattgatacactctacaaggcaggcaggggtgatgaagcctggcggatcttttatcaactaaaagaaatgaatctagagccaacagatgggacttacaatacacttttggcaggattgggaagggaaggtaaagtcaaggaggtaatgcatctgcttgaagaaatgtaccacagtaattatcctcctaatttgataacatacaatacgattcttgactgtctctgcaagaacggggcagttaatgatgcacttgatatgctatacagtatgactacgaaaggatgcatacctgatctttcgtcttacaacactgttatatatggccttgttaaagaagaaagatataatgaggcattcagtattttttgtcagatgaagaaggttcttattccagattatgcaacactgtgtactatcctcccaagttttgtgaaaattggactgatgaaggaagctctgcatattatcaaggactacttcctccaacctggctccaaaacagataggtcttcatgccattcactaatggaagggatactgaagaaggctggcatcgaaaagtcaattgagtttgctgaaatcatagcatcaagtggtattaccttggatgatttctttttgtgcccattaattaagcatctctgtaagcagaagaaagctcttgaagcacatgaacttgtcaaaaagttcaagagctttggagtttcactaaaaactggattatataattctttgatttgtgggcttgttgatgaaaacctaatagatattgctgaaggcttgtttgctgaaatgaaggaactcggttgtggtccagatgagtttacttacaacttacttcttgatgccatgggaaagtcaatgcggatagaggaaatgctaaaagttcaagaagagatgcatcgcaagggatatgaatcaacttatgttacttataacacaatcatttcaggtcttgtaaagtcaagaaggttggagcaggctattgatttgtactacaacctgatgagccaaggtttctcacccacaccatgcacatatggccctcttcttgatggtctgttaaaagctggaaggatagaagatgcagaaaatcttttcaatgagatgctggagtatggatgcaaggccaattgcactatctacaatatactactgaatggacatcgaatagctggtaatacagagaaggtctgtcatttgtttcaggatatggttgaccagggaataaacccagatataaaatcctacacgattattattgacacactctgcaaggcaggacagttaaatgatggtctaacatattttaggcaattattagaaatgggtcttgaacctgatctaattacttacaatttgctcattgatggtcttggaaaatcaaaaagattagaggaagcagtgtctctattcaatgagatgcagaagaagggaattgtcccgaacttgtacacttataattcactaattctccacttaggaaaagcagggaaggctgctgaagctgggaaaatgtatgaagagctactgacgaaaggctggaagcctaacgttttcacatataacgctcttattagggggtacagtgtttccggcagtactgatagtgcctatgctgcctatggtcggatgattgttggcgggtgcctacccaattcaagcacgtacatgcagctcccaaatcagctgtgactaactagttagtgactgaatgtacttcttctgtatagttttgtctataaaaggaaaaggatcaactgtagatagtccacttcaatatatctgagggttctgctggttcttgttctacactatatttttgtacttgatggaagaaaattattcaatacacagctgacttgatcacttgaatcatctgttcaatttaactgacattgtgaggttacagttgttaaactcttatcaagtccatccattatatgtggttcaagtacaactgatctgtgtgcacattacccattttctttctactggtatgtctcttcagccaaatgcttgtgacatagttcagttttactgcctgtataggtttactgatgtgtgcgcatctttaggaagttgagctagtggttcagtttcacagtgttacgctgcttagcaacaatcaactttttccctgattcacctttttctcatatgatatagcactgccaatggactgcttgagaaggttctctattgttgcaatacatggaaatgcagttagatgcttcctttccaaaagtttctttgttcacatgatagtgaattggtagcattttgcatactttgggtcaaaagatgtgctcatttcttgtagaccataattacaacactggaatggccaatttccttcatgaaaattttcaatgagcagccaatgcaaattcaaatttactatttcctttagtttggttgtgtctaatctgtaagtttatggtgatttttactagaaaaggtatcgctaagtttctgaaattattttcatttctcttcagtctagaactctagattaatttgttgatcttgcttatatgccaatttgtttgactatattttcctgttgtatctatgatatgctctctctttgttttggggtttatcatggtatatttctatattttatggtgttgagctgttgatcatgagaaagtaaacttgcatgttaaactgaagtaattgacagtttgacattcgtaataccttgatataccctgatcaaatgtatttttgttccaaactcaagctactactagggaacattcatcttgatctatttattcaaagctttcttgtggtgctcagttttgttttctggttttagattgtaattttgtctggtaacaagctcttcttttgatatttttccccttgaaattcaaagaaaggtgtattttgcttgcctacctaaagagaagtttgcagttctagttgaacagttgtgcatctgtgaagtttgttatggatgtcccctttaggatgcgtttggagtttggtattgaactgaagaagctattaattttagtgacctaacttcttgagtgtttttcattcgtttggtgtggtatatccatatgcagaagttgtggatgatgcgtattgcttctttttaaccagcactcttctcttgtcatgatgaaggacaccacagattcaataaagccatacatattctgttctccaggtatgttgtagcatctccttccttcaatatgctaaaacaatttgagcttgtagatccatggaccgagaaaaaaaacagatgcaaaagaatgaagcatagtttactcctctgcatgctattgccaattgtgcctacaaaatgatgttgtatacttcgattcaaggaaaatttactcctctcatggttgcttcttgcttgttttctcatgactcatgcattgggcgtcaatgatgccctgctttgtttgcagttggagatcacctagacacctgccactaaacagtttggtctgcttgttgctgtgatgcggttatgcccttttttcctgaggtatttttagaagaaaatttctacatgtttcatattgcattatcagggactcttcaaactgttcgtccccggaagctgtcggcacagtgaggaagcagatcaccagccatcgtagctatcacaatgccaaagagccaacaacaaaggtcagggtcttgatctcttgtatgcccagtaacaggttaatcctcctggctctctgtactgaaacaatttctctggatctctttcccttttgttttggaccttatacaacctgctgatggttaataatgatgttcttgaataatagatcatgttaagctgtttgcatggtctgctgctgtcaaatagttttatgcggtcacaactcttactaactgatcaggttgacttcaagcattgggctaaaaactaagattatgtaacttaaataacatatatgccatcatcttcaatttaagtgatattgtgtcaatcttctgatcaactgtttacatcttcgggttatgtagattcatgtcatcttcttttactctgaaatgctatatgagattggcagaatgtcctgatttcccaggcatggcgatggctgtccaagggctgcttaaggagagctgctgctggaaatgcccagcaaattgctgatggatggaggatgcataatcactcagtgtggtgaccatctgatttagcatggcgtatttcgcaaaaggtttgaaattcaaaacagtgtctcatcggatacgccatagtgattttcagtttctcttattggcgtacctctgcttgtggaaccctcctggatctgaatattgcattcccactgttccatctggcttctccttcaggccggcaaagcattgcaaaacagacctaacaaagattacttccccctatttgtcgtaagaaactttggatgttatgtagaacagaccttggtatatgcagttcttgaccataagttcactatctgtcttctgcttgtaataattgatccacctagaattacaaagtggtcttattatttcatctctgaaatcctcactacgaaagaaactggagaagactattgcaactgtcatcacagcgacctcagttttgcttcgacagcttcttgtcgcagtcctaacacttgtatatatgtacataccctaatcttaatcttgctccgttttaaatcttgtgctatcagtaatcaagtccagtttgagctatgaactgatctgtaattagatattacaatcaatacacgaggagaagaactgggcaaacaacgtgatgctggtataacttcatcaaatgttatattagaactcatatcacgtcacataagtgtacacagaaaactcaagtcacattctgatttttttttttctcggatcatgctagcagatgagatgaggaataaataagattggaaatatgttatgtaccagcgagaattcttcacattctgttttagtttgctccctcccaactgttagtttttcacttacagattcaagaaaattcaagctgaacgcttagattttagtatgatacatttcttttataaagggtaggaccccctgtcgttattgaaaccaaatgttggggatgcagaaatttcagggctagggatgccagctaaaattaaaggatacaaaagacctgcacatcagagttttgcagaccaaagaatctaacaacaacaggacctcacaggagaaacaataaggacaacacacacacacgaagacccagtctcctgaaaacactacatggtcaaatgtatatcaaatattgtgcaatctcaaacaggattaacttcttgtattaacttgtataaatggggagtgattctccctcccacaaaactctaaataaatttgttttcctgctctatcaatacacaaggcatagttcttgctttcttagaaaacattctcagtcaggatcgctttggagaatttgcatgaaaatgtttggcgtatcagtcgctatcgctactaaattcctcaagttttgctctatcctccatctgcaatagcacactcttaagactgaaaaaaggcatttcaataccgcactcgaagactgaaaaaagaagataaccttaaaaaaaagagagatcaactcagtttgcttaggattttttttgttcaattaattaccgttttattgcgagtttggcgagtaagtccactgtaaaattttacagaagaacttcacatcagtgaataactggggccacggcccacacccacccttcaacagttaagaaaggaagtcctctttctatgtatgtttcaattttgaagatgtatcacaaccaagcatgtctaaaagagatccagcgtcatattcaaagaacacagagtggtttaatattgtagcagcatgaagatgaggtacagcaaacgccaatctcatatcgcggtttccattgaattggaacttgaaagttgaaaatatgacaaaaacatcattgtgggaagaaaaaagagaataaacagtaatcatctcgaaggaaaacataaattggttgacagttccaaacagaaattggtgatgcggatctacttagctgctggtagaacccttggcatcccgcgtcgccgctccatccatcaccgccgcccgccggcgtcatccccggtctcggcgccgcgcttcttcggcccatccatccgccgtcgctcctcatccccaatcttccctcttcatccttccatctgcttttcaaccattgacatatcgtcgaacccatagtctgaatcagccgtaataaacaattgacgcatacagttgacgaacaagtcaatcaagtgttttgtagcgcaaatttgccagaaattccactcaactcgatattaccaaaactgcttgtccatcggttgaacgcgttcgctccctgcgcgcgcttaaccaccactccatccgtcccgccccacacaacctggggccgcatagttttgaattaaaaagaacagctacatcgtttttggccggtgccagtaggagaggcagtgttcaatacgtcagaggatatcgttgcgttgagagtgacacgcgagacgacgggactcaccttgtactctcgcggtggtctctctcgacagcaccatggtctgcggcaacgtcagcaccgtcgtccccatgttgcagcacaccagcatggccagggagcagaagttggtgctcgacgccgacgccgacgacgacgggttgcaccacaccggcgcaggcgggaagcagcagaagttggtgctcgacgccgccgccgacgggttgcacctcaccggcgtgggcgggaagcagcacaacttggtgctcgacgccggcgcgggcgggaagcagcagaaattggtgctcgacgccgccgacgacgggttgcacctcgccggcgtgggcgggaagcagcacaacttggtgctcgacgctggcacgggcaggaagcagcagaagttggtgctcgacgccgacgacgacgggttgcacctcgccggcgtgggcggaaagcagcacaacttggtgctcgacgccgccgacgacgggttgcacctccccggcgtgggcgggaagcagcacaacttggtggtcgacgctggcgcgggcgggaagcagcagaaattggtgctcgacgacgccgacgatgggttgcacctcgccggcgtgggcgggaagcagcacaacttggtggtcgacgccggcgcgggcgggaagcagcagaagttggtgctcgacgccaccgacgacaggttgcacctcgccggcgtgggcgagaagcagcacaacttggtgcttgacgccgccaccgacggattgcacctcgccggcgtgggcgggaagcagcacaacttggtgctcgacgccggcacgggcaggaagcagcagaagttggcgctcgacgccgacgacgatgggttgcaccacaccggcgcaggcgggaagcagcagaagttggtgctcgacgccgccgacgacgggttgcacctcgccggcgtgggcgggaagcagcacaacttggtgctcgatgccgccgacgacgggttgcacctcaccggcgtgggcgggaagcagcacaacttggtgctcgacgccggcgcggacgggaagcagcagaaattggtgctcgacgccgccgacgacgggttgcacttcgccggcgtgggcgggaagcagcacaacttggtggtcgacgccggcgcgggcgggaagcagccgaagttggtgctcgacgccaccgacgacgggttgcacctcgccggcgtgggcgagaagcagcacaacttggtgcttgacgccgccaccgacggattgctcctcgccggcgcgggcgggaagcagcacaacttggtgctcgacgccggcccgggcaggaaagcagcaaaagttggtgctcgacgccgacgacgatgggttgcaccacaccggcgtaagcgggaagcagcagaagtttgtgctcgacgccgccgaccacnggttgcacctcggcggcgtgggcgggaagc

SEQ ID NO: 25891 - DNA, 2427 bp, Oryza sativa
aagcagccgaagttggtgctcgacgccaccgacgacgggttgcacctcgccggcgtgggcgagaagcagcacaacttggtgctggacgccgccaccgacggattgctcctcgccggcgcgggcgggaagcagcacacttggtgctcgacgccggcccgggcaggaagcagcagaagttggtgctcgacgccgacgacgatgggttgcaccacaccggcgtaggcgggaagcagcagaagtggtgctcgacgccgccgacgacgggttgcacctcgccggcgtgggcgggaagcagcacaacttggtggtcgacgccggcgcgggcgggaagcagcagaagttggtgctcgacgccgccgacgacgggttgcacctcgccggcgtgggcgggaagaagcacaacttggtgcttgacgccgcccccgacggattgcacctcgccggcgtgggcgggaagcagcacaacttggtgctcgacgccggcacgggcaggaagcagcagaagttggtgctcgaggacgacgggttgcaccacaccggcgcaggcaggaagcagcagaagttggtgctcgacgccgccaacgacgggttgcacctcgccggcgtgggcgggaagcagcacaacttggtgctcgacgccgccgacgacgggttgcacctcgccggtgtaggcgggaagcagcacaacttggtggtcgacgccggcgcgggcgcgaagcagcagaagttggtgctcgacgccgccgacgacgggttgcacctcgccggcgtgggcgggaagcagcacaacttggtgctcgacgccggcgcaggcgggaagcagcagaagttggtgctcgacgccgccgacgacgggttgcacctcgccggtgtgggctggaagcatcacaacttggtgctcgacgccggcgcgggcgggaagcacagaagttggtgctcgacaccgccgtcgacgtgtcgcagcacaccgtcgggggcgcggagcagaacttgctgctcgacagcactgatgacgggttgcaccacaccggcgcaggcggggagcagaacttggtgatcgatgacgacatcgacgggtcgaaccacaccgtcgggggcgcggagcaagacgatgggttgcacaccaccggcgctggctgggagcagaacttggtgctctgcaccgacgtcgacgggttgctccacaccggcgcgggcggggagcagaacatggtctgcgacaacgttggcaccatcgtctccgggttgcacgacactatcgcgcgttgggagaggaacttggtgttcgacgacgtcggtacagccgttccctggttgcgccacaccggcgttgatgggaagcagaacttggtgtaccacctcgccacggccaccgtgcagagcgtgtggcgggagaattgcatggagcagttcaagctcgtgctggaagcgcttcatcaacctcatcgccacctctatatcgccgtcgacatggagttcgcagcggacgccgccaccaacgtgagccataggccagtaacctccatcagctgctaccaacacatgcgcaggtacgtgaacggaggtggcatttttcagatgggcctcacatttgcattcgtcggtgaaggcgaacaagctccctcgccgctgatagcactggagatcaacttcgacttcaacgtcaattcgccaaagtaccatggcaagtcgatagatttcctatccagtcaaggccatgatctcacgcagcacagcaaaagaggcgtcgcgccggagtttgtttacgaggggctcctgcgccacctcccgttcggcgacggctccgtcacctgggtcgcctttcacggcgactatgacttggctttcctcctccgcttgctgcaagggggagaccatggcggcaattgcctcctgccgcctaagcttgccaccttcctgcaaaaagtgcgggagaagttcccagtcgtctacgacgtgcgcgtccttgggaagctggtgaaggatggcttcaatgggagcctcaccgcactagctgaataccttggaattccgcgtaacggcgacgaacaccacgccggctccgacgcgctgcttacattgtcctgtttcttcaagatcgtcagcctttcaggtcaccagatgcaccgcatggatgctcggcggggattgcttgctgggttggaggagtggaacatggctatcaaatgtgcacgccatattgacaaccatactggaagcatctacgttgtcaagatgctaccacataagttggatgaagaggcaagacgaattgaagagctggtggccagcaacttcaacatcgttggagtagaggtaatccatgctcaattgggtaagcgctcctacgcagttgaagcccaaaaaaattatgaactcatcaagacatttcttaaggattctgacttgtacgaaatcatcgtcaca

SEQ ID NO: 25892 - DNA, 27818 bp, Oryza sativa
  unsure (1)..(27818): unsure at all n locations
gttccgtgtggtcccggtagatttatgctgttcttgagcgttgaatcggtagggggatggatacacgggggcgctagggttcaagatgcttgtgtttgaggtatagagatctcgagtcagggtcggttgtttttgcgtctccttagacgagatcttgtgcgatccagttatggggaattctggtttgtgagattgtgagaacgcactgcaagaggtgattctgacttttatctcctttttgctagatgtgtatgtgttggtgtatgcttactactagtatcttggttttagtatttagtcatgagttgacatgatctccactccccaaatcccagatccagttagtcagttacgcgctggtgtaccttttgagttttgaggttgaattatactgattgaattagcttgtatagctgaatttggcaccaaaaagggtagtatcatagattttttttcgctgttaagtagtatcacaaagatttgaaaagctgaaactctctgttttttttaacacatagaatgagcaagagatttcttgtagtttacttgcactattccatcagatgctgtgtgaagtcatgagatgtttttacggacagtattgttccgtcaattttagtggcagacctgctcatgctgtcttgcataatattttgatttttctcactatcagtagtccaatggtatgctggcgaagcttgattggcactgtcttgactcttgagtaacccgccgttaggttgttcgttgaagtattttaactgatttaactgtggtctgtgttaatcaatcactgaacaaccatagcacatcaaagaaattgttgcaattaaacctgttttggtgtttcttcctgctcttattggaggaagaattagtgactgggatgtgtttgtgaacttataaacaagggattagtgcatctggtatcaataactttatctgcagaattactttaatgctttgtactgttaaatgttcttctttgaaactacttatatataatttcttggtatgccttcccaagtcacaaataacaaccgagtcctttttctgctgacatttttttttaatttttttaattatgtcttcagacgtgactgacatatgctttctacctttgttgcagatgtttgacgatcaagacttgggtttctttgccaatttcttgggcatcttcatatttgtcttggtcatcgcttaccactttgtgatggcagacccgaagtatgagggaaactgatgccatttttgttgagcaaagggatcatatgatcctcagatcaaaatagtgcgatgtatgccagttaatgatagcaatagtgcttgactgttattgtaagttcttacgcgaaatctggacctgcaatttctggcattttgacattacacatgtttaatcgattgaaatagtgaatccaggatattccaaaaaaattgattatacttatctagtatctgcaattctgcatatgctagtccgatgggtgctggcttactctatgatttttctctccccaatttgttggatgtggaaaaaccaaatcattgctgcgtgccctcgatcatgatatgttgttttggtaattctgaatgaatatgcttcaatatcagatacatgtgcagttcaagtatccagcatatccatgttcaaatgctaaaaaatcatcacctgttgcatttttagctcttcttcttaagcagattttgcacctgcacgattgaaacatggaggattccaactgcaaaaatctcttggctggtcaccgttcacggaaaacacctcgaaaataggttagccaagcttaccccgaaccattccttatgccctaaaacttacaaggcccatacccaacacaagaaccatctcacacccatttaactcctctcctttctcccactttcttggagctcaaacatcaaatcttcctgtgtgagagatcaagagagaggaagtgatagattttttttacctgacctagctgtttgatactttgatttgttaatttcttgtgcatttgctgtttgtgatccgttgctgtgatcgatgtgcccctgaacgaggtccacgacgtcgttggagttggcgccggcgagccggcgaagatggatcgccgccgcgcggcggagctgatgctgctgtccctctcctcgcagagaacgcgcatggcgctcgtgggtggcaaccacaccgccgcccgcttctgcacccgctaaccccgccgccgccgccgtctcctcctcttcttctcccatctcttctctctcttgatcatcttctccgttcatctctgctctgagtgtgtttgatcctcttcttggcgatatttttgtgttgggatcaatggcgacgatgaagaaattagctgcgagggatggcagggccgccagcaatggcaggctcctccggctggtggcgcgggcggcgctcctcgccgtcgtcgtgctttctctcgtgtcgctccggctggtgctctcgccggccacggcggtgggcgacgacggcgagctctacctgccggtgctactcgccgaagtaagcgaccgcggctacctgcgccacggcagccgctcggtgttcgtcggcgacgccgggtcgtgggcgccgttcctcgagcggcaccacgtcgccgtcttccgcgccggcaagctccgcgagctcgccgacgagtccgtcgacgccgtcctcttcgacggcgacgcggttcagctcggcgccgtcaaccgcgtcctcaagctcggcggcgtcgccgccggtttcgccacgtcggngtcgtcgacgttgcagccccctgacaactacaaggccgtgttcgcgcacaggtcggaggcggccatcgccttcgccgtggagaagaccacgccgccgaccacgagcgccgccgtgacggcttcgccggtgggacctcaccggaagctcctcgcattgccggggagcaagaaggacgacgcgttggccggtctcgaggccgtgctcctcgagccgccgcagaggcagcaccggcgaatcatccggcggctgcggccaaggtacctcccggagctgaccggcgactcgctggaaggctaccgccgacgaacgttcatcgacgtggcgccctctcgcggcggcggcgcggcgtcgtggttcaagaagcactacccgagagggaagcgcgtgttcgacatggtgcgcctcgacgccgccgacgcgacggagccggcggcgagctcatcggcggcggggatcgccgagtggctggaagggaacgtgagggaggaggactacgtggtggtgaaggccggcgtggaggccgtggaggagatcctccgcaggcgcgccgccgtccgccgcgtcgacgagctcttcctcgactgcgacgccggcgccggcgccgacgcggcgcgccgcccctactgggagtgcctggcgctgtacggccggctgcgtgaccacggcgtcgccgtgcatcaatggtgggagctcatgaatgctcgaccacgtagagagagaaagaagagagagagagagagagagagagagagagagagtgaaatgatggagctcatgagagggaagagatcactttgggttcagaacaaactatgaatatgcagggtactgattaacagctaacggataaatatatttggttttggttggggaagagtataaacttatgtaaatcaagcaaaacagttgttccaagattggacaatttttggatcttgaaattcaaccagcaagtaaatatatattcatgtatcaagcatgtgtgtttggccaaaatcattcttctagggcatctttcttatggtactgatgaagacaaacttgtactccctctatttcctatttctcctatgtaaagtaacatagttgggcagcaagcacaagaacgaatgattctatttcctatttcctattagaagaatgctttgggtttattttaagtcaaactcttgactgactttgtaaaatatgtagcaatatctgtaacatcaaattaggttattaattctaccattgttttttttgttagtaatggtactacaattttctaaaagcttaatcaaattatgaaagaagtcgtatatgctaaaagctctttcaggactgagtttcaccaagcgtggcttgaatccaacaggctatagcacgcaagacacatgcatggaggcccagcccttacttaattttctcacatctccaggtccagtggaagctgaagtagacctgcccatcttgagcttgtcaatggaacagtagatagagggttgtacagattcgttgtccattaactagtggaagctgaagtaaggtagacatgttccaatcatttgtccctaaatcttgatcaaattttaaaaagttccgactagaaaaaaaatcaaatcaacttataatataaaacggagggtgtacatcacgttgtaaaatggaacccaccacttctttagagttgccgttagtgccatctgtcaggatctacttttatatacgtagttttttaaggtttatttgaaaaataagttttataaaaggtttaaatgtcaagatttcccgtacaataatatgttccaaccactaatcgtgtaaatctaaataggatggaggtccaaggtggtcgcaccccaggtgcggaattgggcctaggtgttgggtcccaaaactaatgattcagaaaccgacatatttaactgtatcaagccctgaatcggtagattgatacaggttcaacaatctggatctttatcgcatacatttggtcaagactccaaaggagatatatttatataaaataataggacatttacaaatttgtggctaactattacagcagaagctatactgtgacccaattctgccgttttactatagaattaaaccgtctaactatactagacttgaagactagttttaaaggaaactaacttatgtgattgaactcccagcttcggcaaaaactccaaatagactctgaaaaagaggggttgaagtaaggataagtacaacgtactaagcaagctattatattattcaacaatgaatgcatgagaggtaatatctgtgtagagctagatttacttgcagaaagcagagaatatagaagtagaaaacctgtaatgttttaaatgcagaagtatttaataaaatttcaaattaggtttctatccaagatgccatagtgagtcccaatgcccgataaccgcgagcacggctatttgaatagttttgaggatattcatactgcagtagatgtacgctttacccgcaatccatgacgtgccaaacacattagccttgttatggcaaagcttttcggttactaacatcagtggtacctgttccatgaactataatccccatacgctctgaacgtaacattatcagcagtgagaggagttatggcgttcccggggtctttagagagatctgattgtatgacaccatgtcatcgcaatcagggttcacaaacaagtcacatgacatcataatttatctcaaacaaatatttacctgcgcctcggtaaatatcacaatattgcccttcgcggcataaatttgcctcctgcgcgaggacttaaataagaaccactacacagaggtaccacctttgctagataacttaatcagctaggtctatgcccatacgagaattgcggtcgtactcgtatgttcttcacatgtacttggtagtcttatgtcggttggaacagtactagccacccggaaatcaaccatttctaccgtactgtcccaatctaagttcattatattttatgcagtctaactaggcagggctaagcaaaagctagcatatctggtttgctatgttcaggttatgcatttgaaatcatgtatgactaatgcatagaatagagatataagaatatatgatcattatgctcaaaggggaggaataataacttgccttgctctaacgcaaataaatccaagataggcaacctgattatccgattctcgaaataccaaaggttgtcatccaaaacacaataaactctactgagaaagaggaagaaccaaattcaataaaagccataaaataataagaaaacgataaacagcttaagagggctagggtttaaggtataacctatctcttttgtagggcatagggattactgggctaatattttatgtggaggttctagagggttggaggctaaggtaaagagggaatcaagcaactaatgttgcttatattttatgtgaaggctctcgtgatttggatgataggaaatatactggatagttgatatggttaaataggtatgtggctaatatgggtcaaggttgggcttttgtagaatagtggctagggtttagttgtttaggccgatatcgaggtaggataaatatcggctagggttttaggtgtttgctagtcgtcgctagagttggacaacataacgactagatttggtaccatttctagccggtgtcgatagacagcatatcggctagaagaataggaggtgggtgcaggtttagtggggtggaagtgttactccgacaaccatgagtggcggcggagcggctagggtcacacaaagctcgagagttaactgtgcggcgtgcaatggaggtcgagaggatagtgaagctccgaccgctatacgcatcaaggtgtggggtgccaggagcagcacttcgaccttgggtttggtttttgccgggctttacaaccaacggtccgacgtagaggttcgtagaccgcgcgaacgtccccatggaaggcgtaaagttccaaccgatggcctttaagtggctaaagggtattttggagataaaagaaaatatttgaaaagcaaatataagtttaagttgtaaattcaatcataagattaaatcaaatatttattcaaatggtatttgaataaattaaggaaattcaaataaaatattaaaatagcaaatttggtatgaaaatgaagagtttgaatttagatgaatttaggtccaaatttcactagaatcggatctacagtttaggagatatgggcttctaaagattggattttgagttaaataaagaaaagcgaaatagtactgtgcaggggcccacctgtcagtatcttttctttttctttttctccttcttcctcccgtctcttccttcttttctcctctttccagcacgagcagcagaggagaaggagaggaggggcgccggttttccggcggctggaagatggcgacgccggcggcgggtggtgttcccgagcacaaagcatccggggagtgcggtggctggcggagaaagtgaaggagaaggccgaaacggcgacgacaagagctcgaccgtggcaacaaaaggagtggcggtggtggcttgttgtgggggctaaaagagaggggaaaagggaaaaatgggttcacctcgtcgaggcaaacatgatggcgcaaggacttggcttgcagagctgtggaagaggagatcggccagtggcggcaatggccggtcatgagaagagagagagagagagagagagagagagagagagagagagcttggtttatatgtagagaaggggagggatggccggctatttataggcggtggaagtcggtttggaggaggacggcaaggagggtcacgacgccggtggagtggaggagaaggagacggcgccggcttcgttttcttagcggcgacggaagggagtttgcggcggcgtgcgcgtgtacaacacgcgcacctgcaggaggaaggtggtttggcttatgggccgatttgggctgaggggagagatgggccaagggaagaaggaaaggaaattttggcccgatgacaaaaagaaagtcttatttgaatacatgatttggataactaggttttgcaaagaatttgaattcggaaagggaaatttatttgggtgcaatatttagaggtggagtttgagggaatttatttggaagcacttaaataggaagggaaattaataatattcctcaaaatatttttgggaatatatagaagggaattagttgaagacaataaataggataccaattctaaaattggtattatgtatatttgtggctaaaagggaaagttgaatgaagagtataagttggaattttcttagcacaagagcaattattcacaatatttgcaataatacaattcttgtgccgaagaggaaattaagccacagagattaaattggtgactagatcaaaagggggaatttggatatttggatcgagaatcaaaggatgggtttaaaatcaaaggacgggctaacaattaattccaatgagattgaaattactttggtttaggttcaagggtaaaattggaggatttcttggaccataattcataatagtaaaaatggttttcaaactaaatttgaataaaagagttttagtcgaaagaaggtttaatattcaaaaatagagttccaacaagaaataccaaatatgtttttaaatgaaaagcacaaaagatgttaaatagcatagaggtttttatacaagttagttttaggaggtcccgctaattatattttcctaggtttagaaagttattaagaacataagaatcagcatgatgcaatattagaaaaatgacacattttcaggatgttacaaatttaccccccttaaataaatctcgtcctcgagatttctgaagagtccatgtagaagtgtggaaatcttatcttttccaaaattccagatatctgtttaattagtcggttgataacttcatgtttttgttgcatagtattcactctaggtctttgatgagttttgtatcttttccttgtacctttcgttccttaaagtatttctggatcatctctttgatattcctttatcaactcttcttgtagttattctggcattgtttcttgttgtctttgtggtataaactggattataaaaagctgtagatcacttgattaaatctcatgtgattcaatgtttgaggatccaacacttaataacttgaacatgttgtaggatatttctgtctaggatttaatcttccttgcacatatatgtgtagcgatgatactcgtcgaggaggtttattatgatcttttagttattctggtcattggggtgtatcttcggaatagggctgatgaatgatcttcgtttgatggctttaatgtcttcttagacaatattttcttccaaccttttgtaacaattcaacttagatttctgaatcctaatcttgtgttgtttcataattccctaattgttcgtagttaccaatcctcttcttatgcattcccttacgatatttcttgcggtaactgcgtacggtatttctacgatgattgctacatcacaacttcttgaatggtgtcgaacattgaagtcgtattttctaactatatctaaccatttccttcagtacaaatccatgtagcccggttgtcctcacacggccccatccatctgtatcccgtccgtgcgtgcgctcgtcgcgttcgcgttcgcgtacaccgccgcgacgcatccggccaagcggcgtctttgcacatggcaggccgcaggatcgcgccgcgcgctgccacgctacgctagcgaagcgagcctcccgccggtgtcgatgcctcgccctcgccaacgacacgccgcaatcgacaacaccccaacccgcacccgcgggtcccctccctcttcatcagtcatcacatcttccccgcggcgagctgtgctgtgctgtgcatcctgcctgcctcctcctctgatgccgcctgcagcgacagccttatggcttgcgagagagttgaatactcctcgtgctcctctgcacgcggcgtcgcagcgatggacggggaggcggtggtggtgcagcgcccgtgcaggtgcagggtgcaggcggaggcgagctgccactagctgggctgtggctgctggggtctctgctatggttttaactgccctgaagcgttcactgacgcagacaaaagactcagcagcagctcgcacgctactgttcccgcacagcaccgtaaccgtgacaccatttttcttttttgttccttcgtagcagcatcgattattacacgtataggtaattaagggtatgttcagatttgataccaaaatgaaccttcctgaattttgataaattgacagcattgccataggattgacttaataatgttgccaaaattctttacacattgccaatttttgtgacaaactaaacatgatactaccgtgaatcaacaagggaagaatcctacggtaagggggggttggacaggattcacctttccgactgagtgccggatgctggatattgaatttatcattttaaatttgaattctcgaaaactattcggaatcacgctcggaatctatatattcgtcccacgttcgaaagctctagattttgtggttcgttaacccttatggtccaatggattaatcaagcgcgacaacaacagctggttcggcaaaaaaaaaaaagaagaagaagaagatttgaatgataaattactctgatgttaattcatcccttagttcgatttttttttcaagtgctcaaatcggtccaaatggttttgccgccttgcatgatatactgtactatactaataaactggtatctcctgacaacacaagttcaggtcaggctcatttaaatcatttgccaatcacgttctcagtacagtacttactgatctaatgcactgtgggtatgtatacaaggacaatgtactatgtttggtaatctcgggtagtcaacgtaacggcaagcgatgaaaatctttccatggatactaatgctgcagtttaattttattccgggagtaatcaagcacaactagtacatgacaagacaatattgtggaaaatttacacccatttggaaatatcacgtgctaatgcaacagggtcacctgtatctctctgtgtatctaagtagtacagtcaacaaagaaaatccgtttaggacaagttctgtactagtactgtattatcaagtgcagatttactgctaatgcgatcagcaacaatacggggtacagtaagtactaactaatgctaaggaggaaactatgcatccggatcttattgtagcaaattaagcactcatctcaggttgaacaactagcttagctacttgccgatttgaggattacataatgataaatttatttcttgaaatattttatttgtatctataatttaatttttttcgcgaatgcgcaaaagaattgcacgtcaatatattagagggagtatctataattcaatagacaatccatagctaatatggtgaataatctgtttccataccttattattctaccacaagatccgttggaaaatttgcaaccaaaaaaaaacaagaattgagacttgtactatcaattttcaggggctgtgagcaatatgtgcaattatgggatgtatttttttaaaataatttaatgtgatatattggctcaattgggtctggccaatgccaggagcccaggactcaggaccctctcatgacaagcatgcatgcatatttatcatgggtccacagtacagagaccatggcaggtgtgaggactgaagtcttcaactccttgcattgcatgagtaaaatagcagttggcatagctgcagcctcttcttcacccatttcaggggttgtcttcacggacactgtccctcacaatatgaaaaagaactgcagccaccaataaattttcattgcaggctttttaccagcctttttaggtgaatttattgagccattcattcaatcagtatcaccactaccatgagagaaaaaaaaaaggggggggcagatttaggtgaggttgtcattggaaaatcctacacgtctgtccctgaacagaaattcagatactcaggtgacacgttttatattgaaatttagtacttggtgagactccatgataggtttggttctcatgaaccatgaggcatgtatgctctccttctgtcttattgtctctttaaactgtttgattgggaaattttgatagataataattgaatccatttgtgatgtaagaatttcaaaagaatcagcccatttcacataaaaatcagaaaaaagttactacagaagagaaggcaatgaaaagaaatcaaaacgattttcagtgggtggtgtggcacgctcacggtgagttgtaacgacaacattgttcatgtggagttgcgggattgggattcggtaacattctaggtgactcaatgtcaccgagaatgtcatgggggaatgtcactgaatctgtgttcggagttgcggtgcctagcggcacttcaccgtgacctgtggtgaaagatcatcatatatgataattaatttttagttatacgatgattaatatggaaaggaggaattacattataaagttcacgttacaattgggggccaataagagccaaaacacatagacaaggtcattgaaaggtatgattccatcattagtttaggggtttaaacagatcgttggaattgcatattgccaatagttatcaatgcaaatgggagttcagacatgggacccatttgtttgtacctactttccaccatctcactatcaagatacactgtttgtttatcatgtgccataccaagatttgtacttacgattggttctcttcataaaagatttgaatcataagaaagtcattgcagagaactttcaaaaaataagagagaaatgcaggtctcgcagacaagcagtcaactcattgatgaatcagaagcacacctttaccagaattcagatgaaaaaaataatggcagaatttctcacaccatgaatcgtttttatatggtgaaagaataaaggaacaaaacgaaattctttttgttgattttctctcacatcctcacatctccaatctcatatccacaaagatttctctgctcagagaaggggaagaaaaagataaatagaagcaggaggaaaggggaacaaaactgcaagaggaagaagacttcctcctctcctcaaaacacaccctttctctcttcatccagagttcaagaagctgatactagcttattactgctcactttcatccttgcttgttatgatgatgctcgccatgcaccactacttgctaccctgatgagttgctcactgaatgaacaattgcaaagcaatgccaagttatgtatgtacagttatcagattggtgttgtgtttaatctcctcctcttggaagcaggagcagagtcctggctgttgtaatctttgttgttgctgtttgactgtgatgatcctagtgttgtgtcatcactcctaaaactgaagcacgccgcgtccaacacggtgatcgggctgtgtggaactgaagagcttgcattgctgttccttatcttcttcaccaatgccttctctaccatcagctcatagcatctcataaccatctcctgcggatgcacaaacatgacacattcagaaacattgaaaatacaatggcagatcagtatgccattcctaaaatgcaagaaaaggctcaccttatttacagggatttcagattctccaagggcactgttgaagacaagaaactgattctcagcaagcacagctaacaccactgcggccgcaatctcagaaggtctgaatgacaagaacctagagtctgtaaaaacattgcacataaatttctagtaagtacaacttcatcagatgttgccattggcaatgcaggtagatcttctcgattaaatcatcgggcaatatgatcaaacctttcagagtgcccactgtgagatcagagcaccatgatgccagcgtgtagctcggcggcttcccttcattgaacttgtccaggaagtagccgatgaaagagaatggggtcacagcttgcagcctccatttcagggttttcatcacaataagctccatcctcttaatatgccttgcttcaaacacatattccgcatcaaaaacctatcatgcaacaaaagcccattttagcacaagatcatcgcgcgatcactgaacaattatcgatttcaactgtaactcttcattcattcacctgaaggtccatgggaagagggaccacggtctcctccatcttcgtagcaagagatagacaactaactgacagcaactgttgcatccaagattcgtcatgctacaacaacaagaacaaacaaaagcatcgcaatgatcactaccgggattcactatacagtaattaagtagtggcaatgtacatacacgtcccagattcttacagggagattaaacgaggagaggaacctatccaggtagttcactgcgaggtaaaggctgagtggtccaaagttgtagtaggaatggacctgcaagcgcacatgagagaagacaagattagcaccttcgtcagtttctacttaaaaacaaatttgtccatataaaaggcaaagccccattgttatctgcaatctggtgctttgtcaagtttagcagcaaaggcaaatgcacagagccaaagcaagatcgacgctagagtcaaagatgtaacgcaagcatgcaacaacctacctagaagacccaattaatccatcaatagtaacaaataaagcaaaaaaaaatcctagagctttatttatttttcctacacttttgattcatattcaccttgcaaatccaatcaatggcatctttcctccaagaacactccaatccaccgagctccagcttctccagatacccccgctgaggctgatgatccatctccttctccaccaacaacgccacgaactcatcggagtcgatggggaacacagcaccaccaccgaagccaaagaaatcaaagccgccaccgccgccgcaccccagctccgccgccacctcgccgccgccgccgccaaagccgcccaggccaagcacgctgctgctgtcctccgcgcagaggaggatgttggaagcgccgaagcaaagaacacccatatcaatcaacccaagatcgcaagaaacaacacctcctcctctagtactattagcacaagtgatactggtattgattcaagaactcaagaacgcattgattcaagaactcaagaagagagagagaggaaaggaggttggtggtgttttggggagtgagtggcctagggaggcgagagggagagggagagggcgcagcaatggaggtggaggaggaggaggaagaggggcgacgcttttgttggtgcgttgtcttggaaagtggaaaaaggaggggagagacagaggagaggtctcctggggaagagaggaggaggggtttttggggcgtggcagttttatagggcgtgcgcgtgcgcgtgcgacgagacaggaggtggatccgtgtgcggtggtgcacccacacgctgcgctgcaccgaggcgtgccaacttaaggccaaaatagagggagccgggagagacgtggcgatagtaataacatttcctagtgtaccgaacgaattcaaacaagtttagccaaacttttttgataaaaagtatttggtttttctcggttttacacccttcttgcgacggtaaggtaaacattgctcctcttatgtctacgctagacatttttgtaattcaaaaatatgacataaacatcaaatagattggcgtcgagtaaaattgggtgaatttgttgttacgtttagaatattaatcgggcactacatggttttttcttcttcttttttaagtagtataatgtctacggtgcaactaaccacgatgcgcaatatctaaaatgtgattaaccacgagttatttggtttactggtgttatgttctatgctagtagtactttatttttaatcgtataatacttgtttaaaagtctctagtggctggtgccaatgaatatgccactcactgttgtttttgtagtttttacaaattgcctcaatatttttctaatattgtagaatagtctaacatttagttcagacaaataaataatagataatcaaataagcaaataaatgatactaaaatatttgattaaaaaatattttgctatgacatattatgattcttctatccatagcaaagtatgagcattttgctagtatgagaaatgtgtgacacctccttacagcatagagaaaggcacaagaaggcaattgtctcttggttagtggtattaggccatccccaacccagaaactatcaattagtttccatatttgctatgttatatatacattatgcatagaaactatatatacaatggatgatgtcttcaaattaagttctcatccaatcatctttcttctctcctttatctacctatccccttcttttcattattggttcttgtgtagagatgatttcttgcatgagaaatggtttctccatctttttgcctctctcctcattaactctcttggcacatcacatttttgtttatgtggcaatatattttatgctatggatactagatgtcatggagggttagggatggccttagagtaggtacaatagcagactataagctagctataaacatattttaaagagataaaagaagagagagaagagcagcggactacagatctataactagctgcagcacggatttcaagatataacgtgtgtatgataggtgggactatgcattaatagtatagtaagcaactattgtatgaattgtattacattggctatagataattggagctagtagttggctatactattaaacttgctcttagaggggcgagggggaagctaggagaggggaaccacattacaaggattaaaaaaaaagaactagagaagtcacctatggcttaaatacaattatatgcattttttttggtacaatgatatgtacattgaaggcagaaatctatggtggtgagatacttattgtactacatataactgttccttgttttttgggggtgaatagggaggagtgttttatttttttttaacaattctgaaccaaaaatagtcatttgtgctatacagcacccagtgaatatatgcccaaaaattacaactcttcacgcatctatggcttcacgatacacttggtgatagaattgcgagaaaaaactagtcaactgtgctaatttaagatgctacaactaaatatagttaatgaccatggtagcctgatatatgtttaattaattctagaagatgcagttgataacaattgtatagtcaacacaacctgatagcgtgctagttttcttttagcgcgcactcgcttgcattaccacatcgattactaaatactaggtctgtacatttgcatctgtaaatttccacaatttatgttatctgtcaggtaattgggattgatgcgtctattaaaaaaactaatcaacccgagtgttcatgctggactgtcgaacagaaggaatttcatcgcttacagctgcgttgacaacactaaaatttgcaggcgtagtacaaattacaattacacatgcccacattgcatttagatcagaatgacaataagtagactgtctgtaacgtaattggcacccagaataaactggtggttcctaattcgcgtggtcaacgagttctttttaatataatcattcaaggcggcaatccattttggattgtgagttaagagctgcttaaatccgatgggcaaagcatcaagattatccaaccattggttacgcataactaaccaatcaatttggccaaagcccataggattcttctccatgtatcgatggatcacacaatagataaagtaaaagaaagaacaaatgctgcaagatatcaccttgacgtttttgttagcatatgcaccccgtccccagtggtcctagagttggataaacccaacacatatccttttctccatgcagattcacgatatactcacattgccttctcttcgatgccactgcactcttctcatgatgcaaaattgttactaccacagttttacaaaatgctgagctgtctgaaaaaaactctgaatgtgtgatgctgctctgatacatggctcctatgaacagatcggtcaataaaagtttaggcaatttaaccacagccactctcattctcatcatgtatcagaggaaatgctgaaagctatagaatctgcgatgctgctctgaattctgaaacatttttttcttggtacgggtacctatgagagcaggtttaatagtatagtcaactactgattccaaatcatatgtagttattttaataaccaattcatacaataattatctccaaatatatactacataattaatatctagtttcacatatcatacacatgtatcttatagtccgtactgcagttggctacaaatctgtagctccactgcttttctatcttacatcttatcttcttaaaatgtgtttatagttagcttatatcctactattgtacatcctctgattctctgaatatctgtctactagaccagtagtaataagttgactagtggtgctgtggaggcaatttaaccacggccgcccaggcggcgaggcaggcaagcaggcgaggcgccccccgggcgtgcgttgtcgcttgcggcgtctcctccgcgatggctaggtgcaaagattgcgaagacgcagtacgcgtttggctccatcgccttgtacgcgacggtggcgcacgcccgtgtccggcaccgcgcgctcgccatcgccatcgctgcgtacgtacgtaaaagccaaggcgagagcgtccaagcggaaaaagcctgtgccgccgtggcgtcacctgtacagtcgaccagtcgtgtctctccctcccgtgtccgtgctcgctgctgctgctcgatgggtataattcctagtgccgatagctagctagctgctcgttacattttcgctagccctagtcctccttgcaagggacaacctgttgttgttgttttttttaagaaacacggtacaattgcaagcaatcgtaacacgcatacacttatctctataacacgcacacaccatatttcgattatatcagaagactgagctgatatatcttaaaattgacgaagttaccacgaatgcctcgtgtcaatgtgtacgtcgctctacaactgaaagaataattacccgtaaatacgagcatccgttttcattttgttactgctacgatggttgtgtgatttgtagagttcattaaccttgtgagccgaaatgaccatgctgcgtcatgtatgcttcggggttgggtagtttggggtgggtgtgatggtcagttttatggctcgtgatgcggttaatatggtgcaaccaccaccaacgtgatagtttgctgggctaagcccagcgatcgatccatctcttcttcccggggggcaattgggccaccatttttgtgttttgacactcgtgaggagcgtaatgtgatgcaactaccagccaagaaggggtttggctggccttgcagcatgatgagctcgtgtgtaccctaccaaggaagctggctccacattgtgaagatgacgactagtagatgagagtatgtacatgtgctccattggtacaagcatagcatccataattgctcgtgagaagtttcaagcgattcaacaaccaaagtagctagcactcggaacaaagaatggaacaaaaatgatctggtttgggttagtgaattgcattctttggatcagcaggagtagagtgtgcactggtccatttagtcatttacaaatcaagaggcatggaaatgcctgggccttcatgccatgtgctttgtttgcaaagatggcttgactactattactagaggaactggagttatttctcgtgaggaacgttatatggtgtaaccaccagacgaactagctggttggataattggatgtaatcaagtatacactagcttactcttttacctctagtggcctggtgatgttgctcttttattgatcttcacatttattttcttcactgcaaaactgcaaattttacgctgaattaaaagatagagtatatataatgcattctacagtatatataatcctgaccagggtttactttatcattttaaccgatttgatagaaggtcaccgatataccaagaattccaaaattttaaataaaagttagttaaatttgaacaaatattaccaaaattcgtgaaaaaattaaaacaaggaaaaatttcggctaaaatagtattgtattggaggggtccgaaatgaccgaaatttccaaccctgatctttgacatttctcctttcgcagaaatactccttgaccaatcggaacaactgctgcaatgctctaatgctctgcaagtagagctactacgtacctctgttcaatcagatcatcaggcaatcgatcagcaatgtacgcaggcaggatgcaacccgtgagaagaataatgctgtgtagctaccagtggtagtcttgtattggattggctcggcttccacattgattcaggctcagccagccacatccgtactgaattcaccacacttgaagtcgatcttgaacacactgagaattagcatgcgcgtcacgtaggttaattgaatgggaggcaacatttagtgctcgtgacgggcgtaacgcggcgcagcaaccggtcgaggtagagctgcatggtcgtctcgtccgtcagattgcgaacgattttagagcggagtagtacttggcgtggtagacagatcggtcgccgtgtgatccgtgtgaccctgtcgccccgtgcccaacatgcgctggtcccgtcaatctcggagagcgcaacccaactaaccaaaccaacaggatcattacggccccatttggtagggctctaaactccaactcactcctctcaggggactagctatgtgagttgaactatgaaagtttggtagttaactctgactgaaaaaagcaaaaaattgaaaaaagtgtaaaaaaaggaacctaccgccggagccaatcccaggcgccgcccgccgcgtggcgcatcgtcgccacccgcgctggccggccgcctcccgcgtgtcgtcgccgcgtgccccgcccgccgtcgtccggacgcctccgcacgtcgtcgcagcgcgcgccgcccactgcccgacggccgctgcccgctagctcgctgcccaccgcccacgtgtcgtcccgtcgccctgctaccgtcgtgtgcctgccgccgccgccgcatgctagctcgccgcccgccgcccgcgcgtcgtcccgccgccgccgacgccgcgggatagcactgaccggagcgccgccgccgcgccctccaccgcagcaaccgacgccatcgcccccgatccctcttcctcctccgccgccatggccaacaccgcctgccgtcgccgacgccgcccaccaccgcccgccgcagctattgggactcgggagaaagatgggggaggagaggaggtgagtaggggtagttcaatggtatttttatgtaaatacactaaagaattaaaggttagtgggtcttttggggtggagtggagctgtggagcagcaaaaacccagctccacccccgtagtacaattttgtggagcagctctcccaactccgctcccaaaaacggagtatctggactgtttgacacaactccagctccaggtaagttggagttgggagctggagctgtgccaaacggggccatttgtcgataaattttcacctaaaaatttgacagatgtaattatagtataattgtgatgtaattacattgtaactcacttatgtttaagtttcaaaaatctcttcgtaaaattctatttcggtaaaacggaggtcgtggaaacgaatcctctcatatgtgtgcgcgtagtgacttttttcctcctccatttgcacaaatcttgaaacaaatctaacggtttaaaattatgtgcaagttacattgtagttacatatgttactacgattaaactgtaattatatatgttcacagcgtcttcacgtgacgccgcgagatagttatcaaccgcggcccgcgtaaaacggcccaatcacgcgcgcacggctcggcccgcgaggcgtcgagacgagaggattcctcgcgttttcgccgattcggcccgcgcgcacacgcggcgcgtcgtctcacgcacgcatcggtctctctctctctctctctcggtgactcttccgccgcctgcgccgcggcgcgagccgccatggcgaggcgcgcgaggctccggctccggctcgtccgcgccctcgccacggcctccgcgtccggatcgcctgcggcgccgcggccggcgaggcaagcggcgccctacctggcggtgctccaccgccgcgggagggcggaggcggcggcgtgcctgaaccgccacctccgcctgctcccgctcggggaggcgacctcgctcctcgacgcgctcccgtccgtccgcgacgccgtctcctacaacaccgtgctcaccgcgctctgccgccgcggccaccacgaccgcgcgggcgcgctgctccgcgccatgtccctggagccccacccggcgtgccgccccaacgccgtctcctacaccgtcctcatgcgcgcgctctgcgccgaccgcctcgcggaccaggccgtcgggctgctgcggtccatgcggtccgccggcgtccgcgccgacgtggtcacctacggcaccctcatccgtgggctgtgcgacgccgcggaagtggacaaggccgtggagctgatgggcgagatgtgcgaaagtggcatcgagcctaacgtggtggtgtacagctctttgctccaagggtattgcaagtctgggcggtgggaggatgtaggcaaggtgttcgtggaaatgtccgagaagggaatagagccggatgtggtgatgtacactgggttgatcgatagcctttgtaaagtggggaaggcaaagaaggcgcacggggtgatggacatgatggtgaggagggggttggagccaaatgtggttacgtacaacgtgctcatcaattgcatgtgcaaggaaggttcagtgaaggaggcaatcggtgtgctgaagaagatgtccgagaagggagtggcgccggatgttgtgacatataacacactgatcaaggggctctcggatgtgctcgagatggatgaagcaatgtggttgcttgaggagatggttcgaggtaagaatatagttaagcctaatgtggtgacattcaactcggttatacagggcctttgtgatattggtaggatgaggcaagcgttccaagtccgtgcgatgatggaagagactgggtgtatggttaacttggtgacatacaatctgctgattggtggactccttagagtccacaaggtaaggaaggctatggagctgatggatgagatgactagtctagggctggagcctgattcattcacctatagtatactgataaagggtttctgcaaaatgtggcaagttgaccgtgcagaagatcttttatctacaatgagagatcgtgggatagaacctgagctatttcactatattcctttgcttgtagccatgtgtgaacagggtatgatggaacgagcgaggaatttgttcaatgaaatggacaacaactttccactagatgtggttgcatatagcactatgatccatggtgcttgcaaagcaggggacttgaaaactgcaaaagagttgcttaagagcatagttgatgagggactgactcctgatgctgttacatattctatagtaatcaatatgtttgctaaatctggagacatggaggcggcaaatggtgtgcttaaacagatgacagcaagtggctttttgcctgacgttgccgtatttgattcactgatccaaggttatagcacaaaaggagagataaacaaggttctcgagttaattcgggaaatgataacaaagaatatagcacttgattcaaaaattatttccactctttccacttctctggttgcaagcaatgaaggcaaagcattgttgcagagcttgcctgatttcagtgcagaaatatcaaaaggcaacatcaattcaccccaggagttaatgaaagtgttgcataatgtgtgcccccaaacaaattaaacctggtgttgagcctctttcatgttctcctgcgcaggtagccttcattccttcatatttgagatttaaaatatgttcctttgttctagatctgcctatagtttgtacatagttttgtccattcccaaatcataggtgctatttgatttcggctgcagatattaaatttggcacatctctatcagatgtagttagtagttactgcgtgtcatgcgtccattttcctcgtggttatttcagtaggttcttaatttagtctttgcttctctgtaccaatgcaggctatatcattcaaagctcccagcaatcagcaattgcacaagagagcaaaactaaatctgggtacatttgccggatcgttggctagctggagtcatcgaaattcacaggcaaatatgatcatttgccactctttagattgccacctgccacccagtgaggctgtgacaatgacacggggggtcgatgacatatgggctaggatggaaaaacatcaaattcccaatctaagagtagcaaatcatcaattttgggatgaggatttaggatatagcaacttgcaagtatataggagacaggaagtccatgtccagcaagtatcagatgggcatgattcacggcagtacggatgactattttcaagggctagcatgataccagcatcaaaggccaggaagcaacgaacttgaaagtttcgtttcaaactcgataatgacatgctactgtgtcatctgctgccgacatctccatggtcttggtgccagagctggacttcacctgctcgggtcctgaagaggtggcatctgtgcttccaagggcttgttctccattgattgatctagcgtgtatgcagccttttctaactgggattaagagttgagattgtttttcttgtccctggtattgttaatttgatacgcaaattattttgacgttgtagtggtatggcaaaaagtatctcttttacggtacacaaattttctcaagagactggcatgcttcgtagtcactactcaaatactcaatgatgataccaaacggttattctcgttgcaattgccgaaatgagttgcaatggcaacttttatgtccaaatgcggccgtttgcaattggaaaaagagaagaagaaaagacgctgcttttcagattgttcggcgatgtatactccaccgcagtacatctccgaacgatttccctgtggaataagttcaccagaggtccctcaacttaacaacgagatttatttaggtcactcaaccacaaaaccagaaatgttcacccctaaactcattcaaaccgttcaccggaggtcccttggcagtatatgtgggttgtttcgctaacgtggcatcctagtcagaaaaaaaattaaaaaattttcgtggggcccacatgtcagctgcggtttattgtttcttctcttttctctcctcttctctttcctctcctctttctttgccggcggcgggcgcggcgatgggcgagcgcgcggctggagtaggtggaggggcggcgtcagcgcgctagagcaggcggagcggcggcgtctccgggcgagcgcggctgcggcaggtggcggacgagcacgacggcgggcaagcggcggctccgagcgtgggtggtgcgcggccggagcaggcggagcggcggcgtcttcgggcgcgggcggagcagaggggcgggggacgcggcggcgaggcgtcgcctctttccccctctcccgccggcctcatctcccccactccgcccggcttcctctccccctctccggcggggcgctgggagaagggcggtcactcgcgggtggcgtggacagggccgaccacccgactacccgagcccggagctccgtccgctcccgtcgctgcggcgcgccaccacgctgggctcctctgatgagtgcgacggcggcgggaaccagcggcgagaagaacagcacgcagagcgacctagggctaggagtagaggtgcatggcatacctgctctccactccacgtcgacggcgccgtcgatttggccatgctggtgaagtttcccgccgcccggccgtcgccgtcgccgatgacggccgaatccagattttccggcagcagagagagcgcatccccagctcgctgctcgccgccggtcttggggaagcggcggcgtcggggagagtggagagaggtcgggagtgagcgaaaagccgagaaggggaggaggatgacccatcgactcaggcattcgactgccacccccctctgattcctccgccaccggcggcgacatctctgtcggccgcggggatcccctcccggaacaggagcccgtcccggatcccgccaccacctcccgccgcggttgcccacagtccgccgccgctctcgccggctgtcgcctcgctcctgcctgcttcgcatgccgctgccgctctcgccggccgtcgccccgcccgtctcggctcgtccaagaagacgagagaagagaagaaagggaaaaaagaagggatgtgggccccgcaccgttttctctcacttacatgtgggccccacgtattttatttatttatttttgctgactaaaatgccacgtcagtgaaaccacccacatatactgccataggatcttttgtgcacagtttgtgaaaatttaggggtgaacatttctgattttgtggttgagatgttaagttgagggacctttggtgaacttattcctttccctgcagaagaaacaacagtatctcgtcgagagcagtgacacaagtttgacacagaaccgatgaaaaccgctcagttttcttaaaatttgaagggatttttaggctaaagatcgtagacccggcttttaaaaaaaacgtctaagaggtcttccggctaactccacaagatggtgggttagctaacctgggttcaaaatctcatttgatattagatcttttcataatattcgcttttttaagctggtttttaatcaaaagtcacaaagtcagaaaatttgaaggtttcgagccaacacgagttgacaaacagcacactagaccagtcaaatataatttataaaaaaaatcaaattacatttaattatttgataaaatttgttcgtatgtcattgccttttactagatggtttaccttaccgctatctagtggtatcacagttatcaatcgtttggttactataaaagcgataagatattaagtggtatcacaattatcaattgcttggttactaaaaacccaagaggtttttgattaaaaaaacctattagcttttaaaaataaataatactccctccatctattttcaaatttgaaaaatttatttttaaaaggcatatttcaatctaacaacctattatcttaatgacattctcggatttaatgtgtgactctctattctttcacacaagattggctacatggatatcgagaaatgcaaatatcaatgaatcatttgtttacgagaaatgactagtagcatgtttaaatagatgataagtaaaattacttatccttggtctgtgtgccaagatgaaatatgactattaaaagtagatggagagggtattgtagcaggatgttactgtgataagtgaaggtaattatctgccgcactgctgatgctagcaaacagtaaaactgtaaaagcttcaggtcaaactcacacgctggcccagttgctcagttaactcctcccaataatctcacgcgctctcctctcgcatcgaccctgtccctctctcatcatcatcattcatcaatcgtcgcctgatcgcctccagcgaaattcttcctccatttctctctccatcgaatctcatcccagcagcagcagcagcagcagcagccgccatggattccaaggcggacgcggagtcagccacggccagggccgccacggcggc

SEQ ID NO: 25893 - DNA, 22191 bp, Oryza sativa
ccccccccccccaaatcccaatttcacatccgcgtgatcgaatcaaacacctgttcatcatcatctgcagcatccaagtatccaatccatcactactactactgatttgtttcaccaatgctatgtgattcttctctgtttgagtgcttacttgttcatcatccgttagcatccaattaatccgtcacttttcagggtcaagaacactaattctgctagtactaatttgttccaccagtgatatgctatgtgagatgtgattcttctctgtttgagtgcttggaattggaaattcttctgcattgctgtagtgaaaactgggccaagcattgctgatacggcgatggggaggattgctcagatatccaaggtgatagctgaaggtggatatgacaaggtgttccaccagacgttcgagtgcctgcctgatgagaagctcaagaaggcgtacgcatgctacctttcgacctctcatggcccgatcatgggcgtcttgtacatctccactgccaagattgcattttgcagtgacagtcctgtggcgtatgtcaccgaggataataagaaccaatcttccatctacaaggtatggtgatttctttcgtcatatgctctataaaccacatgattgtttgctgatattcaagttcttggtttcgtagaaattatttcagatgctggtttgtatcagtatcataaatgctatagcaaattggtactaccctggttccaaaatataaacatttctgcatgttttccaaaatatatctggacatccctccttctggatacattttgaaactcaagcagaaatgtttatattttggaacggatggagtattttataagttatctcaactttgtgaaaacatactaattacgaagaaggcatggaagataagaattccacgcgattcgtatcatgtatgctaccaaattgctatttcaagtcaagtttcggacgatttgcaagggatcttgtagaaacacacctgatcatgtatgtatctgttttaacaggtagttgtacccgttgctcagctaagatcagtcactcctacggcaagccagcagaacccagcagagaggtacatccaggtggtttctgtcgacaaccatgacttctggttcatgggcttcgtcaactacgacggtgccgtgaagagcctccaggaggccgttcgtggcggcaaggcttcacttcaccatcacatgtattttttgtgaacatcgccgttacatgtattgatctgtccgtcgttcgtcatgcatcactgggaattcgcatgtgtcggtgtgttaaattgtctgtacagatcgctccccttgctgtgtatattggctgaaatttgtgttgcatatgcattcatgtattgtatgtagtgtgtggactagatgtgtacaaatactggattgattgttggcttgatgctccattaaagcctttctgttcgttgttcccattctaagttcaatcacatgatgagttgacgattgctgttgaatatttttggcattcccggagttaatccatgctgagaagatattactaaacatggttttgggctgtttagtttacgtaaagtgttggtattgcaaaaaaaaaaagaagataatactgtattagcaaagaacaaatcatgccagaaaaggtaaatgcagcttccaaaaaaaagaatgttgtttgaatagaggttaaaacaaattttagaatcgaagttctcacccttggattaccacaagtgacgatgaatttcctttgctgctagcaaacatgttgcgctgttagcgcaggtacaatagcaggctataagccagctgcaaacatattttaagaagataaataaggggagagaagagcagcgggctacaaatttgtagccagctgtagcacggactccaaaacgcagtgtgtatatgactgatgggaccagatattaatagtgtagtatgcaactattgtatgaatgagctattaaattgactatagatgaattggagctagtagttggctgtactattaaacttgctcttacctcatttgctttgacgccttggcccgcccctatccctatggaaccagagccggtttataggatggcgcctgtgcagtgcatggctgaggccgtggggaaatgaggtcgcagcctcacacgcatatgtatactgcatctgaaatttctgttgtgtaaagcatcaacaacagtaaaaatgtagtcttcaagatcgaatatacagaaatttcaaatttctgttgtccaaagcaaatcaacaatactaaaaatgcagtcttacagaatcaaatatcactatagaaatttctgttgtgtaaaacaaatcaacactaaaagtgcaaccttcaaggatcaaatatcatccacaaaatatgaagttaaacatcacaaatatccagggcatcaaagtgacagactaaaaattaacgaagctagaaaatatcttctatgcaatgatgattacagaacagagtatttcaaaggtccattcgtttcattgactcgtccaagttctgtaaaaaaaaaatataaatagttcaaatgatcaatatttctaagcaaaaaaaagatacattttttctaaaataaagcattaataaagctttctaaaatattgaattattggtgatgataaatttgttttccatcaagtgattatccagaatttgtaggccaaattttggaggtgttaattaaatatgatagttgattatctagtttgccagaatttgcataactaagatagtacatacaggaaactgacgtaatttgcatcaactttgctgataaactatcagatttagaaaaaaaaaacaaaagaacacaagaaatttactaaccatggaatcatcaataaccagatccttcatttggacatccataagcttccacaatccattgaatcctctaggcccaggttctgtacataaacatgttagagagatcaaatgggtacatcagctcatctagttctgtaagatgaactaaatgcatattaacaaatgcaaagaaacatgcagagtagtccatctagttctagaataaagattcatcaggtaaaattttactctacataatactgctacttaaattagatcctctcaacctgagattgctaatttgctcatcaagcaagcaaacaaaagagaggtactaagcaatgaccgttcaagtctcttccagccacaagacttagtagatgcagaaagtacagatggacaagacttagggtttatggaaggaatcatataccggtgctcacgggcgagagaaacccagctggacgaaggtggcgatgtggctgggtgtcctccggagccctcatcgttgctgccggtggagtgtcctccggaacacctcgccggtcactgctcctccggttggccatcaagcagatagccgccgcccactggtgcctccatccgccgctgccacaggtagagcacctcgtcggtcactgctccgccgcctgcaggtagagtgcacaccgacggtggagcacagtgccgcgtcgcctgaagtcgccgccgctgccgcgtgcgagacgagagcacacctagggtcaatccacgtggaccctagggttcactgggtgtcagccctttgttccctaaaaatatatgggccaacccaagaaccttttggtgccaaatttttagggtcggccagcgcacctaatgggtcgatctgccccctttgcaggctgaggtgtagcattatataacactaactaaacagagacgattttgctatatatttgtcgacaaatttttccctaaaaatttgacagatgtaattacagtacaatcgtagtgtaattacactataacttctatgtaatcacactgtaactatagtgtaacttgtatgtaactttcaaaaatctctccgtaatatgttatttcggtaaaatggaggtcgtgggaacaaattctttcacatatgtgtgtgctatgatttgttttcttcctcaccaaaacaaatcgtgtaatagatctaacgattcaaaattatgtgaaacttatatataagttacactgtagttacatgcaagttacagtgtaattacatataagttacagtgtaattacactacgattgtactataattacatctgtcaaatttttcgggaaaaatttgtcgacaaatgtataggtagtcccgtttcgggaaaaatatgtatagcttacataaaaattcatgagtggacgtccacatgagccaccaatcgtttattcgacaaaatcagcataactggcaaaaagaaaaaacttgcagctagcacctactcctatcaatatcctacatgagtattatgatccatacaagatcattcaattcttcaacctactgagatgcttcacaattttttagagcttcaaattttatccatttgcttagtgtgacaatgctccaaacaggggtcttggaaatacatgacattctcgacgcattacaacttacaagatagcatattgcatatagttaagttaagcaacaactgttgtataaaacactaaggaatctgctcaagaaatttcaagcttcacaaggagactaaattaaagataacatatgctggattgattccatgaagttaagaaacggtcagcatgtaacattgaaaagtctgctatagaattttatacttcaaattaggggactaaattgcatatactagaattaatagaacattgaataaactacaaacaatcattatgaacaaaacaaaagaaaaaaatcaagatgaccttcatggcctcacactaaaatatagtaatgcttacgtctatagagcaacaaatggaaggaggcatgtcttggaacataattcccggcagactttctctgggagtctattattgtttatagataaaactagataaagcacattttccatgccttgcatagatcaatttctaggaacaatatactgttgtgttagattaagacggccatcttacaaagaaaatgccatttattactaaattccctaaaatattctaaatgatattttagtactttaccaaatagtgctacaatattcagaacacaaatgggggctgttggcatcagataattattagtggtaatggatcagctgcctatattatacacataattatttgtaccaatttatacaaatttacatgatatgttaataggataggtgcacagacctgagatggctataacaatcatcactgctcctgaagttctccaagcatgcccaacaaatgtgactgccacatttacactcgacatggttgcaaccatcagctttctcgattgtaaagtggcaagaagggcataccttcacattctccttccccttgcgccattcaagcagagttgcatcagggtcttccttgtattctttgtatgcctcacaggatatgaaaggatgatattcaagatgacacttgttgcagatctccacaaagcaagccccacagacaaaaggtttgctttcagcatctgcagcagccacttggtaaatggatgggcaatcaggagtaggacagaaacgatattttcctgcattagaagcaacaaatgctctcaaggaggctctaaatagctcttccagtttctcgctcgataggagagatctcaaatcaacaacaaggagctgcttcttgcacccatttttgaggcaacacagagggaaaccatcatgtgatttcaaagcagattcacactgatccaccaagcaagtcagacaaaacacatgcccacaagattcaagcttaaagggatcttctacctcacacaggcaaatagggcatgcattctctaatggaagttgaagcaggccattgtactttgtagaatttaccagctcagagatcatttcttccaccctttgcttgtcttctttactgcctcgaacgtaaagtgtatgttgtcgtaaatttaatcgaagctctactgcaggcacctctctcttcaatccttccagatcagccccgaacttttttaacatttccttcatcaagtttggaggtaggttacggccacgaagacgaatatccaaaggtttcttatcacggagttgtagaagggcatggatcaatttctcctctgctgcagcaacctgatcttggagtccaaagactttaatatttagactttgtctgtcatacagaatgtaagtgccagtctcttgctcaacagatttcaaatctgctacaccatcacgggacatgagcaactgaactgtacttagtgtcagatcaggatggtttattgttttgcctttcattaaaatctcaagaggccttctcaagtctgctattgtttttgtggcgtttgcagtaagcttgacacggaatataccatattcattcttttccaaattgtaagacacgcctacatgaagaagaacactggttaaggcctgaggacaccaacacatacaaatatttttgcagtccaaaacaactaaacattattaaggccgtctaagaaaggtgtcactgctagttaccacgcagtgaccaaatgaccaccggttattgaatgtaaaaactgtggatggaaaagacctggataatatttacatctactgagataaattaggaatgcaactcatagaaaaaagtgacattttcaaacttccaaacatcatcagttagcaacattggtatacacattgaatggtcacagatttgcccttatcaaagacaagatatttgtttgacgaagggccagtggcccacatacatagatgagccaagatttgagacccatccaaactgccttgttgtgtttaattttctatccttccacaaaatagaaaacaggaaagtaatttttttcccatcaataaaactatgaatttcagggaaaatatgcctcaaacatactgttcgtaaatcatataaaactgaagtatgggaaaataacattcatgcaatcatgaaaatgaagaggatcattcaactgaacagtatggaaaattagaagcagcagagtttaagaagttataaggaatgcagaattacctttttggcttcggaagctctcaagaagagaagcaactgcttggctgataacattatacacgcgtacttgacaggacacagtactatgaaacacatgctggcattgtattgtctgccaaggaagacagcatggaagaacacttccttgaagatgttccaatgctcttgcagcctctcgatgaagacttccatcaaaagtaatagtggctctcatcaccgaatcattctcctctggagttaacacctcaacacggaaattttgggcaggaaaaattttctttggcatgaaggaagaaatttctctatttagtgcttctgcacacaaggaagcagaaggggcagctatgggtgttcccctgagcaaatgcacatcaacgattttccttgttgtcgtgctacgaaaggcatcatacaattctggctctgttacatgcattggaattcctctgacaaaaatgcaattctcatgtcttgtactaacctcacagttgatataccttccaccaactcccagagcaaagcagtcctttacaacaaattcagcttccccactggcacatgttaccagcgcgagtccccgactttgcttaagtggccaagatactttagctctcactgctggaaatggtaatcctcgattactggaagagcatactggaaccactttcaatggagaaccatgaaattccatcccattcaattttgaaacagcatcttcagcatattcaggattgaggaatgtaaacttcccccacttcgtttcatctgaggccacctgaagatttccataaagtttataaaaattagcaacaccagagataagagtatccaccaagcaaataagctccttgtcattcaactcatgagcattttgatgcaaaacctctacggtcagatacctcttctcaagttccaaatgctttatttcagcaccagaaccaaatagggcaagagaacaatcaccaggttttccagaaaacaaacttttctcaaggcattcattcctcaacatccgagcttcacactccaatgcatcattaacgatgccaaacaccttttctatgtcttgttctttggcaaatagcacaacctctttatttctgaagtcaacttcaacagtcacacggtcatccctgaattcttcttggagaagtgagattatcttctgctgattttggccagattttccacaaaattttctcagcaagttatatccaagtccacttattaccttcacctgcaatttaagcttctccagttgctgaatcaaaggcatggggtgaatcgaacacaaagcatcaggatcaatagcagttacacataccaaatattgatttggtactgacaagatttctgtgaacaccacccactcaggcttgctatcataaatgagcaatgagcaagagggatgtagtttcacagcctgatccgttgaaatcacctggtaaccaaacctttcatgtccagaaaacatagcaatattaccagaaagagatgtgagaataattctttttagcaacttatcatgcacggtggactcctcagggttccaacaccagtaacttgggacaatgatgttcagctcgtgtcttaaacaattctcaaggtctgatattgtttcctggcacctcctcatggtcttggcattgatgctattctgccagcaccacgtattcctgttttcatgctcatcctcccactctttatatacagctagtaaagtgaacagatctccatcctgatgacagaatgggacctttagacggtcagctttgtatttctcctcatctgtgcccactctacaaaatatgctgctagaatttgccataacagcagctagaactacaccttccttcctcaaaccaaaaccaaagcaatcaagcatgattttcccaagcctcggctcgattcccaatttaactaggtagcgaccagtatcagtcagctcaaaaccatcacatttatattttacagcacccagttgttcaagattctttacagccatattaatagcttctgggtttggggcatcaacaaattcaaaattctgtgcatccctaatacccagcgcaagtattctcagaacagcagtgccaagatgaactttgcggatttcaggttcttgatgcacttccatcatactgaagtcagattcagagtaaagcctgtaacacctccccgctccagttcgacctgctcggccagcacgctgattagcagaactttgggagatccaattaactttcagtacattgagaccactgctaggcacaaatctgctctccttagccagtccagaatcaacaacatacttcacttcttttatggtcaatgatgtttcagcaatatttgtgcagaagattatttttctcttcccaggatagctcttgaaaactagactttgctctacatgggaaagctttccatgcatcggaagtaccacagcatctgcatcgctgaagttttcacatgcccattcaacttcgagttgagaagtcaagaaagcaaggatagcaccctcttcttcattcttgtgaatgatgcttaccattttcacaacatcgtaaacatatgaagcagtagcacaagaaccgcgcagatggtttggcacggtattgaaggaagcctcttctgatatatcagggacatatttaatttcaacaggaaaacttcgccctttaacataaaatgtttggcatccataaaaatattcagcgagtctattagcatcggcagtagcagacattatgataagtctcaaatccagcctatcaagcagtttcttcttaatcaaagctaagagaagatcggtgttcaagcttcgttcatgcgcttcatcaacaataatatatgaaatgccatctagtcccatatcattcatacagtgatgcaaaaggcagttgtctgtggtatatataatctttgaactgaaatcttgatgatctaaaaaggttgaattcaacacaaagttgtccccgtagcaaccattgctttcttcaactactctatgtgccaatgatatagcagcaatttttcggggttgagtacagacaattgaaccattagcagcaagacctgagtcagcaagatactgaaccaattgtgtgctcttcccagaaccagtttccccaatcaaaatcatcacctatggaaaacaaagctatacgacttaaagaattatttacaaatttaattgaatgactgatagtaaatacagaaaggtatgggtgcaacacaatatgtattagagaatgatttacaaatttaattgaatgactgatagtaaatacagaaaggtatgggtgcaacacaatatgtactggaaaacttggacatgctacataatcaagactcctgtgcctcatgagcaaaattgcatcttatttataggttttgcctataagcatagaatattctgccaaccaaaattcataagaaaaatgcggcatgctgatttagaatgcaagagaacctattcaaaacttcaaacagagttggaacttgatggcgcattgtatgtgaaaacatgcacaaaactaaattcctaactcaactctttcttccagagttccaagcataacagtaaagatctaatggttctttctgcattgcaaacttccaaattccaacccactacagataaaactgcattgagaagtctggctctcacctggttagcgaaaatgtgatctagaatgttcctgcggtaagcatagatgggtagcccctccttaagccttctacattcccgcagcattatcatgtgcagcctagcgaaattcatctcaccacctcccccaatcccaaacacctccaacccttcctcctctgcctcctcgtcatcctccgtcccacgcaacaatgcacgccgtatcgatctcatcgcggctttgtactcatcgattttagcatctaccaactccttctcagccttgagagttctcttctgggcctggagctgctcgaagtcgcggatgcgattgtgccccgccaggcggcgcttcaccgcctggatggaggccgcgagctcggaggagcgggcggccgtgagggagacgaggtcggagtcgacgaggcgggcggcgtgggcggcgaagagggaggcgatgaggggggcggcgtgcgcggcgagggcgggatcggagacgtccggggtgaggaggtggaggccctcgaggcggagcgaccagagctcgcgcgcggcggcggcggcggcctgcggggagcggaacgcgaggcgcgcggcctggcggcccgacgaggagacgctcaggctgtccgggggaggggagggcaggccggcgacgagtgcctcgacctccgtggccggcggcgccgagaggttgctccccccgcggaggaggatcacggcgaactgccgcggccccggctgcgcggggcgataccgctgctggtactggtactggttctggtggtggtggtggtagcggtgcggcggcgggccccagtccggcgggcggaaggggcggccatcgttggatcggcgcatggcggcggcggcggaggcggcgaggttgggtttccgagggtttggggggaggttttggagaggggaggaggcggtggggtgggaatcgacgggaggagaggagggaaaggtggggggagaggcggacgagacgaaggcctttttctcgcggttttatgatttccgtttccgtttcttttacggttcttttttttttcagatagcgtccgtttcagtggggatgatggacgcgtgaacggatgaacggacggctgtggatgatgcgatagggcaagtattatgaacatccaagcacaagtcccaagatatcacataggactaaatgataaggtggaggagagaaaaaagatgagagataaatagccatctctcatgcaaggggcaatctctacataaacttcaataaacatgtaaaagtgttagaaatattggagattgtgtgatagagataacctataatatatgttacctcttaatttaatggtgtatgtcatgaaattagatgtggtagtcacctctactatgaaacttgcccttagaggctaggctacttactagatattttttttaagaaaaggttttactctttctagattgattatatagtgcctcatctattttagattataagtcgttttgactttagttaaaatcaaactgcttcaagtttgatcaagtttgtagattaagtttgattttgaccaaaatcaaaatgacttgtaatctgaaacagaaatagagcttaatgctcacttcccattttacattttttttagaaaataaacgaataaagggtttacacatcaaattataatgctataatataagaatggataataaggtctattgatagagttttttaattagttagaattgcatattcccgctctgtgttttaaagatatgttgtttacttttggacatgacgtttgatgtccatcctattaaaatttattacaaataaaaaatcatactaaagaaagtgttgtaataataataaaacaagtataagattagtattttcatagtttttaataaaagcagatagttaaacgttgatgtccaaaagttaatagcattatatatagaaaaacggagataatgttatttttggcgtagctattagctaatatgaacttctacatacgtccaaacatagcattaattattagttcggtcatacatcgaactcctgttcaattttattctcccgtatctagtttccatgttttttttctgagcttagacagttagacggcgggcaacatagctctaattaaaggatttgtttttagcacgatcacttacgatcatttgcacgtgcattgtttgttgcaaacgtcctatttcatgatttatttcccatatccttactcgagtttggcctaaactaaatcactaattgcaatttagctcactaagaaatatttgcacgacgttattcccaattttccaatgtttcgaagctttttcgcccgtcaccatcggaatttcgtggctggtagctttgttctggttggcactaccaccaagcagtgcattggctaccaagtgggtgcctctttgccaatccagtgtaagcacactaccaatgatcacatagtggttgacgctgcaacaaccattttcgtgcaaagcacatttacttcactagcttgctttcctgcctggttgagccaggcaatccatcttatccaaccttttggccttttgctttgctttgccgatgcactgcacagggccatctcaggcttcagtgctggttaaagcagccacacactgacatttctagtggtgcagctgagtcattatgagtcatgactgcagtaaaaaaaatgtgtaggcaacagctccagggtttcagctgaactgaagccaaactgccaaagatgtgaagctaaggtggtgaatcatgagagcttccaatccatgtttttccaaactttcctatgcaaccaacacaatcatatcatatgaacattgcacggtgggacagcaagctgggtacattccattgttccaaaggtgaattatttgaacaattccgtaacaactgtgttacctaaatacagaagcgccttcttcgacttagaaccagtcaggacttttatttgtaagaactgttcaatagaaacaagtgactgacagcatcagctcttggttattttgtccggttattcatgaaagattggttgggaatttgtgggatgatagcatgggtttttctttgttatggcctacaagggtccagggaatgtgccattctcacgttgttcgttccaacgctcaatctgcacaaaagataaaacacactgtgtcatcaaggagggtctctgaaaacagtgacgctttactagagcaatggtttatggctaaagcatcatagaagcaaataatattggaaacatagagttttaggcttatataaggtgacaattgaattactagagaggcatactgtagattataatggaaatctcagataaaaaaactgataggcatgtcagtgaagaaagtgtaacagaaacttcatacgccataggaatacctagatcatcataacaaagcaagccacagaagtattactgaaaaaatcgatataagaaatgcatacccattcacttgggcaaagtgatcgataatattttgcaaatttttcacactcaggagcaccctctccttttgcagctacacacctgttatatgagcatgctcaaagtaaatagtttaattaacaccaaggtttcaggtatgaggaatctgaaactgaaagatctcgatcatattcatacctatgatattcaatatagcgtgtgaagcaatgccttgtttgatttgttgttgggaaacgaaaatcagcgggagccgtctcaatctgtatattatatatggtcagtactcaatactgaacaacaaatgtgattgcttttccaatgataggtggtattgtattgtaccttaatttctggcttctcatcaattgtttcctcttcagcctcattgctttcctctgtagcagcattgctcccctcttcttctggcttctcagaggatgctgtcatctcgggagtttcacttttgtcctcaacaacagaagtggtgtcctgagctgctggtgtttcagcatctttctcaggaacaacttcagccacactgttatcagaagatttttcagaggatgaattttccacagggacctcgtggggtgggagtgtgtgttcctaaaaaataagatggagttcaatattgtttatcaaccatggaatatcaattacagaaggaacagcaacacacagaagatagttgggctcaagtgcgcgtctacattaatgcaagtgtcaaattgttgctacccacgggatactcagggtaacagtgttctaggcttaattttggtaatattttttcacagatatcatccaccgaaattttgaggaataattgtgcattgtccagggcctccatatcctttattacagtacttagattactttttcttttttgtgaggacagtgcctagattacaattggactatgcagcggactcatacaagattatgggttcagtctcaatatatcctaattgtaactcttccaactttgaggctacacacctaagtacgcaaatgctcaacaaaaacataaaaatagaaaatatgaattatcctttgaatgacattttgtactacctccgccccactggaaataaagtctttttggcacggaagtagtacatttagcatcatatcagctttatcataaactcctaatacatgcaaaagcatataattttataagctgaatgtttattacttaattcagacaaaataaagggggttaacttcaatcgcattgctcatgcataatttgattaaggcaatatcatacggctacacggtaagtttgtgagcacggaatgatggccaccacatctttgaagctctgtacgcgtctgtgcagcaccaaagttacacggtagacaactagtcaacgatttggacaaggcaatcgaaggggaaaaaaagagatttactgacggcgacagtagctaacgcctaacagcagtcgcaactgagccaattcagaagacggaacgagttaattcctccactcaacccaactaatgccctgtttagttacaggagtgaaaagttttgacatgtcacatcggatatacggacacacatttgaagtattaaacatagtctaataacaaaacaaattacagattccgcctgtaaactgcgagacgaatttattaagcctaactaattcgtcattagcaaatgtttactgtagcaatacatggtcagcaattaggcttaaaagattcgtctcacaatttacacgcaatttgtgtaattagtttttttttctatatttaatactctatgtatgtgtctaaacattcgatgtgacatggtgaaaagattttacgtgggaactaattaacagggactaaacatgcacacatgcatccaagagaaatcccaccgctccaaacctactcgcacgaagagaaatcccgccactccgaacgcgcgaaccaatccactacgcgatcacagattgctgggatctgagcgcgcgcgcgtgcgccgccgccgcaccagtccaccggagcaggccgccgcccgcgcacgcgcgcgtaaccacacctcgagaggcaaactagcaaggcaccaaaatctgggaagcgggaagcgatagggatacgggattcccatacctcggcggcgagcgtcggggccttgccttctcccgccgccatgggcgcctcgcgagagagcttccggaagcgagctgagccccgtggaaagagagagaagcgtacgcgtctccgaagtccgaggcttcgagctgtgtcgttcgagaaggtaaaagaagagcggcatttgtgggttttgggccgcgctacgacaaattagttcactggaggcccagagagttggctttgcacttggacttgaactgacgccttctctttcgcaacaagtctaatggaataagttcatctaaggtcccttaacttgtcaacgaatccgatttccatccttcaaccgcaaaaccagatacaacgggtccctcggcggttttgatgccggttttggctgacgtgacgcctacgtggctaatttgacttggtctcgatctgacgtggcactaatgtggtgcttacgtggcaatttgatccgaaaaaataataaacctcgtgagacccacttgtcagtttcacacagaaattaataaaaaatggtggggcccacgtgggccccatgtatcattcccacccctcttcttcctgtcctctccccccatctcccatctcttcaactctctctcacatctcttctcctgcgacggtggcacgggcgattcgggacggcagcgggtctagtagtcctccggtgccagcggctagtgcgcgccgccgtgcggggtggcgtcggcggacgggatgacgaggtactcgtagagaagcccggcgaggccggcaccgatgaaggggccgagccagtacacccagtggtgcctccagtgccagccgacgagcgctgtgccaaacaccctcgccaggttcatcccggtgccgtcgaacggccctccggcgagcatgtgtcaagagatgttgcattaacagatagcattgtcaaatacatgcttgataacacaggcaattagcagagaatgtactagtgttagactgataaatgaggatgtatacctcccggaagtcagagacgtcgtcgtcggggttcaggtacctcgtggaatttgtcctcgttgccggagtagtcgaccacggtgtcggaggcggagtcctgcgtggagacgaagctctgggcggcgaccatggcgatgtccccctcctcctcctcgccctccctggacagcggccgcggcgacgccttgacgggggcgagcaggtggtcatagtcgacattggacagcgcgcctcgctcgcctgcttcgccgcccacccgtgccgtccgccgcccggaaagaagagagaggggagaggggaaaggaagaataggagtgaggatgaagaagagagaagggagagggaggctgacatgtgggccccaccattttttattaatttctgtgtgaaactgacatgtgggtcccatgaggtttattatttttcagatgaattgccacgtaagcgccacgtcagtgccacgtcagattgagactaagtcaaattagccacgtaggcgctacgtcagccaaaaccgctgtcaaaaccgccgagggacctaatctgtacccgtttttatagttgaggattcgttgtatctggttttgtggttgaaggacgaaaatcggattcgttgacaagttaagggaccttagatgaacttattccaagtctgattgcttccgcccaaagtctctttttagcacttatacatagaaatctaaatcaatcatgaatgttctagttttcaccgttttcatattataagatgttttgatcttttttaagttaatttatttaattattttgcgaacacgtaaaaggattacacgtcaatatattaacaggaaaagagtttttgttacacaaagcaatcagccagactggcttatgtctaaaggggggacttgaagctatgaactactacgacggttaaaaacgcaactccaaacagcgggagggggcagagccacgctacactcccaagaaatcccaaaaaaagtaacaccggctaaagaccacagctggccctccgagcggatggactctagaaccactgcaaccgaagcgagcgcagagtcgaaaaccctggagtttcgttccttaatttatttaattatgataaatttatagataaacgtagtaattttgaatttaatgaaaataatttagtgtgatagatgtgtcgctatggtatatctgcaccagggtttttgcttctatagaagaaaaatcagcagggctgaattattttcgtatacggtctaagtgaaaaaaaaatcagaattatttaatcaaggacatacaccgtcgctaactcgctgtcaaccgcattttttatgcagaacagagaacagacaaagccttcagaaagacacgacggacagtttgagttaacagcgaggctcaactgtttcccagggtatcagcggttaatcggttattagcgacaggacgacgatgccgcgatcactcgccgttgtcgatcaccttggcgccgtccatccagatgatgcagcggatgctcttcccctgcgtgagcagctcgaacgccctgttgatctcctcgaaccccatctcgtgcgtgatgaactcctccagctccagctcctgcagatgcaagcatacacacaccggttaattaatcagacacaaaagatatgtagtattttcgttttaaaatatactccctccgttgtaggttataaatcgttttgactttactcaaaatcaaactactttaaatttaatcaaatttatagaaaaaaacatttttaatccaaggcaaacgtattataaaaatatattaaagtattgatttaataaaactaatctggtgttgtaaatattactatatttatctacaaactttatcagacttaaaatagtttgattttgaaccatagtaaacttataatttaaaattagggagtatattttagcatgaaaggagtaatatgaaccaaacaaattaattaaaatcccgttagatcgatcgatgtggatcaccttgtccaggtacttctgagccagcatcgggatgtcgttcttgggcttgatgccgccgaagagcgacccgatgaccgatcttccccggaggatctcgtgcgacgggatgctgatcggcgccttgttgccggagacgccgagcaggatcgtcttcccccacccctggaataacgtgaaattccgatcagcttgctgctgctcttagggcctgtttggggaggtttaaactctgagaagcagttatttggtagacagtttctgagaatctgaaaaagttttgaaaaagttttgaaacccagtttctccagcttctaacttattagttcattttttaaaatctgtaactacagattctcagaaactgtggactgtttgtggcagtttctagcagaagcagtttatgagaaaaactgcagctgacacaaagctccccaaacagagccttggtatctagtctctactgcacaagcagagcaagtagctcgtacatttcgagtgctttggaaggcttccgccatgaccgaagtcgagccgatgcactcgaagcagtagtcggcgccgccgcccccggtcatctccttgatgacctcgctcacggtcttcccgccggtatcgttcgggttgatgaagtcggtcatgcccagcctcttacctgcaacgcaatgagacgagttagccagataggagaatgattctaaactctcttagggaatattcgttcattatttgtatataccacattcaatgattataaaaaaattcagcaagattaatgcacgatacattacttcgcagacatgcacaatttgctcttttgttgtaattcatagaagtggaattttaactcacatatttatgtagtgatatattatatattaataaattatttttataactatttgaatgacatgctagaaaaaaatatcatctcgaaaatttaaaatcatttcccgacgtacttaaccacccaaaccaaggtaccgtttcatttgtgtgatttaaatattaaacagttcaaattttcgtatgaattaggcaacataaattcttcgcattccagacgggactgaattcaaacaccgcttcgagcttaattatcacgaacataccaacgtcgaatttgtccgggttcaggtccaccccaataatcctcttagccccacgcatcctcgccccttgagcaacctgcagcatgcagtagccagcacacagtcgtacattaggtcattagctcgatgagacgtcgacattgcattaaaattagatcagcacagagacgatcgatctactatgaccgtatttagttcactccaactgccctcaacttttaacttttcattacatcgtatttcaacttttcatcatatcacattacatccaaaacgttgctacacatataaacttttaactttttttaaaaacttttaattttttttagaactaaaacacaggctatgcatcagctgcagttgggcaccggcaactctggtccaagccaaacacgaacactaacttctcagtttggtggtctatatcagagttaagcactgtcgttaattaccgctaacccaacggcacccaggccgaacacggcgacactcgagccgggctccactgctgccaccttccatgccgcaccaacacctgcacgcaccaatcaaagtcgcagtcagaaatcgatccgataacacacgactgcgtgtactgcgccaatgggagccatgcatccgctactgtagcggcagagaccacatgccaaacaactgcagttaaggctgagttcaagtaggagcacacatcttgctccgcgtcttctagagctagccaaacagttttagtttcacctaaaatagcagtgtagttggatagaacgttgttataaaataaattagtgaggtggagctgggtttaggtccacccctatagttcaatttttttgagagagctcaatccagctccactcccattttaagtggagctgaaactgtttggctgagcttcagctctagctccagaagagatggagatagagctggagctgtgctaaaccgatcctcactccagactcaactcacgtagctaaaattaggagttgaaactttgccaaacagaccctacgtatattggcttggccttatacacaacgaaaacaagttgttagtgtatgattaaattgagaattaactattctaaatttgaaaattatttttgttttttaaaacttctgtagagaaaatatttcataaaatatatcatttagcagtttggaaagtcctctcgaaataagaaagttgttgttttgaaccgatgaatagaactcaactataaaatacttgaggcagaaaccactttaaagtttgtgtttttttcttcttctgtttttaccggtggaaatgccacaactgaggaggcatgccatcgccggtgggaatccaacatcgagcttgacaatgtgggtgatgtcaacgacggtgtactcggcgaagctggagacggagaggaagtggcggatgggctcgccggtggagacggaggagaagcgcgtcgtgcggtcgcgaggcatgaggccggcgacgttgggcagtttggagcagaggttgctgcggtcggagaggcagtcagggcactcactgcactgcgcggcgaacaccggcaccaccatgtcacccaccgccacctcctgcacgtgctcccccacgctctccaccacactggagaaaataaatgtatgataaaattatggcacacggttgagctacagctaacaattaacaagtattagaaaaaaaacacgaataatggacggttttttatatagaaaatatctctatttgtaattatttgaaagtcaaaggtagtaaatagagtatgatgaaaaaataatataaaatcagcttatataagtttcaaaactcaagttgtatttgattgtgaccgataaacca

SEQ ID NO: 25894 - DNA, 5410 bp, Oryza sativa
acacatatacactcctatcttaaaaaaaaccttcaaaaacaagagacaagagagaaacttgctagaaggaaagagataaggaataaaccggtaaaataacccataaagtaattttctctaaatcatatagttgggatgagtaactttatgtgtaacacattgcggataaatggactcagacagcgattgagatctgcaccacaactcatcccaactcttagaactcctcaataggtgattccagaagtctgatcatagctgctagtacgagcctaaatcaaactctctttttttacggttttaaaaaaaaacttttttatatcaatttgtggatactccatagtcagacgatttctccatcaagcgttgctgattagtagttactcactccattctaaactgatctacatataatttttttaattattcctaaataatctacatatttgtgttcatttattaagtctattcgttatttgtgcattggagtaaatggacattgatacatgcatacatgcacacaagtatttataacccacatgtaatatcttgatttgctattggctagaaaatagtgggaatcgtgcatgcattgagtttgatgctagagtaaatatagtatgagagagttattagcttttcttggtcttggtgtacctatgaaatatgtaaatcaatttggaatggatgtagtatactccctccgtactcgtaaaggaagtcgtttagaatagcgacacggtctccaaaacacaactttgacttcttgtttctataaaaatatttattaaaaaatgatatatgtatacttttatgaaagtatttttaagacaaatctattcatataatttttatagagtaaattgcatcaatggtacacgaacttgtcaggtgggtgcaatctagtatataaacttgtaaaacgctcattttgatgcatgaacttgtttgatgcgtgtgaacaaggtcaaaatcgcacggcaaggttaatcttactaattttgttattgatttaaactctatgtaaacatgtgtctaagaaagataaacatataataaggcgtaatgatcgcataacaaaaataatgcaagtagtaatgcaaggataaacacaaagaaagataaagtgaaaactaagtttgcaaatataactttttctactatgtgcacggacgttatctattaatttataatttataatgttcaacatagaaaattcagtctagtcatgtcattttagccttagcttgcacgtaccaaataagttcatgtaccaaaacaagcattttacaagttcatgtattagattgcacccacctgacaagttcgtgtaccgctgatgcattttactctataatattttcaaactcaacaacttgagagttattcatgatttagggcctgttcactttgatgctaaaaaaaccttaccaaattttggcattgccaaaattttagtatagttgccaaaattttgtcaacttgctaaaattttggcaagatttcttatatagttaccaaaaattggcagcaaactaaatgtagccacttttttgcaacttttactaaaatttggtaaggttgaaaatggcatcaaagtgaacatgcccttatattcccaaggtttgacttaaacattgtcctaaacgaatttctttacgagtacgaagggagtatataattgtgatactcctatctaatatctacgctcacctagccacctcaacatgcagctgtgtccgttaattgattgctgcattgataggatgttagaggatcaaacttagtggtttgtcacactaagggcacccgcaatagttatctataggctctctacaagagatccatatcagcatatttttctacttggaagagattaaatgaagagagagagcaaagctatctactaacctggagatagtctatagagaaaaacaaggcaatgcattagagagctatagatacccatgtagacgtactattgaagtggtttactattaatctagtctattactgagatgtacatattttataaatagcacattactttactattgcaggtgctctaataactatcacatggttttcggacggcgggctgggcatcgacatccacacattttatctcagctttacgcgcaggagccggaaatcgtcaatcacccgttgctggattgtcttttcgttgttcggggcttagtttttcgcctcactgtaaaatcctctgtgatcgctacgacaagtcatcgttatgtttaatgcttttctaatatattgacctgcaaaacttttacgcctcggaaaaaaattatactgtctttcctggtcaggaaggacgtactcctaaattaaattactatagagacctgactacgattaggtaaaggctaattagatgattagttcacccaaaacttggcaggcaaaagatagagaataaaatgcttagtacggtcaccatttttctaagccaccttatctacgccaatgcgacgactatccctaatgtcagctggaatatctcataaggacacgccaggtagaggttgttgacaatgattattgcaacacaagctttggatgcaaccttcccctacgtccatggattaattcacgattcatatcttcttttgaatggtttattcctgaaatttttcacggtcctaccatgttcaaaaacaatgtcattccttagctgttgatgctgtgtgttcattaccacgctactgatctgaggctcaaagtcatcttaacaccgacgcaggatcaaactcatcaggaagagcacaaaacagtacaaaaggcgaataatactagtacatacgtgcagtggatcggatcagagagtatgttcagaatcagaagcgtggaatgtctctatgtttataagagctatatagtttaatttgtttgattacgtacccgactgcttcatggccaaagatagacggatgattgccttcctacaaatgagaagagagctatgagcctatgagtataacctcatcatagagaagcaaaatagttcttggttgctctcaattctagacggatcacatctgaatttaaatacgcaataacctgaatttaagggagaaagaactgaagaattcatggttaccatacgccagaaggtgatgtccgtgtggcagatggatgtgcagaggatcttgatccggacctcgtgcgcccgcggcggcgccacctccacctcctccatctccagcggctgcccggccaccctgctcaccgccgctgcacgccgccgtcgacggcacagaacgtctcgtcagagaatcagccaacgacgccattgcaaaactcgatctcagatgctagctcacctctgcacctgatggactttgcagcagcagtgttcatctgctccatttccaggaagctagcctctcccctctatccttgttggtgtttggctgctactccaacttcgtggttgtcttatttaaagatcgcgttggaagctggaaaacgaaaggcaggcagcttcagctgtatatcacgctatgatatactcgtatatcttctgaaagcgagtggtcgtgaaaggggagcaggtgaaaggggatcaggttttatcgtcgtcgttttttggactttgttgtgtgttgggtacgtacggtgatcggctacgtgcctccctgttcgtcaccgctcatgtacatatgcactcatgtgactcatcgtgttcacgcattacatcatccaaacgcatggcccgtctggtactacagaaattaactgggctggaggctagccatcagggagtggaatccaagaaatgtttccttcagattttgtgaacaagaacatttggtaatgttgatgttgagggaaggttgtgacttgtgagggtggcgaagtgggagttgtggcgtcagccaattaggccattcccaacccaatgactataatagtgtctatagtattaaataagctgtcacctagaatgaaaaatgatgtggcaagtgaataaatgaggaaagagaaggagaccatgtcttgcatgagacatggtttctacacaatatccaagacatcgtgtgaaataagtagcattaaatttaagtatagaatattgatgtttgtataggaatagtagtgtctagtactagttttttttagtaatgtggagtttatagaaactatgtgtatattttggggaatggccttagacaaggcttagcagcgataaggcatgatgtgtcgactgatcgtcacctgtagcagtcttgaggtatcttctcttgtagtgtttttttatcatatagtaggagtagtagcgtgcctttcttctggtgttcaggtgttggcgtcttcaggccggccgtccatcagtcgttgtcaccttgtcttgtcttttgtcttccccttgaggttcactctatctgttcactccttgaaatgattggatgtgtctttctaaacaaatcatcataagttgagtacatgagttacaattaggcccattaagcttggtgaaaaattttcaccgtaggaataaattcacgggaggtccttaacttaacagcgagattttttaaggtatgttaaccacaaaccagaaatgtgtacccctaaactcacacaaactaagcacacaaggttctatagcagtatagatggacggtttcgctaacgtggcatcctaatcagcaaaacaaaaaattaaaaaactgcgggacccacatgtaagtgagaaaaaaagggacccacatctcctcattcttctcttttcttcgttcttctctcatggtcccgacgaaatgaggcacgccgccgccatctcccgcggtcgcggcggcggacggcgggagcatgcgcgcgggcgacgacgtgggcacaggtacggccaccgccgcggcagcggactggagcgagcgggcgatgacgttggagtcacgcggagaacagcggagaaggcgagtgaggcgggcggcgaccttgctcccgttcgcgtgaggcgtcggcgtcaccttcatcctccgcagcgatttccccgacgagctagcggaagaaccgggtcggcgggcaggcggcgtcgaggctaagcgtcaagcatggctccgatggagcggcacgtctcggtgggcgggtggagcaggaggggcggagcggcggctggcaaaggaggagccaatcggccacaccgcagtcatgctcttccacgcgcccgccgctgtccatcgtcgcttcgcccgccgccccccatcatcgctctgccggcatcccggcgccgctccgcccgccgtgctcgcccaccgccgctccgctgccgcacgggcctctgccgctcccgagggcggaggcagctggatccgtgcgccggcggaggcagtcgcccacgagctcgtccaccgcgagggtccgtggaggcgccgttcttcattgc

SEQ ID NO: 25895 - DNA, 4032 bp, Oryza sativa
gcaaccgcgacggcccacccacaagccagtgttcgccgggggctccccatttggtggcttcagcggcgacggcgctgctctccgaaactgctgccacactggtcgagtccgccgccgccgcccgcatctgcccgccggcctccctcagtgaagatgagaagagagaagaggagaaagaaaatataatgtgcagctgacatgtgggccccacatattcctttttattttttttgctgactagatgccacgtcagcgaaaccacccatctatttgtgtgcacggtttgtgtgagtttatggatacatatttctggtagttaagggacctaaaaaatttcgctataagttgagggacctccggtgaacttattcctttcaccgtataggtcccatggcccatgtgttcatcttacatgggctaggctttatactttcctgtccaatgtgaggcggcattttaattcagagcaagtccactttacgttcctcatattcgtatcgagtttaaacagtatcgttaaatctcaataccgaaattcttaataccacaaagatgcaaaactggataaattagatacacggcagtacggatgattggtttcgttgacatggtatcgtagttagtaaaaaaagttttaaaaaaatacgaagcctacattgtaagtgatcatcttaccttctttctttacttcctctctcctcccttcaatccctcgtctcatccatggtacgaactacaggaaccaagatcaatctgcacatacaccaacccgctaattgccagcacgcaacgtagaaaagcattgagcaatcaacgagataattactgcaccgaacacatagattgaatgcatcagacgaaccgaaaccaccaagagacacgtaacaaaacggataggcctcctgtacacgatcgaatcgggagaagaaatcacctgggacgcggccgtcgacagaagactgaactcgggaagacggcaccaaagacatgatcgattcaagagacgggacaaacctggggacgcgaccgtcgtccctcggcgccggcagcagatcaaacacgaggagaatggacagcgccgtggaacgccttgggcgctccggactcgggagcatggttcacagttccgacgaaaaccgatcaaattccacaaaatttcgttaaagccgaccggtttacgcaagcttatcggtaaactcagagaatttgtattcaatttttggtttatgaaatttgttcggaatctattgacttttcactggatttcgtgaaaacaatcattatattagagcccgaaacgaaaggtcacatcggaatcgtaaaccctcctcgggaggcggcatggggtaggagagatggcgtgcacgcgggtggctgccagcacacggggatgtgcctgcgtccaacacggtggagcacacgccgaggcggcacaggagtgatcgccgtggctaggccggattgagatccccacgatgacgatctcctctttcctttggataagagaggaataaggtgaagtgatcacttagatatggattccatatgtttttttttaaagtttctctttaccggctaggatactacgtcagcaaatcaatcatccataatataatgggatctaatttaggccaattttgcaagttagggtgccaagattttcggtattgcaattcagatatgcaatttaaaatttatgaactcgacacaaagttgagggatgtaagtatttgcgattgttgggctgttcacgggttctgttttgaagtcgaagtccatatttgcgattgaacctgggctggatggcgccgtgacttgggccatacgggactatgttttggaagaagcacacgtagcatagaattgagcaccgcagtgacacacacggacacacctagtacatgcttttgtaacactcttacaatagacaaaattcagaaataaatcattaaacctaaaaaagttgtatgaatcatacacatgcctatgcaagtacccgtaccaaaatttcaaggcaaacacttccactcactccaggttgataatacttatcgttttagataagggcacggttttcaagaaacaactttgaccattatttcttattataatatatatataaatgttaacgatatatgattttagtgaagtacttagtatttttgaagactaatctgtgcatataatcaccatatttcaaaaagacaaatattttataaattattcacaacgaaaaattttaatgttttatcttacccttgtttaaaaggataagagtattatcagcttggagagagtagctacgaacctataaacttatcccggaataaaaatgtccccaatatcatcatatccggatatcccctgtattagaccacggtctatcatcattcattttccgaagaaaaaatatccaacgttccgacccaccaccaccaccaagcatgcaccggccaatcgtacgtacccggtccgccgtcctccgccactttcctccgccgcccgcctttcccatccccaccaaaaacacggtttccccttttccccttccgctgccgacgtccgtagaaacaaacggcagctaaccactgcactattcctctcatcacctcgtttcgttggtttggaaagacacactgccctgcactgcactgcgaggcgccgcgaccgcgaccgcgactgcgaccccgaactttcttttcgttatcccgcgcgcggcgcgctgccggtagactagaccagtggttggttggttggctggccgctcgatcgatcgggcgtgcgtgcgtcaaatgcaaacgcgagattgcgttgcggagccctgcgcgggacggccgggacgtcggttcgcgagtcgctttctctcatctcttttcgcggcgcgttcgcctagcgatcgacctgagctagccgcgcgcgcatgcacggtctctgccaccggccgtcgtccttgccttcttggtttcgaatacaggataaggataggcatgcgtgccatgcggggtaaaacttaaaatgcgagccgtactaggtgagaaaacttcggtgtcacacgtacgcttggcacgcatgcagtaccggtccggccgggatattttggaacacgtcacacacggtcatggttggcgatgctgacacacggccatcggtcggttcaggttcatgtgttgcctggaggacgtatgtatgcgtccctttcgtccccagttaatttccacgttatttttcacgtacgctggccggccggttcaaacttttactggagtacgttgcgaattgccgcgttgacgcagcgtatacgtaagtgtatgtagctggcgctcgacgggtcggacggtgccactgccatgcaaggcaaatccgtcgctgtttttctcatttttttactgtcatcaacccaagccatgtacagcccactggtagagaaaccatctttggtcggtcgaccaaattccacaatagtcccggttgcaataaaaaccgggagtaaagatcatctttagtcccggttaaaatttttttgatctttagtcccggtttaaagaagttggtgggtagggtcaggctccaattatctttagtcccggttggtataaacaaccgggactaaagatctatttttacttccggttgtttataccaaccgggaccaaaatagactgccgagcggcgtgccccaattatctccttgcggtgacccctctccttttttttctctcctctttaagtctctcggtatccgcctccagcgcctgcctgcgatatgccccttcctcccctggcccttccccttcctccttcccctctctgctcccccttcctatccccgcctcctcctcctccttcccctctctgctgcggccgggcggcggcgaaagagcgaggcagctgcgcggcggcggctggtggggccgcggttgtgcggcggcggcggcggagcgaggcggccgcacggcaggcagccgtgcggcggcagcggagcgaggcggccgtgggcggcggtgggtggggctgcggccgtcggcggccgcg

SEQ ID NO: 25896 - DNA, 34777 bp, Oryza sativa
ctctctttggtctcggttggtgttaccaaccgggactaaagatcccctctctttagtcccggttggtaacagatcgatctttagtcccgggtatttgaaccgggactaaagataacgatctttagttccagattagtagtcccggtttgaaaaccgggactacagggggttacgaaccgggactaaaaagcaattctccaccggtggccggacgctctcacggcaaggcaacacgtacgtacgcacgacgccacggcgtcgagagggcggggggggggggggggggaactcgtggattctccaccggtgacgccgacctttgctgctcgcgcaaacgcacgatggatcgatcgaaacacgactggttcaacgagaccatcacgtcaccgatcactaccagcagcaacggccggtttgccctttgcagacggagaaatttaaagaccatgtggcgattgagagcgagacaaatctacgccagtttctcgcctcctcaccccgtccctgtctctgcgtataatatcgtactagataattaaagagacaattttacgccatttttttttctttagtgtcctctctctatctatgcctttgtctctgcgtagataattaaagagggaaatgagaaaaatagagaaaggacgtgcacacagaggaggccttttgtttgatgctacctgaacgtgatgagaacgtccgtgggcctctggcttaacgtatgatagccggtgcagcaagctgaaacgaagggctggtttggtttgaggtctaaattagggttattaacatttgacaattttaatagtgtttagtgtctatttggtttaaagccaaattttgacatatcaaaaaaacagaccattttaatagtgaacttaggctattttggcttcaatccaaacacaattttgttttaccaaaattagtcatgataaacttaccagaatttagcattgataaaatttagtaatgcctatttagggcccctttgaatcgcagggtagaaaaaacggaggaataggaaaaacacagtattctgacaggaattgaagtgtaaaacagaggattgcaaaacacaggaaaaacacagaaatggtcgtttgattggtgcacaggaaaaacgcaggaatcggatgagagagatagactcaaaggaaattttccaagaggttggagctcttgctaaatttcctgtaaaatccacatgcaatgtgacatttcataggaatttcatagaatttggaaagcttcaattctttaaatcaaagggccaaatagaaaaatttcctatagaatttgaatcctataaaatatctacataaatcctttaatttaaaggggcccttagaccacaaaccaaaccaaaaggaagtaacgaacacgagcaaaggaacaaaacggtcgtggccgtgggggacggagatatggcgtcgacttgggacggagaaaaatctcaatgcaatgttgtcgtttatctggtggactgcagctgatctgcccaattggacgagacaccggggtatggctatcaaaatctccactgccagtgaagatacgagcaacgagagagtacttgtgatggctatcaaaatctctattgtagagaaccgtacatttatttttccatttttttctatttttgtcttgaaacttgtgcaaatttagcttaattgggagaggccacgtagtgatccgggagaagtgtggcgctgtgagctcgggttgccgtggcgggcggtagagcgccgcatgcgctgcggcggacaactaccggcacacgtggagggccacccgcctcctctcctcgagagtctcctccactctgccacttgacgtgggcccagcggcgccgcggtcaagttggtcaagttgtggcgccctatcgaccaacggctttgtttgcgcggcttctcttcgtctgataattgccacggcggatagccatttttgttcaccttaaatattgatgaatctggtcatagggtggagggcgatgagtaacagtgatagtctagcctccagtttttaatatagagttaattgaatccatatcgttgttgccatattataaaactgctacgactgttcgcgatatcgatttgagtgccagtataattttataaaattggatcatgccatcgtcgtgtctgttacgctctctttcttccttctcttcttttcttcttccctatcggtcggtcgctcttctcctttcccgagcatgaatgtgtggggacagtgataggaaaagtcagcattggcggatggcaagccatgactgtccacggacggtgagatgtcgaggcgataccggtgatgactagtgggcatgggtgtgtgtggtaagaagaaaagacggtgacaatgggtggtgagccatggttctcctcatgcggcgagagagcgagaggcgacgccgacaatggcgtgacatagctatgcgtgggcaacggcgagagggtgaggaggccattgcatctccttccctatcatcgacgagctttttcggctaatccaattcctcctcatcgatgatgcccatgaaatcgacaaggagcatcttgggctcaccgtgcgggatgggggagtctgctcggaagattggactcgccaatggcttcatgcccacgaggccgccgattcattccttaaccagatccgataaatgagaccgcggtggtcgtcgccgacagagaaaagcggtgggaggctcgtcatgcctgccgaacgaggggaggatggaagtgaagatggaaaacgtgacggcaatatcatagatctaattttatcaaatttcagtggcactcaactaatatcgcaaattatagtgtcatttttctaatatgacaaattctcaatttatggatataattaacccaaagaaaccctttaatatatgtcgcagtttaattttctctcaaattttaaccaacaattattcgattagctagttaaactaaattaaaaggaatactgagtactaaatttcttatcgaaagtaccttaaacatatctaatatgtttatcgatttacttaaatatatttagtgaagactaataatcaaatgaattaaaaaaaattaaatgcactaatattttttaaaaaattgaggtccgagtagtagcaaactggttcggttgagctcaatattgcaaaatgctccggcaggaggacctgggtactacaatcaaatcattgatgctcggatggtactgcattattatgaatggccataatatgcagtatgtccgtgattgattaggggtacataacagcattgaaaatgtagacctgcatggaatatttcaagcccaaaaatcaacgggcagacggttctagagtgaccaatcttttttttaaagaaaaacaaaaataaataaccgtacattcctgaaattaaaaaaaaaactgtcagttcaggtgttcgtggctacaaatacagtatcgttagcgttagctatgaagaatcggtcagaaaaaagggtttgctcaagataatgataataatttagcactaccctggctggctaagcaactaaactaactaatactcgtatttattttcagtcatgtcattagcccacgaagaaatggttgcttccgtgcaagcagcaaaccagagcaagaaacgctttgcaccagagagattaaaaaactatcagtatcacattattttactgacatttgctttccacttcaagacatctgctaattgtatattcgatggtttggtgcctgacagttagagtatcctaataataagccatggctgggtgatgccacgaaccattctgttctagatgcgactaccccatctactgggcaacgcaacaaagaggaaaaccttaacaaattttaatccagaagtttcggttcctagctgaatttttagagcaggtacaatagcagattataagccaattataaacacatttcgagaaaataaaaaagaaaagagatggacagcaggctacagatttatagccagctgtagcacggactttaagatgcatatgtatatgacagatgagaccagatattaattatgtagtatatgtttatatgtaactactgtatgaattgactattaaattgactatagatgatttggagtccgcagttagctttactactaaacttgctcttaatggaatgttccatcccaaagttcatcattctgtttggttagcattagagcaggtacaatagcagactattaaccagctataaacatattttaatgagataaaaagataagaaaaaagagcagcgggctataaatctgcagccggttgtagcacggactctaagatgcaatgtgtgtataatagataggactatatactaatagtatagtaaacaattattgtataaattagctattagattagctatagatgaattagagttagtagtgggctatactattaaacttgctcttagcatgcggttagagtgacagcaacatcggttcatcgatcaagagtagattatgagtggattataagttgtaatagcttactagtgaaaaatattttacgagtaaaacttttatatatacacatccataaatttttataatttttaaaataaatgcattaatgatacctaaaatccacttaaaattaagttttaaaatttaaactttgacgtcgattaatttgttatacgtcaatcaataagaccctttagctattgcacctaccgtatttttcctggatataaagtaagatcctgggatcaaagaaagcttcgcaatcacatgttgagaaaaggagtgggctttcagaagcaggagcagaaaatgatgtatgatagactagttcggtactgcagttaggtgcccataaagaagatcttccggtgattgcattgggaatgttcggttgcatttggagctagtatttggctatagtattatactagtattgaacttgctttaacagatttcttcagcttaataatttactgtttgaatttgttctacattttgagcagctttgatggtttctttgtgtagttttttcaagtataaaccaactcgatcaaagttaggaacagtacagatagaaggcaacaatgtcatatcagaggagagaatcattcctgtgttacgtggagtataaacaatctgcaatactctggtcattgctacatctgacaaaagtcgttgtgttaccacttaccaccatgtcgttcaagcagagctggagaatcttttcctcaattttctgttcggttttcagttccaccttgcctcttttggtcatggtagcgccacgtggacataccaaatccaccattttaatccagaagatatataaaatgtgattttcttaagaggaggtttggtgaaagataccagaagattttcatggcttcaaagctgcatgcaagtgagagaagctggcatagagagaaaggtgccctccgatgcgaccgatttttgttcagatcgacagcaacatcaaccactttttgttcagttaaatccattcttctggtcgtctgtttttcttgcagacaactttggcatctttgaaatgctgaagggctcgatggattggcatatctttgacggatcatgaactcgatgacggaaatggcagattctactggcgtatgttcgcggaataggacgagatgtcggctgttgatttacgcgcgcgtgtgaagttgttttctgcagttcagtgcccgtttgatcatttcccattggtcgagagactagtgccgtgtttagttgtgtttagttgtaaaaattttgaagtatacgaatacacatttgaagtattaaccgtagactaataacaaacaaattacatatttcgcctataaaatgcgagataaatctatcaagcttaattaatacatcattagcaaatgtttactgtagtaccacattgtcaaatcatgacgtaattaggctcaaaagatttgtcccgcaatttacatgtaaactgtgtaattggttttttttcgttcacatttaatgcttcatgcatatgtccaaacatttgatgtgacggaatttttagaagtttgaagggaacagcctaggagaaaatactgcagtggtgttgggtgattaggtcaaatgcttcggcagttctgaaatactaaggaattatagacaagacattttgcaaaagaaaaagcattaaaaataactaaagaaatggatcacgaggaattttagaaatcgccaatatatcacggttttttaccaacttgtaaaatgtattgggatctagtagtatgagagacataagaaacaaggcaaaactagaaccaagccacttggtaatgctaatgttcgtctctatctctctactccctccgtaaaaaaaaaactcaatcctagatttgaacacgtgtgtccaggttcagatctagaattaggtattttttgacagagggagtagaatttaacttgaaatgaaagttatatgattttttgaagagacaaatgtgtctattaatataacatactccctctataaaaaaaacttaaaaatcttattctaggttaaacttttcttttttgggattaagagagtattgacgtacctagcttataatattggtgattcatatgctggccctattcgaaggcacttgctgccttagccgcagcgacagttcaaaccagtcaaaacagttgtagccacaaccgttgtggtagctagtctagccaaacgtaaccactgtcatgatagcaatacttgttcagtacacttaaatagagtaacagaattgtatttgaattttgtcggggccgattatagttgactactagcacataagtaatcaattgttttggtaacttggtaggagtaggatctggtatagctgtttggattgatgataattttcattggtgtaagtacaagtagcactaagtgattacttcatgattagagatatctaccccctatattaaaaaaaagaaaaccaattctcactataaatcttaatatatacgtgttctgatttatctttttttagacggagtagtatatggggagcagtaatagcatgtaagtgcattcttactctctctatctttaaaaaatcaatattataagtctgaatatgcaatgcatctaaatttatttttctaagtaaggtttttatggccaaatttaccagcgaggcgaccacttcagagtgagagcgagcccaccagtccaccacgacggttggtacgcctacgtctctctctctctctccctcctccccacttccctcgactactccacctccttcgcctccgcccccatcatcaaaagcccccctctcctctcccctcctcctccccttccacaccgcaccactccacgccttcctcctcttctctcgtctagcccactcgctggtctctccaattcttggcttctttgctctgctggattagcagcagctgctctgcttcttgctctgcccttgtctttgggctttcagggcggtgtgctgaggccgagcggtttgggcggtctcaagaatcgcttgtgcgtgcgggggagttgtcgtgggaggtggggatggagaggtacgaggtgatcaagggacatagggtcggggaacttcggcgtggccaagcttgtccgggatgtgcggaccaaggagctgtttgccgtcaagttcatcgagagggggcagaaggtgaggcagagatcgcgttggtttaccctctccccccctttatctctgttgctgtgtgagtatcttgtttgcttgcataaacccagttcttgcaggcgggttctgatcagattcttgatttgtggaaatttttggatttttagtttagggtgcttgtgcacggaaagggtttatcctaatattttggaggaaatttccttaaaattgttgctgttgattttattgatttgactaattgctacttgatattgtgtatctggttgactggttctgcccccatacagtctgatcgatcgcttggaccatccattgtgctaccgttcctttgatctgcaatactccataaaaaatcggactttttttctatatatttttgagaacctccttaattcactccttaatatgtgatttcttggccttatatcacactagactgttcaatgcgggtgactctcatcttatcgctgtttccgattacaacaaagaactgaaatttgcaccagggtgctcttgatctggctctattgttagatgtttataagtaaactttgatctgctaaagcttctgtccctcatttgacatctgggttatgggccaattcaataaaacacatgttgtggccatgtgaatgctttgctctgcccaatttacaaggtcaccttttgggtcctgttaaagttcattgaacgctccatttcttgttgattcgtttaaggcgtagtagtagttaaatgaggtactttaattcgatttctacttagtatggacacaactaacatcgttaatcagtgccaccattatgttattatgttaggacttgggttcatcgatctgggtttatgttatgttactactcttgtgttctagaacacctcaattttcccagcgtattattttggacctaaccattttctgttcccacctctcgcctctttagtgtcttcattgttaacatttcaccgttcttttcaaactaggtttcttcaaccttttgggttctacagagttttcttatatggtgtctgattgtctttgatttgaatcagctcactttttttttgtttttctttcatagatcgacgagaatgtccaaagggagattatgaaccacaggtcactgaggcatccgaacattgttagattcaaggaggtaagtcgcatgaatgataaaaactttgaaattcgtttctgcataccttgtttttagtacgctaaattttctatatttttgttgctgaatgcatttaaagttagccaaaagatgcccatattcataatttctccttaggttctaaaacctgttaagaaaacaagcatttcatattttcactggaaaaagattggcaatattctggtacaattttcaatcttccaaaagattattgtaaaattgcataaataaattttcatacttgaaagattaccaagatgaaaatggtcttctgtaatgctcgactgtgaagtctgaactattttggtcagtaggaaagcgatatctgtgatctatccatcaattctaataggacaaatggaatatgtaaagaaaaaagtttatcctagttgcagagttcaaaggactcttcttgtattgactgtgactcatacctttatggtctaaacttctagtataactgccctcagagctttaggagcactattttgtttacttaagagaatatgctatatgtgggcgctgaacttatttggtagactttttgtgtagattctatatctaagcacattatgggtgtttccttttctcttcttctttccctacacaagactagaatgccacttctttaaaccgtttaggattaattctgttggatacttgcatgtttatcaacactcagttgctaatatagcttgtcctagtgccatgcccttgagcttgggtaagtactttagtggctgagacttgagggcatcatgaggccatgacttctgtgaaaaagctcataattgctcctaatcattcattaaatgactactggtactggaaatgaaagtgacccagcaggatattatagcctcttgttcaaatcttgaccgtgttaagccttgtttgcatttaacagaagccaaattatctgaaagttgcattattcaactatttgatggtagtttacattcattgttgcttttcatattgtcaaacatatatttagtagagactagctttaaggagttaggtggataattgcaggtatcttgttaatacctctgagcattagaaatggctgtcatattttctaagatttaaagctgttgtcataagattatatactcaaagagaacacttagtttttcaggttgtgctaactcccacacatttggccatagttatggaatatgctgctggaggtgagctattcgaaaggatttgcagtgctgggaggtttagcgaggatgaggtagagaatatttacaagtcatgatacttaaagattataagatgattcaattttgttgatggtttattcaacctatcgacaggcaaggttcttcttccagcagttgatttcaggagttagctactgtcattccatggtacacaataatctgaaatcaaattgttgttagcaactcaaatgctctatatcttacataatgatatattgccttattgtgtcagcaaatatgtcatagagatttgaaactagaaaatactctcttggatgggagcatagcacctcggctcaagatatgtgattttggttactcaaaggtagtcagggaagattatggcctttaaaaatcgctggcttggcaactgaactcttatacttactctcgaattttctttgcagtcctctttgttgcactctcaaccgaaatctactgtcggtactccagcttatatcgctcctgaggtccttgctagaaaagaatatgatggaaaggtagtttctgatttgctatttctcatttttaatgggcatactcctactatcaaagttccgaatctcaccatatacaatttaggttgctgacgtttggtcatgtggagtaactctatatgtgatgcttgttggtgcgtacccctttgaggaccctgacgaaccaagaaacttccgcaagacaattactgtgagttacccaacaaccatatatacctatgagatccctcattccatcttgttgacctcagctcatgctgcatcttgatgtgtgggaataaaagttataagatccttgcagcggatactaagcgtacaatacatggttcctgattatgttcgagtttcgatggaatgcagacatcttctgtcccggattttcgtggcaaacccagagcaagtaattcgtctctcaaaccaattgttcctctagaacaaaacattacattttgctctgtcctcaccagtcatttcttgcagcgaattaccattcctgagatcaagaaccacccatggttcctcaagaacctgccgatcgagatgactgacgagtaccagatgagcgtccagatgaacgacatcaacaccccgtcacagggcctggaggagatcatggccatcatacaggaggcgcggaagccgggtgatggctccaaattctccgggcagatcccgggcctagggagcatggagctcgacgacgttgacaccgacgacatcgacgtcgaggacagcggcgacttcgtgtgcgcattgtgacgaggccgtgaacttgctttctcttcttggagtgtgctgctccttttgttgtgctgctgttcatttctgagagctccattctgttgttgtgtcagtgtttgtaaacgaggtgctgtggataatctgaactcttttatatgttggtgttcttagctgaattctttgcgtcctgcctgcttccctttgagctatgtgcagtttcatcagtctcacaatgcattctcaatttctcatgttttgttatcctagctttagggccaatttagtaatctctatatgcgttgcagttgataacaaagttattcattttgttcattgtactgaactctttcccccgaaaagttatcatacaaggagatgcaaactgttgtgagaagatgaaaatattggtagcctaaaagatggatcttcttggtgaacagaaacacaatcttatttttttccttaaaaaagaaaaacttttaaatgaaattgtaatataattacatcacaactataccataactattataattataaaacttatgcataagtattaaaaaatatatacaactttttacccaagttataatagatattagttacattgtacactacaactaagttgcatgtgaatgtttttgactaaaaaaatgcgatagctttttagaaattccgtaaaaaaagttaaagaaatatactaaaatggattttcagtgtgtacgcagaaaattatccttatgaggccttcattgtgagcccacaatttccagatcacccaggcctcattttcatcataggccttcacacatggatgagcacattaaggcccattcaaaccatgcctcaagtgtgggcccaaacgagactgaaaccaagagataggcccattccaagtgagaaaagccagcccattttttccctccggcccagtaagtccaatccaacggtgaaggcgatcaacggacggctcagatcgagcctcgcacccgcggcccagaccccaaccccttctctcctctaaccctatataaactccacccatcaactcacgccgctctctcgctcaaaaaccctagccctcgcgccgccgccgccgccgctcccccgcgcactcgccgctcgccgcccgcgagctcgcgccgcttcgcaaccatgaaggtaagacgctcctcgtcgccgttgctggatcccccagatgagctagggattttatggtagggttagatttttttttcgtgggtggcttctgattcgtgtggtttccgccttcgttttcagttcaacatcgcgaacccgaccaccgggtgccagaagaagctcgagatcgatgacgaccagaagctgtgagtattctcgccgccgctcccccgtttgtttcgtttccccaatattagagagagtggtgttggtagtggcaagccgaatcagcgcgaacccttgtgttgatgtggtccgttgatttacataacaaatcgcatttctctttttgtggttggacttgtgttgatgtacttaggtctaatttttcttagccttgggggatttggatgccgtttaatgtttgtagtagacggataccattttttgtgattgggctctgtgcttatgtacgtaggtctaacatgtctcccctttggggatttggacgccatttgtggctgttctactgctaatgtttgtagtagactggattcattggattgcgtgcctctgcacagaccaactgtggaatggtgatcgttcctgtgtgaatcaggtgtacatggcttaagattgtgaggttgtttgacattttatcattatgtggacctctttgcttatatttgtgaggacatggagttatactataatatttgacttacaggttgcaagagtaactaacgtatatattgtgccacttttcacttagagcatggacatgcaaatctagatagcattttaagttaacatgtttcggtattcttattgattaaattgtggtgattggatagtttcatcagtacttgcaatcctttgcatgagtatagagaaatacaaagatccattctttacaaagccgtatgatttctagttggacttgtttttgtatcttacttcagtgcatgttgggggcacaattaaactgatttctgtgatatgtttttagtcaacttccgcaactaaaatgcggcagggagttagttttcatgacctgtaacaatgtgggtgcctttcaatgtctaccttgttagctgatgactgaacattagtttgagtttgttctgtaaaattggatatctgatgcctttgtatgtactgcaggcgtgcattttttgacaagaggatctctcaggaggtcagtggcgatgctctgggcgaggtaatatcgtgaggcctctgatgtttcctaattactgttacctagtcttaagatgttaacatatctctctcctttttctcaggaattcaagggctatgtcttcaagatcatggggggttgtgacaagcagggtttccctatgaagcagggagtgctcactgctggacgtgtccgccttcttcttcacaggggtaaaaaggctctatttctattattgactttcggatattcatgcccttgctctgaccatattatgttacttgtatggcaggcacaccttgcttccgtgggtatggcaggcgtgatggtgagcgcaggaggaagtctgtccgtggttgcatcgtcagccaggacctatctgttattaacttggtgattgtcaagaagggtgagaatgacctgcctggccttactgacactgagaagcccaggatgaggggacccaagagggcctccaagatcaggaagctcttcaacctttccaaggatgatgatgtccgcaaatatgtcaacacctaccgcaggacattcactaccaagaatggtgagctttcctgcaatgtttaataatctacctcatttctagtatgtcctgctcctgatctgcattgatcttagtactgttttaattttcttatggataaattcaccatattatattgtctgcatgtttgtcagttttcaagtcaaaatatatcttccaggtagctttctgcttacctacctaatggtgttgttgtgttgcaggcaagaaggtgagcaaggctcctaagatccagcgtcttgtgactcccctcaccctccagaggaagcgtgccagaatcgctgacaagaagaagaggatcgccaagaagaagtcggaggctgctgagtaccagaagcttcttgcccagaggctcaaggagcagagggaacgccggagcgagagcttggcaaagaggaggtccaagctttcttctgctgccaaggctgctgctaccaccgcctaagttggtttagagcttgagatgttttaaaatcgttcattcctgagttataatagcccaagaacctcttgcactatgttcgatcaatccaccccagctactttcagatttctcgagtaattggtgcaattttgcatgaacatgctgccttgtttggaattcttttttgagtaccggagaattaccatgttagtgtgttggtttatgttttgaaggtggccttgttattctgttgctgtgttgatgtttggacgcaattgctggattggtacttggtagcatgctagaggttttttactctgcttcatttgagttgctgggttgcagttgcaggcatcggtgtaaactcaactcgaagtcgtttgctgctgcctatagtccaggcggtgtaaattcaaccttattttttttgtaaaatgaaattttaatttcaggagagcaacagacagaccaaactcttaactgttatgacctgacaagtttaatttctaccaaaatttgtaccgtcgttgtcgaggaatttcttcttgccgttcgaattcgatttcttcggtattgggttggtccggtctcaatccgttccgattgtgtcagtcttgggccataaagcccatgtgttacaagcctaacagcccaattcgactggcccacgacttttgcaggcgggcaccaattccgggtgcactccgacgcggggcgcgtgatcaaatttcttttcacactttatatcctatcaaaatttaataattttcaaattttgttatattttggtattatataaattcagtagtgctaaactagtttggttcacgcagaaaaaaaacatttgaattcgaaaggatttgtttattatgggaaataatcatataagggaacatatgttatacatatatagaagcttttgcgtgtacacgccaactaagaaaatatggctggttctaaaacttctacacgttttaaaatccaataggaatgcaaagcatatgacatttcagctctacgtttatctctatctcgtattcacaatcatatgtttcaaaggtaaccttatcaaatcctttttggtggaaatttccgaaattacaaaatacgaacaagcccttcagtactagcgttggcgtactgcattttgcccatctcgcttggccaagaaagggggacaagggggaaacgcatgtcgcagcctggcacgttccaaacttccaatcgcagagaaaaaaaaaagagaagcagatagagaggcatcgatcgtatctacgagtacaaaagtaaccaagcaaaccatctagctttattttctcctgtccccaaggccaaacagcacagagctgaggcccccttaaaaattcatcagaacacatccatcaaaaaacttattacaacacggcgagtatatatgctaccatatcctcgacaactgcctatagtgccaagaacactcaacaaccaccatacaaacatttgacagaacacatgcagatatcaccgccggcgagttgaaactattctaccccctcctcccagtttcttttcccttcccccgtttcagcagtttagaaagccaatgggggcaatggcaggttgctgttgaccccggaccgcatcctcctccgcctcagtctctcggcgatgatgaaggcgagctccagggattgcgacgcgttcagccttgggtcacagtgggtgtggtagcggtcgctcaggtcatcgaaggtgacggtccttgatccaccgatgcattcagtcacgttctgcccagtcatttccaggtggatacctcctgggtggctaccttcttgatcatggacatcgaagaacgcacgtacttcagcctgtgaaacacagcaatgttcatgtttatttgaccaatagtccaaaatgacgctagtttaacaaaggttacagttccgtttcagcagtggtacacttttcttctcataccatagaattagaaacgcctaggatttttgctgatatagcatatgcccaaaagtgtcacattctcactgacataaacagatactctaatgcactagatgggaacttgggatacaaatggccaatgcactagacaggaactttatgcatatagcataccgagttatcactcaattttcagtactgttaaataactgtgcagtcgaagttggggaatgagggtaattccttatgtgagattgaccggattgttgcatcatactaggaaaggatactagcaaatatggaatgctgtagcagaaaaatactcaccagaatggaatcgaatggacgagtcttcagaccacatggagccttgatggtgtttccatgcatgggatcagtaatccatgtgacaatctgtccagagttgcggacagcacggataagatgaggcaatttcaccctcatgttctctgcccccattcttgtaattatggttatccttccaggcttgtttgatgggttcaaaatctcaatgagcttcaccaagtcacgggggttcattttgtcactcacctacattacacagggtcaatgtcagtttgaaatgtcaacatccacaaggcactgcaaacaacattaggatttcacataactttatgaaaataaactcaatgctgacctttatgccaagagggttggcaacaccacggagaaattcaacatgagctccatcgagctggcgagtgcgctcaccaacccatagcatgtgggctgagcagtcatagaagaggccactggtggaatcctcacgtgtaagagactgctcatatggtaagaggaggcactcatgggatgtccagaagtcagttgttgtcattatcggatggtcgactgttagccctgctgcagtcatgaagccaagtgcctcatccacccggtgtgccaattcacggtacctatacacaaaatagagacaatcattggataacctctcgattcagtcgttacaagcatattttattctgtaacgtaaacaattgcatatgtagcggcaaatcgataatataccaacagcacttatgcagtataccaatgagctgctcttatttgcaatttgcaaataccaccaacaaaatggcatttcaatgtcttattatgatggcaactttgtattttgtcggaacaccatcttttacagaaaaagtcaaaacaacattctaacaataaattctttataatctttattggacgcatgtctgaagaaaatataaatacgttaacactgcataagtcaacattataaatccaaagaaggttacagatgctaaattagagcacgaccgacgataaatttcatggacgggtagtttagttaattatgtattctgaaatgggtacgcctcagataattgcatgcctttttaaccaacaattccatggtattccataccatgaaaatagcaaaaacgggcagcttcctaacaattattcagaaagttggatgcaaaggacaatgatgtcccgttagcagtttcctcgaaaggaagggacagaaagtgaaagcttctaacaggacaactcaccaactactgattgatggaatcagaactaccacgtgatttttattaaacattgacgagctgcgaccacctaaaatgtttccatttacttattcaagctgcaaattagaatatcagaccattttcaagagcagatgactgggttcatactttcaagaacatgttcaccacccattacttacacggtcacacagattccaaaaggggtgaaaccgtgttatcaccagcaacctataagcagctctagccttatcatgataacgagatatgtggaagcaattcaacactgatatcttttaaatcgaaagcgactttaacaacttccgcaacaaaaagtgctaaaaaatcgtatgaaaaaaaaggggagagaaatgaatttctcacctgtctccttgttcgctgtgatccatgaaatcgaggttccactgcgtgacgcgctgcatggcggcgtaccctcccgtggcgaaggcgcggagcaggttgagcgttgccaccgactgcgcgtacgcgcggatcatccgctgcgggtccggcacgcggctcttctcgtcgaaggtgtcgccattgatgttgtctcccctgtaactcggcagcttaaccccgtccctctcctcgaacgaatcagacctcggcttggcgaactggccagccatcctcccgacctaaactcgcgcacaaaatttggagcagatcgggatcagatctcgcgaatcgcgtgaaggatgagctcgttttggggtttggattttgggtaccttgacgacgggcatctggccgccgaacatgaggacggcgcccatctggagcaggatgcggaaggtgtcacggatgttgttggcgttgaactccttgaagctctcggcgcagtcgccgccctggaggacgaaggcgcggcccatggcggcgtcggcgaggcgctcctcgaggtggcgcgcctccccggcgaacaccacgggcgggaacgtctcgatcgtcttgagcacggagtcgagctcctcctggctcgggtactcgggcagctgcagcgccttcttcgccttccagctatccaccgtccacttccccaaccccaccggcttcttctccggcgccgccaccgtcgacggggacgaggccttcgccgcggcctgcacgggcccgttgctcttcgccgggtcggccgcgtggaccgccgagacggttcgcctcctcatcgggaggaacgtggcggcgagccgcggctggggcgccgacgacgccgcggccgcagcgccaccggaaacagcggcggagttggtggcgagcgccattgctgacgtcagcttcgaggtgaggtaggtgggaggaggcgtgagggcggcggtaggcggggctcctctgaaggtggaggtgggtggggtgaggggtatttataggcggggtcgacggcgaaggggaggaggaggggttggtggatgggttggatggtggttggcggcgacgagggtgtgagaggagggaggaagaaggggtggtggggaagggtagtttcgtagtttttcttcgtatctatatgacctgacttggaaaagatactttaggggttaggtggcgtgtatgacaatgtgggcccgtgacgcagggtcggtggggtaggtcttgaccttggctcggctcggctcggcttgccgcctgatctgctaaagcttgagccgctccgttacaaaatatactcctcgtcccaaaattctggtcatcctgtgaaagtgctgctaaattagttttggaggtactataagtaattataatttagtacttgcaggtactataagtaatttcaccggcctcctctcctctccactgcaccaccaacctgcaacctcgtttggggcataaagtcccatagagcaaaaacaattgatagcagtataagatgaccttataccatatgggtctacttttctgcttcaaatgctaaacgatcactttttgggacaatcacaaatgagtaaaacgacatattttgtgggacggatggagtagtaatcaagtattagatttggcataaattagtatcacgaatatgtacaatcagattcatactaataggttttgtataattcggcgctaggttgttgtattttaggatgaatgtaataatgatttgatgtcaaaaaaacacattaacagagcctgctataataatcatgttcccagtacaattttggcttggctcggctcggctcagttggaacagctaaaaatatcgtacggcgtacagtacagcgccacttgtcaacatctatccacaactgacaggtgggccccgccgcttcccgtgcccggcaggttggcccccacctgccatcgagacgaccggctcgtgaaagtcacctgtctgggtggggttagttggtggcacgaatggccccgggggattccggacccagggccaattatgtggctctttgtgtggctccctgctcggccacatggtttcgtttcgcattcactttcaaattttgacaccatacatacatgcgtgaaaaattaaaacaatttggtccgatttcgtacgaatattctgcagtatcgtacgttcgacgacgtctagttcgcatatttccgcgtcgtcttatgacaggaagccatgttacttgatgctcgatttaaattaggtcgaaatcgattttacgaaccaggcaatgcaatgtttttggggtgatttgtgtgcggcaccacacgcacgtggcaccacgaagataccccccatgtgacacaattgggaccagatgttcttctcttttctttctttcattgtgaggaggtgaagatacttgtctccaaatataagtagttctgaaatttcttttacagagatcaagaagagatgtgaaattaaataaaggatggttatggtcagttgacatagaaaagtagttgaagaaattaggccccctttggattcaaaggaaattcgtaagaattttagagtatttcattcataaattttttttctctgtagcctttaaatcaaaagaatgaatcctatagaatcctataaagttcctatgaaatgcctctttccatggaagttttggaggaaatttaacataaggtagaacctcatggaaaaaatatcatttaaatctttatctctactcgaattcttgtgatttttctacggtccaatcaaacggtcgtttatgtgttttacaattctttattttacacttttgtttccgttagaatcctgtctttttttttctattccttctggggtttttttcacattcctgcgagtagagaagcgaggctaactgagttgcatgcatgaactagttcaacataaagcttatttagttcttactaatcagttcaagacaagaggttaatttgatcacatttttcaatcaattcaatagaaagcttgttaagttaatatatttactagttgtggtttgtggccaaagttatccattcactattctttttttctctcctgggtcatcataattcatatgctagtgacgctcctaccatttagcgaactgttataaaacacaggaatataattctgcctactaattaaggttcaaacaatatcataaaaatagcgtatgtcaatgtgaaaatgtgtgttatccgtataacatcaggcataacacgtggtaatatcatttgtctaaaaaagggagcaatttaattaattagtgtgttacgtactccctccataaataaaaagcgaatctagaaccggatgtgacatatgtatgcccagattcgtaatactaggatatattatatttggtagtaggttgattttctatgggacggaggtagtatatgtatatttcgtggggagtgcggagaagttgcatgctgccaagcacaaaggtggctaccaaagagacaaacaaaatgacacatccgttttcctcacctaataccacatcatcatcatcacccacttgacacgataagcttaaaaattagccatttgccttctcctactccttagcttagcttcctccccaaataacagttgatcacacgtgcaccaatataattgaaaaattagtatgcgaccgatcgacttagtgtaatgtgtacatagttacacacgaccaggtaataatgcggcgcacgaaaaacaaactcgatacagtatcgaaacaaaacaagaaaaccaaaatgacgccactacatcgagccgattcaaattcaaccccagcaccaatccctcgtgccaaaaaaaaaaaagaaaaaaacgacgcgtgcgttcgcgcgaatgctcacgaaacagacggttttggctcgccgcgcgccagcaaatctctgaaactgccactcctatggaaaacggtattactcattaacaggtaactagttaagtattagttaaaaaattaaaaagtaaattaatatgatttttaaaattaacttttctatcaatttttttaaaaaatatacaccatttaactatttagaaggaatgatcgtggaaaataagaaagtaaaagttgagaaagtgagagaaagagtgtattttaaaattacacaaatcctacgagggcacgacgagtactactccaggacggaaatgtataaaaacgtcggtctccgcacggcgagggctcaaggcgccggcggtaaactgcggccgattcacggcgacgaggctgcctggaaagagtgggtcaggtcatgttttgcattttgctacgtgacgttatgacggaggctttgggtcaatgggccggcatgtttgaagagcagtagtagctggtaggcgacttgaccaggaggggacaaccggggagatatgcacttgaatatgccgtattgtgggggatctaataatcctcacctaccaaccccaccagtagctactattcctatattgtttgacccaattatttactattggatgagcaacatcataaaaaaaaaagtagctagatcactaccattctgaattatagttattctatgctcactcgtagttatatttttatgctaactactctatttttgctcctttataaaagagagtagtggtttcgctgtcaattcctattatttttaaagaaaaaagtgacacgtggagctagagggctcatatgtcaactactcatatcaattctctattttccgtgggaaggaaaaaagattaatgtgaggttaaaaaggttcacatgtgattaacaaatatgtacaacaattgagagatgtcactaaaattaaaatcccgttgcaacacactgacaatatgctagtattaattataacttaaacatgcatcgagtattttgttgttttttttaactcaatttcgtttttaagtgtttttgaatgaatttcaaaatcccgcgacaagctgtgggatatccactagtataacaaattatcaatgacccattggtcaggtaaagaaggcgacggctgatttgatcccatcaattactgtagcaattgtgtaaccacatgacatgtcccacatgcatagcaagtgcattgcatcagtggtgatctgacaatttacagaggaaataattaagctaacaaagccataaaggacaccataacgtcgctttgatcccttctgcggattgattgcacgcagcatgagccgctagctctgtatcagtgtagtactgtagctatcagacaaggcaacaaacaattgctctaacgtttgcaagttcagacttcaagagggtagccagttagccactagccaagcttatctaatctacacccttgggccttggcaaacaggctctagtccggcccattattcggatatcgacggcccaattataaagcccacgaatggtgcggcccaatagcggcgcctccaagcaaacagaattggaggtcttttgctcggcaaaacgcaaaggaaatcatatgatatgatatgatatccatccatccttctcaagccgcagctttgctcgttatttgattgggccacatgatgtaattaaattttaagataagcatgtaaaataccaacgttaaaaaaaaggctgtctatatatcatgtgacaaaatcccacctcttatcattcgaactttggaccattgatttaatagctaaatggtgaataggtgcgtgcccgcctcatcgtgcgatcactattccgtgctatacaggtcatataacatacatttccgtatgtatatgtatatgtaaaataaatttatatatcaaaagtgtatacatatatgtgtaaatttatacatacataaaagtctgtataaatctatatacaaagtttatacacaaatatgtatataaactttatatatacttagtatacttatgtttaaactttgtatcgtataattcaaagtatatacatacgtatatagagaaaatactagaggggaacccctgcgtggggactctccacgctcgcgctcggctgggcgtgtattacgtgccccggaccattgatatcttgtaacaaactgatatcgtagatcaaattcttattcatggatcgaattcttattcttattataaaagtacatattctccgtccatacgatgctcaacttttttttagggaccatatgatgcttaacttgacgtagaactttactttattatgcatcaggtccctccaaaaccttccatggaggctaattttcacatttgccaattatcagtgaaactaggaaaaattataaaaaccacctcaaatgtcactttatgttgcaaatatccctccaccctaaatcacctttgtttaaaatttcccccaattgccgttgctcattcatttttttgtggtcgcaaaccccacatttactcatatgaatactagtaggcaaggagtcatggtctccactcatatcggccacgccctatatgatataaccgtgggttcgtggcattcgctggaatggcgcacaaacgttattggacggtggtgttcacaagtcttcactcttggacatcttgatcactagaagatgagttgttgcgcttgtctcctggcagaggtggagctaggattttaagttgttggggtcatggcattcaattgtactagtgtcatgtttgagaggactttaactctaagtatttttagctcaaaattcttttgtagctagagatgtgagtaagttgggattgtttcattttactaaaaaactgtttaaactctatattctacaagaagttagagattttaaaaaggtccaaaaaaattaaaagttataacagtataaatcgagcctaaaaacaatgtatttttggggacataaaagcaagttatgaaagttgtttaatgctccctccatcttaaatgcaattacctatgcccttctccttcttttttttaagatattggttgagtcccttaaaaaaagattaagagattggttgagactgagaggtatgtgaagaggtagttgtattttaagacaaatttgaattctagatatatctatattttgtgatggagtaaatggcttaaaaaaacacagctaacatctagtatactattagttgattaacataactattggcctagtgcagtgatacacacaccaaatagctgaaatagatcattaacataccaaataagttaaattgtggtattagtggtgttgtggtgggttgacagtcgcataacaaagctaatacagtgtgcttccatagaaacaagctactataatgttaatgttttagcttttatcaactccactattaattgattagcagaactattggcctaatgcagtcatacacgcaccacatagctgaaatagatcattaacataccaaataagttaaattgtggtattagtggtgctgtggtgggctgacagtcgcataacaaagctaataaagtgtgcttccatagaaacaagctactatagtgtcttaccaaggtaaattcagagtgatatctgagtggtaaattcagagtgatatcttatacgggagaatttaaaattcagagtgatatctgaggtggtttatacaattttcctataaaaataactactctttccaatggaatatgaagtagctacagattaatgtcaacgatgagttggcaaagaagtcacaacaatccatgctcaatctcaggtatccaacacaggattatctaattccgaaccatggatggagtcaaccttgacgcccacatgtgttctcgtttaacagccacctgagcagcatacgcaatgcattgtgtatagtaggtctgcatttgcagatagtgagttcagtaatttccatactcggttattggtcttctaggtttatacagaacaacgggctcaacaaagacttgcatatcggcaggaaagaaagctttagaagtgactattgactgttttttatatagaaaagtttttcccataaagaatatatattgttgtccatatgaaatgcctacaattaatccttttatctaagtcaatcaaaattaagatcaatgcattactttaacatcaaaataattgggttcaagatctaaatttggtacggacgtttgcatttactgctaattattcttttagctatagacgatgctacatcgataatgatacgtctttggtaattttggtccaatctttcgaatgtgcttatagatgtagggtgggtgttcatgagggtgagtgtgcttaaaagaaaatgaagaattatatttataccattccaattttgtctccaattttcttttatgttgaggtgggatccaacaaataaattattctgggacgaaggtagtaacttgtataaccttttgaccaataatttttctaaggcaattataacatgttttttttctaaatacttattacgttttgatttgtacgacacgtggcaacatgcggggcacttttttttttaatccagctcctctgactttggatagaaaaagcagagaagaacagcaaaattgtctgatgctacagtaaaaacaatattttgcagtaatctattatctatctatcttctattatctatctatctatctatctatctattatctatctatctatctatctatctatctatctatctattatctattatatactaaaagtccattaatcttcctataaacactcctaagccgccatgtggcgctcctacaagcactcttaggttgccacgtggcatgctataatctcaccgttgattttcatttaaattggtggacccattattttaaaccgttagattagatctattaaaaaaaggttaatacttcatgtgtatacataatccgtttacacttacctaaaaaaaagtcagcataccaggaaaacgtactatgggccgaaaaaaatatacctttacgtactatattcatttgaaaaacaaaacaaaggacgtacgtaccgtttagcgatggaaaaaatacctttacctaccgttcatttgaaaaaaaagatgtacgttaaaaaagctataaaaccctaaagaaaattatatgtaaatatcagaaccatcatcgaaaaacagactatctttttaaataggattttctatataaaaaataaaatttattacttcacaaatatggttacgtgatgcttctacaagcactcttagaccatcatgtgacactgtgtaatctcgccatcgattttcatttaaattgatggacctgttatgaataatatgtgacgaaaataaactagacgctaaaatatatatatctgagacatgaacacttagctaagtagtgtattaatgatatattaggcttattttatccgcatttatgcaatttcatctattaataggtagtcagcttttaaaatatatagtgataatgagttgttacgttaatagaagaatttatatgtaatcgggacaaagtgttttttttttaatctgagagaaattattatcattgaagtatactaaagtctatgatctatctcacgacgtagaaatgtgagatatggcttcttttagcactatttcatagaacaataaataagatgcccgcgcaaccgcgcgggcttccttaaaagattgtcacggtcgtatgtatatttagcgatacatttcttaataatcaacctcactcatttcaaaagagaatattttctctatgccataaaaacttaagcagtactgattaacaatacaaacaaattgtctctactcaaaacgtaaaaaaaatatttttatggaaagaattattttcttcacatctatcttctctttctttcatgaagggcatcgagcagttagccagttaacacaactataggagggacatacatatgattgagttgagacagacccaatggagtccaccattgacaatagtactcaacttcctacatactaatgcaataagctttgaggataccgatagtgaaataggacttagaattatgctccacactagctttgattggcacaagtacgtcgctacgaaacccatgtttgaaggcaatagagaaataaattctcggtagctctacccattagagggtatattcatgtctaatttttaacagtattatccctttaaccaatagaagcagtatttttagaatatttatttatagatttagaaataagagttaacgtaaacatttaggtatgtagtggagattgatgttttatgtattaatgatgtaatacgcttactttggtgatacaaatgtagttctgtttattaaaaaggcatcaagcaaaaatgataattagtaatagtgacaataggcgagtttacgtgtaatctagacaaaagtgatttttgtttgaatataagaaacattgttatcatttattaaagtctacggtcaatttcacgacaaagtttttttttattataaggtgaaatctacaatttattatatttattatatgcatacagtgagatatgacttaattctatttaacattatttctatacataataaataaggtgcccgcgtatctgcgcgggcttcctttctagttcactatagaaacagcagaaaacagtgaaaaccactattcacaactactgttcaccaaactactgtggtgatcgatctcgtccgttcgctgtgaataggctaaaaatactctgaaagtcaccgcactgtagctctctggctttacacacatgtaaagtcagaggatccaaatcccaggggtgggggtttgggttgctagtactacagtcctgctatacaggggcgtagacagggggtggtcctggtgggctcgggactaccctgattttggcccaggatatccccacccccaaaagcccacaaaccttggttcttattcaagcccagaaaaacaagctcacaaaccttggttcccattcaagcccagaaaaacaagcccacaagagagaaggaaaaaagcgctaggtttggccttctgggagtcaaggcatctgacgaccacgacgccgtctctactcgtcctcgtcgcctctgctacgcgcttgcgccgccgcttcctcgccaccgccgctgccgccgccacttccctagctcgatctacggaggccgaatggcgaagcgctagaggcaccagtccccacgccgcgctgcctgggtgcaggctgcttacgccgctcgccggggctcctcacatggcgccgccaccggccgccggtgccaggagctgggagcccaggaccctggcggcctagccctaattgatccttgcctcgatgttttccctccgtctaccccttggaatcccgtgcttaggtgagtaaatcattgtattgtgatttgtgaatcagtgaatatgtgaatgtgatttttgatttgtgaatcatcggatgtgaatgtgttgctatttggtactattgtagtatgtaggatttgtaaacatgtggttgatatggaattgctcttttgtatgttagccttaatctagtgatgaccaagaggagaaacaatatatgatttattgaatcattgatttgtcacatatatcaagtgagatatcttttatgaattaagttagtaaagaagacataatactaaaaactttgatggctaagatattggcattgtgattttctatttgtgcccaagatcttttatatttgcaatatttatgttgtaatatttgcacgtgtgagcttgcttgttaagttagtcaaatattgacaatataagacaatattgttacatttctattactttttcattaaatttgtactcgtatataggatttacgacgtttgaaaatttagctatgtgatgtgtatttgtgagtaggactacacagcgaaaaattcctggctacgccactgctgctctatatatcaagccgaagccgaagccgccttgacctgcaaaggcagagcagagcagcgcaggcgagcaggttgcggagaagtggaagccatcagctgcctagtgctaaagccatggcgtcgccggcggcgagcaagccgcacgtggtgctgatcccctacccggcgcagggccacgtcaccttcgtccacaccgagttcaaccgcgcccgcctcctccgctcccgcggcgccgccgccgtcgccggcgccgacggcctcccgccgccgggccagccggcggagctcgacgcgacgcaggacatctgggcgatctgcgaggccacgcggcggacggggcccggccacgtcagggcgctggtcgagaggctcggacgggaagccgccgccggcggcgtcccgccggtgagcttcgtggtggccgacggcgccatggggttcgcggtgcacgtgaccaaggagatgggcatcccgacctacctcttcttcacgcacagcgcctgcggcctcttggcctacctcaacttcgatcagctcgtcaagcgtggctacgtgccactcaaatgtagtagtaacagctaactgattaaacacgatcattactggttctaacctctcgccattcacaggacacttgtgctacatccttagttaatttgcactaatttgggatcataattatatatatgaaaaaatggatagctagaaattaggattaatgatcagaagatcagtagttcagtacgttacaaactctacttttttacatgctccaagaagaaaattcagaatcaagttagccgtcaagattttatctatccaaaaattgtttgggatcatcgatcacccatagatagccaacggtacgagtgaccctatgccatctagtgaccaatcaaaattttcatggatttgtttttgagtccaccacattgagcatagctttgagatatactccctccatactcgtaaaagaagtcgtttaggacaatgtttaagtcaaactttagaaatataaatcataaatatctctctagttattaagtttgaaaatttaaaacttatatgaatagatttgtcttaaaaaatacttttataaaagtatatatatatatatatatatatatatatatatcacttttcaataaaattttttatagaaacaagaagtcaaagttgtgttttagaaaccgtgtcgctgtcttaaacaactttctttacgagtacgaagggagtacttacaaaaaccaaaacctgttgaccagatcaggccccggattgacaatttgacattattgtccaagcatttcggtacatgttatcagcgcacgctacggatggagagaaaagcactccacgtagtttaaaatatcattttagtccagctatgttgtcattagtgacatcaaagtctaaccagcagttttcctttccttttttttctactgccagtacacttcatttttagatatgtgatgttatcgacttttaatatgatgttcgaccattcatatgtaaaagctactatagcagaaattataaaaatataagttatgcataaagtaactttaacgataaaatagacaaaaaaagtatacttaatagtcatatatttaggtcccccatcatttattaggaaataaaaatgaatttgtaagtaaaacttttataaatgtgttcttggtgacttaaaagccaatattaaaaagaaactatattgaaaatattttaaaatcaatctcaaaattaagattgaaaattcaaaatttgtctttttctttagctgattagaccatccgatgggagccttaaaattagaggtagtattaattatacaaaattatcggggaaaaaacacttaataactatcaggtaacacactacaaaataaatgaactttatacacatgatcatacagaaaagcactgtaattatcaggttaagttacacaccgaaatatgaaccacctttaattgtgtactgtgctatacagatgagagttgtttgaccaacgggtacctggacacccgcctggactgggttgccggaatgatcgccggcgtccgcctccgcgacctgccgacgttcatccgcacccccgaccccgacgacgtgatgctcaacatcaccatgaagcagtgcgagctcgacgcgcccgccgccgacggcatcctgctcaacaccttcgacggcctggagcgcgcggcgcaagacgccatccgcgcccgcctccccaacaccatcgccgtgggcccatcggccagaggtctcgccgccgtcgtacctcccttccctcgcctccagcctgtagagggaggacggccggtgcgcggcgtggctgaacgcccacgccgacgccgccgtggtgtacgccaacttcgggagcatcacggtgatggggagggcgcaggtcggggagttcgcgcgcgggctcgccgccgccggcgccccgttcctgtgggtgatccggccggacatggtgcgcgacgccggcgacggcgacggcgagccgctgttgccggaggggttcgaggaggaggtggtggcgagcgggagcgggcgggggctgatggtggggtggtgtgaccaggaggcggtgctgggccaccgcgcgacgggggcgttcctgagccactgcgggtggaactcgacggtggagagcctcgccgccggcgtgccgatgctgtgctggccgttcttctcggagcaggtgaccaactgccggtacgcgtgcgaggagtggggggtcggggtggagatggcgcgggacgccgggcggcgcgaggtggaggccgcggtgagggaggtgatggggggaggggagaaggcggcggcgatgaggaggaaggcggcggcggcggtggcgcccggcgggtcgtcgcggcggaacctcgagagcctcttcgcggagatcgcgggcggcgtccaaccggtaataaatccagtttgaggaagcgcaacgcaatgtgttttgtgttggtttgtgtgtgacgtgtgtcgtgcgcttgtggtgtgttttgtggctttttgcgtgtgtcgcgacggatgaatctttctctgccgtactccccttttacttggatcactgacgtatgggtttgatgatctgtttccgtgtggcaatagatcgggttgtgccagtttatccggggaaactgtgatattgtaggggttaaaaatggtaacggtaatttctgccaaccggcgtttgtttttaactttctaccgactaagccatatgaaaatggtaattgaccgaaaaaatggtaaaggtaacaaatatggaaatagaaaacgaaaatggttttaccgttttcgtattcttgtgaaaattatgtttcttataatatggtaattgtttagagaggacaaatctatcctggagatagacaaagtcactacagtcgcctcgctgtcgacgggtacgttgcctaccaccgaaagcacagagccgttaaatcttggaaaattccgtacaggcgcttcgctgtcgacgggtacgttgcctaccactgaaagcacaaaaccgttaaattctgaaaaattcgctctcatggggagtcaaacccaggaactaaggtactgctgagactcttgtaaccactagactacaaacccttttgcaatcaaatccctaacttaagtgcatggctaaaatggagttaatatataatttacatactacagcttaaatttatttgtacatataatatacttatgtaaagctaaatatatgtttttatagtttaatgtttccgtccgtattattccgtttccggtgttccgatatttccgatatcgttttcgtttccgacattattgttttcgattttattttcaaaaaattttaattatagaaatggaccaaattgttgatattgttttccgttagtttctgactgttttcatctctagatattcacatcgcaaaatgggacatttgccgtttcggtttcatgggaagagctgcgtctgtgtagttgttgcctggtggggctcgacttgtacttgtactcatggacaatataaatcgtaaaatcgtagtatcatatatattctgagatggcgaaagcagtggtgtgacgtgtttgtgttggttacttggtttgtgtgacgtgttcgtgcgcttgcggtgtgttgtgctttttgcgcgtgtcgtgatggataattctaagggactgtttactcctcattttaaagaaaatcccttttaatatactacaaaattttgaccattgaattaatttgagattcgtgcaaaccccatcaaaccctaactacttttccttcccctcctcccctgccgccgcaaaaaatagctcgctcctctctcgacaccgcgcgcgtcctgcgccgccgccccactgtgccaccacctcggcctcgcc

SEQ ID NO: 25897 - DNA, 15309 bp, Oryza sativa
  unsure (1)..(15309): unsure at all n locations
cgaggcctcttacccctgtccctcctaccctgcgccctaatgtgcccgtgggagtacgtgagtcggtccgggggtaccggcacggcaacccgtcctgcctgtacaggtgtgacctctggctgctcctgagtgtgcgcctctgaagctcctccaagctgagaggagcctagtacgtcgtgtcggtctgcgccgtgcgagtcgtcgtcgtagaactggctagtaggaccagtccaaccggcgtgagacgaagaggctccagtactgaagatcccgagtgcaaatcctgctggacaaggaccatcagtttcgtacatgtatttaacagtattaataaaaagtaaagtaccgtgtgggcgagggatcgacgctccgtgagaggaagagctggcgaacgcgcccgaagaggtggcgaacgcccctgcggagctcgtggaagcgccggtcgtgcctgcgaacgcgctcgaaggcagacgaggtcttgcgatgaggaaatgtgcagttaaaacatggtgacataatcgtgcaaaagctgaaacaaaaatgaactaatatctgggctgaactgtaccgtgcgaaaccggtgctgtaggtcgcactgatccgaagctaggggcgctcgaaggcaaacgaggtcctgcgaggatggatcatcaagttacgacggggtgatgttttcgtacaaaaacagaaacaaaacttaagaaacctctgggctgagcagtaccgtgcgaaataggtgccgtaggtcgaggtcctgctccgacggtaggcgcgcgaggccgtggttgtaccggaccagctggaggtacgacgtccacggcgctgcgacaggagaagacgcgcatgaccgcacgcatcttctcctgcatccggtcgaaggtcaccctctgctcaacgtcagtcaagtgcaaacctctgttcaacctcacttggactgcggtgatatcggcactgatatcccgtgcggcatcagcctatgcaagatggaaataacaaattcagtagttgtcctatattatgcaagataaatgaaataattgtaagaagtaatacaaattggatgtaccgccacgaagtagtctcggtcacggtgcgtgggatacgcatccgtgacagcggcaacgtgcggctctggggcgtctggagtgaaggtcacacgcgcacgagtgcgaggaaggtaccaacgaaggtagtcacggtagttctcctccgtgtgtgggaagagctcgttgatcacctcctctgtagctaacacccagtcgtcaacgtactgctgtacacgtggagcccaaagtgcgcctgctagctgtccccgtcgagtcaacctgtgaagagaggtaaattatatggctcgatgaagtaattatcataaaaatttagaaatgaacaatccgaactcacgagtggtcggcagggaggacggtcggctgcacgttgcccggaaacacctgcctaagtccgaactgtctcatcacacgctgcgggcagtgaggctcaacgaaaatgtcgaacaccatcggcaggatggtgagccagtaagcctggtcgcgtgtgcacaaggacgaaagtcctagcggtgctttcgcagcgacggcctcttctgtgtacggctcccagatgacgtcgctcggctggagacggtcaaactcgaacacgaagtccgggtaaccacgtctcacctggacgtgagcgtaacgacgctgcaataaacatgatcggaattagacatgttatgtgaagaaaaaaaaagacgactggataaacttataaccgcagncgaagttgcacttaaccccacgtcgacaccagtaagtccccatcgtgggaccgtcctctggccactgcgcgctgcgaccaaccccgtagggtgcgctgtccaccactggtcgacctatggcaaacctctcggctgcccaaagctgaagcaacatagggcagccagcgatagataccacgcctgctcctatcaacacacattatttcataccgatgcacttgtgtgccttgagcaacaactcgatgtctccgtgcctttttgattttatcttccatgtactttgtcactacgttgccaaacactatgttgtcatcggccatggacggaccaattttcttgtatcgatccctaaagtacgcttgcgtgccgtgaaggatgaattcaacaatagcaaccaatggaagtacccgaactcctcgcattacccagttgtacacctctgccaaattggttgtcattatgccataccgagatccatcggtgtcgaacaatagagaccacttctccttaggctcattctcaatccactgagtgaaatttctgatggacgaccctgacctccttctcattgttggtgggtcatcatgtaatgcaccaagaggtatgggaggctcgtcaccttcaactagtggtctgcgagattgctcatctgtttgcttcgttgtcaactcatccaacttgtcccacaactcattaaatttcttctcttggttctgtgcacagagcctcttaaagagctccataagatgcttgttcttcaattgcttgtagaaatttgcacccatgtgacgcatgcaccaccgactccgaacatcaggccacttagctggaagtcccttctcatcccaaccgttctgcaagtagtcaatagcccgcaacatacccgcatgacgatcatgtataaggcaaacgttgggcctcatacgcaccactgcaatgtgcactctctctaggaaccagtaccagctttcagtgttctcactctctacaaatgcaaaagccataggtagaacctggttgttcccatcacacccaattgctgtcaatatctgacctcggtatttacctgtcataaaagttccatctatgcatagaacaggtcgataatgcacaaaagcattgatgcaagcacccaatgagaaaaaggctctttgcagcacactctttgttcgatcatcaaccgatgtaaatgtatgtaggtcatagtacgtattattattcctctgggcaatggtggctaacaaacgaggcaaattatcataagaagcttcaaatgtgccatacctcatctcaatgatcttttgtttggctctccaggcctttgcatagcttatggtgtacttgaatttgttctcgatgtgcctaataattgattttggttcaaagccaatgttaccaacaacactgttgtacatctcacttgccacaaaagctgaagtgatgtttcggtgatacttctccaccccttgtaagtagcacttgtgctcggtcacaatgctaactttccaataatcattccatttacccttatatgcatggacacgccacggacaatcttccttcatgcacctcacttcatacacataatttgttgacttgaccaccctaaactctctctgcaaggaaactgcccaatgcttcaccgccttcttcatctcatccttatgagcatatcttgcaccctcaattacctcgttctccttatactcccagggtacatgatcaccctctgatataacaagtccagagaagtccttatttgcccaatcagtggccattacatcactttcctcatcggatgatgcgtcgtcgtccacttcctcattatccgaatcttccctctccatttcatcaacaattataccgactctctccccctcatccgccatgcccatagcctgctcctcccttggttgattttcctcattttgcatcgatggtccaacaacatcccctgcattgataggaccctctacatcttcggtttgcattgaaacatttatatctttctcttgtaccgacacaaatataacgaggagccatgtccgttcaaaagccatttccacataccgtctccaagcatcagtgctgtccatcggcattagttcccaaaaataaccttctgttgcacgactcactacaactgacactgacattgtgtagacttcttggtctattctaaatcctcttaacaaccaactataaattgactgaaatgttctctccgcaggcctatcgatgcccttagatgtcattacaaaatctgacagatcaacaccatctggaccaaatctaatatttccttcaccgtgaactatctgaaatgtgaccttacttgacattgtgcctgatgaaaacaataactgcgttaacctcgcatttctgtactacgccctaagttacattctctacaatattgttctctaaatttctaaaattacgttacattctccagatcaaactaaactacatcttacaattaacactactgtctatgtctcaattcatactattatattctatgctctggatctacacatatgtgctgtgtgctacagatgtgctaaaatatatggaactaaaactaaaacgcaacatatatactcaaacataacatattagtacaaatgcaaaagatgtatgggagcatacctgtgatgaattgagcgaaccagcagggcttcgccgctccccttctgctgccctcccctctctctcttttgtttttttggatttttagtgaatataatgaaatttcacagaggaggtactgggctttatagggggagaggcaaaaatcgccctcccccagggcggcaagggggccgcctgcaaaattccatgccccctcgccgcccatttgcaagcggccccccccacagtacaaaatcgccctagcggagggcggcaagggggccgcctgcaaaattccatgcccccccctcgccgccaatttgcaggcggccccccgcacagtataaaatcgccctagcggagggcggcaagggggccgcctgcaaatttcgttgacggccgtcgcccgagagcgaacggctgtctgccacgtcattttcgccgccctctgagagggcgatttttccagagggcggtaggcgactccttccgtcaattttcaaaatggaaaattatttttgtaaaacttttaataaaaaaaattataaataaaaaaaattcgcctttttacggtgaggcggtgcgctcccacggatcgatccatcagaaaaataaatgggacatttaccgttttggtttcacgggatgcgctgcgtctgggcagtagttgcctaatttggtgaggctcgacttgtacttgtactcatgggcaacatatgtggtgtttggctgtgtttgagttccctttaaacttccaaaaaaatcagtcacgttaaatatttaaacacatatataaaacattaaatatgaataaaaaaacaattgcacagtttgtatgtacattgcgagacgaatatttttagcctaatgtagtgctacattaaatatttgctaatgatagattaattaggcttaataaattcgtcccgcagtttacatgcgaaatctataatttattttattattagtttatgtttaatacattaaatgtgtgtctatatacttaaaaaaataattggctgcggaactaaactcgacctttgttagtaagataagccgtaaaatcaatagtatcatattctgagatggggaaagtaatggcggtggagagatcaatgtttgtaccagatttgaagattggatgtaacacacagcacaacggggtggtttcgcagttggctagcgcgtaagtctcatagctatacgtgagtgatcctgaggtcgagagttcgagcctcaccccaaattttttttttcaacgtgacgcacaacaaagcgactcgtaaaataggcccagcacatctgcccttgttaaatgaatagaacggccgaacgcgaacccccggccatcctgagtgcctgtttggtttccaggacttatttcaactccctgttacatcggatgtttagacactaatttagagtattaaacatatattaattacaaaacccattctataaccttggactaattcgcgagacgaatcttttgagtctaattacgtcatgattttaacaatgtaatgctacagtaaactataattatggattaattaggcttaaaaaattcgtctcgcggattagctctcatttataaaattagtttttttactagtctatgtttaatactccaaattagcgtccaaacattcgatgtgacatgggctaaaaagttttagccccatctaaacaccccctgaattgctagccgttttcgtgcagcgacgcacgggctcgagtgcgtcagagcaccctcgtccgttgcattgcatcggtaatatttttggtggttttctactcactcaggactcgcccgctggtgagtggtgagcgctgcggccgtgtacttgcagacgcttcgggctgtttcactttattgccaaaatcaatcaatttaacggcttccacatctcggcctgcctaactgggtgatcctctgttgcatcatgcatgcttgcgtgaacaagaggatcacaaactggccgaaatacctaattaagttaattttacacggtaagagagagagagagagatggcacaggcacgattgactggcagccgtttgctttccgaaactcgattcttcttcacaccgctcggggttgcaccgtgccagaagatacaccagatagtcgaggatggatttgttggatggtgcaagcctttaccagtttgtgtaccagtaccacacgaagatgctcacgaggagagacctatctgccgtcgacggaagctacacctgcgaaacggatcaaggaacatgagagatcacccagaaatcgtatcatgacacatatgcagtttgcgaaaccgcaagtttggttgcaaatgtccgtttcagtaatgctatgaaaactgctcgataatgactattcccaaaaaaccgctgaaatcatgcacattcaaccaagctattgtattcatgtgttggttgtcttataaaaaggttgatgtcctacaaatgcccaaagtttgcattattgcataccttctcatcgttcaaaggttcggtgactccctcttggaaaaactcaatgatgttcctgcacacatccttgggcttctcaaggttgaccgcatgcccagcatttcttatcactactaatcgagaactctcacctagatgtctgtcaatatgttaaagtcaatatcattactctgccaatcgatcctattctttgtgtactccatggagaaaatttgtgtttcaaattgaaggtagcgatagcaaacctcttcagtctatgagccaactccatggggaataccttatcccgctccccccaaactatgagcgctggctgcattaagtgagaaagaaaccatcttcaaatgtttcagatgtaagtgtagtagagtttaatcacatactaattggtacctggctaattattggaagatctgaaagctgcctttcactaatcaaagcatataataactcagttttttcttggatataatccgagcccattacctgatacatacgaaaaaagcaacatatgtaactcaatttctttttcctgtacataatccaagcccagtacactatttattgtggtttatgtgctactcaaatcactatggagagagcgcccaaatcactgattattccatgaatattcttgaaaaacatatcatctgatgaaagtaactgagcaagagctcttcaaaatactcaatttttgggtattttgctactaaaaaaagataagctgattttcaaaatactcaattgtatatgcaaatgcctgccttctatgtcttcaataatccataatatgtaaagcatcacaaagaacaaaatttgagatgtttcgagctttactaaagtcgagttggctcttgttacagatcaagcaaaccttcatcccattttcgcgaacgcgcaaaaggattgcacgtcaatacattagaagaaaggagttatagttacacaacgcaatcagccataccggcttatgccaggggaagagagaaaaagcaaaattaaaaacttgaagcttagaaaaaactacggtggctaaaacacaaactccaagcaaaccttggagcaacttccagtatacattatgccccatgtatgccagtaatcaggttcaattaacaagttcagcatgtgggcgagaatcattctttcaaaagataatgaacctcatcttcataatcgttcactcttttgtttacaaattcagttttctaattcctttttgacccaggaggttgatgatttctgtatttcacaagactgtatccttgaatgttacccgtcatttagggagtgtctaataagatcaaagcatttcttttagaagtcccatctttaatttgtaaattaacacatttcataatgtttgcagtttatcacatggatgaacatctgtcacgccctgaagttcctctccttgctttaaaatttgttaaataaatcgcccgaagaaattgttcaatttaacctagagttgaatccctaaattaataaatgcaaataataatcggaatcggcatgtggaatttttcttggattctacatgtcaaaatatgctaacaggatttttagtggaattttcagagccttggaaataattttaaccaattaaaataagcaaagtgcaataaataattcctggaaaatcctttttttccttttctcttctttttcttcctttttcctccctttttcctcttgttgggccgtcggcccacttcctcccgcgcccttcctccttgctgggccggcccactccctccctcctctctccgggtcaccgacaggtggggcccacctatcggccccttcttccacctccagccgacggcagcgccgccgccgaaaccgccgcccacgccaccgcttcctccacatccgcgccccgctctgcgcccacacgccccccacgtcgcccgccccacgccccgccatattctgtccacgcgcgcgcgcccgcaagggcgggattcaattcgaataccccccactctctctctccacctcccacgtcgtcggcgagaaatccggctgcccccggccacgtccgcccctcccgagtccctataaaacgctccccgtgtctccctctctctttttccgcgctcgccgtctcctctcgtgctctctaacgccgccgcgccgttcgccgctagcgccgccgcttgccgccgcctccggccgtgcaccgccgccactatagccactgccgcgccaagccgccaccgctactagcttcgccgtcgcgggagctatcccggccgccgctcgcttgccgcgcgccgccgcctaccgctgctagtcgtcgctagtgccgtcgccgcgccgctccgttgctgctgttggcctcgcgagatcgaggcccgtctcgtccatcccgcgcgccccgccgtccgccgcttgccgccgccgtccgccgtcgtcttcacccacgctggccgaatccctggtgaggactcactcttcctcttttactcctccttccccgtgtgcgtcgccgcctcctgtccgcgccgccgctttggccatgtgccgccatctcctcgccagccaccgccatctccgcgccgccggtcgccgccgtcggtggccgctcgccgccgccgcatcacctaaccggccggctggtttgaagccgagccgagccgaccgggcatctccccctccccttgagccactgcccggtggggcccacccaccaaccggtgccacctcctcccccttgagctgctgccgggggggtcccgcatgtcggcgcccgcccccctttgctgacgtcatccgggatcctttattgcgcaataaaactcagtaaggcttttcttttatagtaataaacacagataatcttctaaaattcatatctaattcatccgagctccgattaagtccattcaagtctcagtaaattcataaaaatgcgtagaatccattaaaaatggttttgtttcctgtttcagtagtcttataggctgttttgcttgtgtgctttgtttgtcgcatagatttcggtcgtttcgtcgatccgcggtttctcgaagacgttgctgtggtctcatcagtgcgagagcaaagcaagccatacattacgattgatcatattgtacccaatttacaaatgtcccgcatttctattaagtattgcattgttttacaatatcacgtgggatgggtcctactactcagccatatcttgtttaccttatgccattgataacttgggtattaagatgcttagatgttggtttagggaatgcttagccatgcttagttcaactagtacacaatggaggaatcacattaatgcatagactttgattattggcaatagctttggattagtgccaccgcaagggtgttagttaattaaaatacactacatggtgggctgtgggtgcatggttttgctagtcgtgcccatggcgattaaggaccggttcgcgggatgccctggaagaatttatcgtacttgccacaagccagcatgggcaacggctgggcttgtagtgtagctttcctctagtcgacgtacccaggcgagggtgggcgtgatggagttgggtcggccagggtgtccggttgatcggcttccggattcaccgcggtacgaaaggggggctgcccgttgcctgctggggacgggggcgaaccctaaggtgtggtgcgatcggttaaagggggttatgtgaagggtcctgtcacggcctctttccggtatgtcgtggtggcatgtcggcgcacggtaacgtgtcgtggggctgcgtcttgtgggtacagttgtacacctctgatcagagtaaaactattcgaatagccgtgcccgcggttacgggcggtcaaccagattcaccgtgattagtctcacccctagtttagcttaatgaactggtgtagttcaggtggttggttaggcctgttgcaatgtggtgtagcgttggatagtgattggttaatattgattaattgctacaactattttactgctttcaactgctgcttttaaatgctagctttatgcaaatgaacctctagcctcctttggttataccctgcatcataccttctcttccggtatgacttgctgagtacaatgggtagtactcagtcttgctctcttttcccccaccccagagttgaagttcttctcagttggagatctctcgatgaagttggtttcgtcgctgccgtcaaggatgtctgtggaatggagtcgcctcgctgcatgagtcaagtcttcaggcttagctcgcttttatccttttccgctgcatttgtaatcttttgtatttttgtaagacgtggatctgtatgtcaacaattgtcgtttgtgtaccctggctggtcctggacaggggtttaatgcacattcagcttagaaattatggttcgtaaatttttgggcgtgacaacatcccactagtataacgatgctaaacaatctatccaacctggtattgaattctccccaacaccagaaaaacttgtttctcttcttttcctgctagcatcagccaacattcttgagcagcacatgaatggatacccaggataactgggtgaaattagataaaatgttctcaaccaagccatattttacttgaaacaatttccactcttttgagctgcatttgccattactaaagagaaggaaatggttgcatggtcaaatgaactcccaactgctagcaaaatccagttgcaatttattaagtccaaaatatgttcgcatttcggtagtctgggtacaagtatatttattgagggcaaaacactaacaggaactacaaagaaaacttaggtgagtttgaggagagggggattgagaagattgggaagatacacaaaacgaggtgagccattagcacatgattaattgagtattaactattttaaattttaaaaatggattaatatgattttttaaagcaactttcctatagaaaatttttgcaaaaaatacaccgtttagtagtttaggaagcgtgcgcgcggaatacgatgtccttttctcacccaatccccagaactcatcacaacgaacgcagccttagtcagtgtctgaagtatacacaacagatacttgaatgtacatgggtaagcaaagaactggtgggcctactaaaatgcagtatcaaatcaagtgctctgttagtttttgaaaaaatcgagttgtcactaccctggccctacacatgcaagtgtttccactgttctccacatttgcaaactatgtacatatttaagcaaacggacaagacaaagcgaaaatgacaatatgtttctgttaagctactgacaagtgtaaatattttgaggctctgttggctcaatcaaatctaagcatgtattaaactagccacatagaggacattcagtgagttggtgtccattagtccatcataaggatggtaatattaatacattaagtgagatgttctcgccacaaaagacaaactgcatttatccccttgccatttcggttcaatacacttttgcctccaagcatccctcgtaatggcgtgcaaaaacaagattagcctcgtgatcgtgagatgatcacgagatgcctcgatggctaatcagcaaaattagcctaacacagatgtaagatgctactttgtatacttctatatggaatagaattcggcataattccctaacaactgtagagagcacagcattctagaagtgcctaaatttttttcccctcttgtgattctataacttcatctaatgcccgatagcaatgtaatccagggattgatttcgaaccaattttaaaaagaaatctcaaagataaaaaacgaagcggcctaaccttaatgtaatcccagaggaagcaggagggcataatgcagggtggccgcacgaatgtgagcctgacgaggcgccgcacctcctccggccgccgcggcacgagcaggtccgccgcctccccgacgccggccaccgggaacagcccaccggccaggtccttctcctccaggcaaacccccgcgcacaccagcaccaccctctccaccgcgtccgggtacatggccgccatcctgtagcccacgaatcccccatagctgaccccgaccaggccgaacctggcgaccccgatcgcgtccatggccgccttgatcgagcgcgcctggaaggcttcggagcggtcggcgaggcgggtgtaggaggcgccgaagaagaggaggtcggggacgatggggtcgtagcccgcggcgatgagggggcggaggtagggcgcccactgccacgtggcggaggcgccgaagccgtggaggaggaggagcgggttccgcggcgggttggcggggacccagacgtgcacggtggtgcccgcgtcgtcgtcgactccggtggggagcgggatggcgagcgggcggaggccggccctgaggaagcggcggctgaagcagcggtcccgcgccgccgcgaagctgaggatggacgacctcctcccgatggccgcggccggcggaggtgggggtggcattgctcgccgccgaccgccggagagagttgcgcggctaaatttggccgcccaagcgtggtggtggtggtggtgcagcgcgagtgcgagaagagaagagaatggcacttgcttagatgagaatgagattagtgctcgtcattgtctgggtggttaagctgctttattacggttttaacagagccaatcaccgtgtgtataacgtgggatggtcacaggatggaggtcggcgcgtcgggacgtggcgttttttttttttttttgggcagacagaaactagtgctacaaaagccggcggcccactcgaatcgtcgaatccaaaggaacccactgctcctcgatgcggagccgcggagaagacgcccactcgtactcgtggggttgtgcgggcagcgcgcgcgcgccacgtgccgccacgcgtgtcgcggttcttgaatctttgagacgccatttcgtttcatcatttttccccctctacgcagaggcgccggcggccgtcgacggagccgcaagcggtaagctgcttgtttctctcggtggacttcaggcctcatcctttctcagccaaaatttttgaattttaattttaaatttaaagttgattttaggattttattaatcgtagtttatttttcatcctttatttttagatcattaaatacatgtatataaaagttgtattcacatttttttttcatttgcaaatatacccattttgtttttttctcttattcgctaaacgatggggctattcgtcttagaccattaagaacatgtatataaatcttagaccattaagaacatgtatataaaaattttattcacaaattatctttcatttgcaaaaatacccatttcgttttttctcttattagatatatatataaacgatggggctgttcgtctaaatgacagggctaccctgagcctgaggccagaccgccagaggaacttccctgggaagaggatcttctcatttactttcctcgctaatatatggatttgttagataaaagaatttatatgttagtgacacaagttacgtaagttaaaaagttccctatctggctgcccaggcttgacacctgctagaccgctagaaactatcagaagatcaaacttcacgctcatatcagctggagggaaagtacaatcacaccagaaataagcctggcatcacgttgaacaagccgttcaaccctgatcatgcgaaccacgagtagcaagggatcaacacgcacttgtttatccaaccaaaggggccgttgttagttgtaagtagtaactaagtagtaacgcacagtgatgggcgatatactggtgaataacaagagtgtctgataaaacatgagactactgtatcagataaaccattcattctgtgcaaagaacattttcatagtgctctctgtatcaaaacaagacgcgctactgagatcaaggggaggagaggagaaaaacgaagaagaaaatagggctaggaatattgagctgagctgagctgagagtggcatttgcccattacaaacctccattagttacagacatcaacctgtgatggggactgttccccaatccccattagacgtttcgtattggcagtgtataataaaatcaggcaatataaatggccaagaatggcaatgtgatgatggtactctcccaaaaacttctaatccatacatgagagcaaaggcggagaggaaggtggattccactagctagatacgtacatccaccacttgtaaaggccaaacccatagattgtcgtaagcatagccatccttaggggatagggcttaaatctgcaggggagaagataaaaacatggtcagtcagttttctgattaatagcacagttatatgaagctaaatcagcagttgatctaggacaatggaattaactgtctaagcatagtg

SEQ ID NO: 25898 - DNA, 633 bp, Oryza sativa
tgtcacatctaatgaataatgtatctcattgagttcacatatattgcagtgaaaacgacgctatataattgacaatctgaaggcaacctcttcatatcttctttcccactagcacacaacacacgaaaatggaagcctattcattggtaatacgtaatctagatttgagattatgtagaacattcttcactacaattttacattttggcagcaaaccaaatatgatcaaatgcaattttaccttaccaaatatttggtcgtgaagaaaaatttggcactaacaatccaaatatgccctaaaaattaataaaatatttgtacggtaacaaaatatttctacggtaacaatccaaatatgccctaaaaaataataaaattgtattttaccagtcttgagattttaatcttgtatagttttcaatataaaaagatttgataactattgatatttatacaaaattaccatgccccctaaacagcccatttgcaggcgagccccccgcacagtacaaaatcgaccctcgcggagggcgagcaaggggggccgcctgcaaatttcgttgacggccgtcgcccgagagcgaacggccgtctgccacgtcattttcgccgccctctgagagggcgattttt

SEQ ID NO: 25899 - DNA, 6401 bp, Oryza sativa
cactaaagataacccatgtgcaccagcaaaacgcttggaaataaaggaatgggttgcaccagaatcaaacaatattactgccggtgtcgagttgacggggaatgtgcccaatataacctctggtgctgactgcgcctcctctgcagatgcatgattaacacgggcctgaacgaacttgggtccagcacgtcttggcttcgggcactttccaaccgtgtgtccgggtttgttacaattgaagcagagttcgggtttttctcccaacctcttgggctgttctggcagagctggctgaactgattgagctggaatctttagtgaactcggagtagggttgagactgtgctgctcactgttgttgtgactgccattatggtggttcttgttgaagctacccgggtggtagggacggtgctgtcggataatcatggtggaaggtccaccgtgacgtcccatcgtgaaacgaggcttctgactcttcccctggggagtcctgaactgagctgccttcctcttacggtttattttgttaccgtgctcctcctgacggatagccttatccaccagcttctcaaagtcctcataatctctagagatcaactggttagtcaattcatcatcaagaccagacagaaacttctcctgcttctcggcatcggtacgcacgtcctcaggggcgtagcgcgcgaggcggttgaactcatgcaaatactctataactgttctggttccttgttgcagggaacggaactctctcttcttttgtgccacaattccctcgggaacctgtgctttattgaaactatgacgaaactctgtccaagtaacctctgccccagctggacgggtcaccatgtagttgtcccaccaaatagaagcgggaccttgtagctggtgtgtagcaaaagcaaccttctcctgctcgttgcattgcaaaagattcagcttcttctcaatggcatgaagccagtcgtgggcttcgattgggttggtggtgcttgagaaggtgggcggcttgacacgaagaaattctaacagtttggactgaggaggtggaggaccaaactgcaggttctgctgctgcagctgtgcttgctgctgcacctgctgcaacacctgatggtactgttgctgcatctgttgcatcatcattgtcatcatctgagtctgattgtccaacacctgagcaattgttgggttctcgggcggtggggacggactgttgtcagatgcaccgttggcacgtgctccattgttcggctcttcgctgccactggcgttgttcgagtcgcgtgaaccattccttatctccatctgaaggggataggtagaaatatgagaaaaggaggaaaaacaggggggctcagaaactaatcttgcttatgaatttaagtgcaattatcttaatcttgattaaaacactgaaaaagaggcacgcactcctaattgaggcagtcataccactgacacatgatatcgaccgccgactaacccacaagcaacaaacctaaacacgaaaactagcaagcaaacagactaagaaggcgataaagctaagggcggcgactctgaagctcggggcggcgcttgcaaacgagggataggaccgacatctaaagtagacaagggataggaaccaattcatgctcaaatccaaattaaaccaagcaaaagaagactcaaataaataaccgagcatgatgatttttatgcatagaacatttttcatgaactcaaataaagacactaatgcaactaaacaataaattaatgcatagactagttgcatagaaaatgatgcgcataacattgcccccatcgaatatagacacgacctaatgcataacccccaataaattcccgactgactgtcgaataaactccaactaaaatttttctaaagccctagactgagctaataatttttttttaaaaaaaaaatccgatccgaatgaacgaccaagatttttcccgcaaaccaaagaggcaaaactccaaattttcccgaaacaattccaggtgcaaaaaggcatatgcagatgaaaaaaggggttcagagggctcttagggtttccagttggcttgtcttacggtcaaagtcggctctgataccaacttgtcacgcccagaaattctcgaaccagaatttctaagctgaatgtgcattaaatccctgtccaggaccagccagggtacacaaacgacaattgttgacatacagatccacgtcttacaaaaatagaaaagattacaaatgcagcggaaaagataaaagcgagataaaccgggaagcttgacttaagcagcgagcgactccactccacaggcaatccttgacggcagcgacgaaaccaactttgacaaaacagcttcaactaggaagatcttcagctctggtgtgggggaaaagagagcaagactgagtactacccactgtactcaacaagtcataccggaagaggaggtatgatgcaggatataaccaaaggaggctagaggttcttttgcataaagctagcatttaaaagcagtagttgaaagcagtaaaacagttgtagtaattaatcaatattaaccaaacactgtccaacgctacaccacgttgcaacaggcccaaccaaccacctgaactacaccagttcattaagctaaactaggggtgagactaatcacggtgaatctggttgatcgcccataaccgcgggcacggctattcgaatagttttactctggccagaggtgtacaactgtacccacaagacacgattccacacatgttgccatgccccgaagtatcaccatgatactgcaaagggggaaatcgtgacaagaccctccacataaccctcccctaaccatccacaccacgctaaggtttcacccccacccctcaaaaggcagtgggcggtcccctcttgcgccgcggtgaatccggcagctggacaaccggacaccccggccgacccaactccatcacgcccaccctcgccaccggtgcctaggaaagggtcgagctatacttcagatcaagcagttacccactcccgcttgtggtaagcacggtaagtctcccagggtttcccgtgaaccggtccttaactgccatgggtgcgaccagcataaccatgcacccacagcccaccattcagtgtattttaattaactaacaccattgcggtggcaccaatctaaagctataccaatagacaaagtctatgtaataaggtgatccccatttgtgtgctagttgaactaagcatggctaagcatttcctaaaccaacatctagtcattttgatacctaagttatcaatggcataaggtaaacaataaatggctgaggaataggacccatcctacatgacattgtaaaaggatgcaacatttaatagaaatgcgggatatttgtaaattgggtacaatatgatcaaacgtattgcatgacttgccttgctctcgaactgacgagacctcagcaacgtcttcgagaaaccgcggatcgacgaaacggccgaaacctacgcgacaaacaaagcacacaagcaaaacatgctataagactactgaaacaggaaacaaaactatttttaatggattctttgcatttttcttgatttactgagacttgaatggacttaaacggagctcggatgaattacttatgaattttagaagataaactgcgtttttactaataaagaaaagtccttaatcaatttattgcgcaataaagcccagggctgacgtcagcggaagggagggggtggcgccgacaggcgggccccactggtcagcggcactaagggagggagagggggcggctggcaagcgggccccactggcagcggctctagggggaaggagtgggcggcggcatgctcggcacggctcaagccggccggccatggcaaggcgacgacggcgcacgaccgccggcggtgaccggcggcgcggggagacggcggcggccggcgcgaaggcggcggcggcagccgaagacgacggcgcacgcgcggagggcggcggcgctcacgggggagaggaaaggaaggaggaaaggggattcctcaccggcgagcacgacggccggcgcgaaggaagaaaacggcggcgacgaccggtgatgccggggcgcgaacgggcggcggcggcaccctaggagagagcatagaggggttagggaagggaaggcgaccatggcggcttgaattgccggccggagacggaggggagagagggtctcaccggcgcgcgaggagaaaagggctccggcggtgattcgcggcaatgaagcggcggccgaggtgcgggcgggctcggtgagcgcgacggcggcgactgcgcggcgcggcggtggctatagtggcggcggcgcgtggccggagacggcggtaggcggcggcgcaaggggcgagcggcgcggcgacgataggaagcacgggagggcgcggcgagtgcgaaaaacgagagaggaagacgcggggagcgatttataggtgcgggagggggcggacgtggccggggaggtggccgatttggccggcgacgtggggaggagagagagtgagagaggtggattcgaaatcgaatcccgccctctcgagcgcgcgcgcgggccgggagatgcgggggaagaggcggcgacgtggggaggacgcgggagcggcgcggcgtgggcacgggaagagcggaggaggcagcggcgacatgggcggttggagcttcggctctagcggccggaggtgggagacgaccgacaggtggggcccacctgtcggcgtcccgagagagaggagggaggggcggcttgggccggcccacaaggaggggggaccgcgggagagggatgggccgacggcccaacaaagaaaaaggagggaaaagaaaagaaaaagagaaaaaaggattttcctgggattaaaaattgcactttggtgatttttaattggtaaaaaattatttccaaggctctgaaaattccactaaaaatcctgttaatgcattggagcatggggaactcaagaaaaattccaccacgccgaattcaattattaattgcatttattaattaaggaattagctctaggttaattaagataatttcttcggacgatttatttagccaatttttaaagcaagcaaaggggggaaaacttcagggcgtgacaccgtgtccaggtgatcgcgggacatcggggtgagtccattgtaaaagttctacaggatcagccaatcgtccatcccatgatgaggacaggtggccacatactcctgcagtcgttcccatgcatccggaatagacttgtcccttgtctgctggaaactagaaatccttccacgaagggcattggttttgcccatcgggaagaatttcgagaggaatgccgtagagcacttgtcccatgtgttgacagcagcatggttggcatagaaccgctgcttcgctctcccaagaaggaagaatggaaacagccttagcctgacggcgtctggactgacgcccttgatggtatatgtgctacagatctccaggaactgttgcagatgaatgttggcattgttgacggcggaagtgctaatgggcgatcgatcgcccggcgacaagggtagcgatcgatcccccttccccctccctccctccacctggtttccttttttggcaccgtattactttcctattttagtaaatttatgaacctaaagtttatacacctcaggtttacacatctaaagtttagagaccaaaagtttataagtcaaaagtttatatatccgattcaaattcaaatttgaattcaaatatttttttatatataggatttctatacatctaaagtttatagacctgaagtttatagacccaatgtttataagtgaaaagtttacatgcccgattcaaatttgaatttgaattatatcgggattcaaatttgaatttgaattcaaatattaaaatatatatatagtatttttatgcatctaaagtttatacacctaaagtttatagacccaaagtttataagtcaaaaatttacatacctgattcaaatttgaatttgaattatatccgttcaaatttgaatttgaattaaatattttctatatatagtatttctatacatctaaagtttatacacctaaagtttatagacccaaagtttataaatcaaaagtttacatacccgattcaaatttgaatttaaattcaaatattagtttatagacccaaagtttataggtcaaaagtttacatacccgtttcaaatttgaatttgaatttgaatttgaattcaaatattagtttatagacccaaagtttataagtaaaaagtttacgtacacattaaaaatttgaattttaattcaaatttatatggtgtagtagtaagagaagaagggga

SEQ ID NO: 25900 - DNA, 4912 bp, Oryza sativa
  unsure (1)..(4912): unsure at all n locations
ccgcccattaggagtaccctgttgacggtccttaaatcataatatttgaccgtcaatgcctacatataatggaataaaacatggtatccaacttagtggtaggtattattactaatcatttccactagtgttggtgaaatatgtgtatgcaggtattttgaggagaaaacacatccgtcatgcgacaaaatgcacctctgcgcattcaagacgcatttacacggattggagggcccatatgtcaaccaaaaccacttagaattgggccaaaacattgtgcaagatgtttggggcccaataagcaacctaccggccaaaggagaggccggaaggacagatttttggttcggncnnnccnncnnntnnnncnnaccaannctngcnccnnccgccatctggcttcatgtggacggtttggatttctcccctatggcagttgcagggtgttttggccatttcccatacccctaaccgtcatttggagcctatataaggagatcttcatctcattccaatacacacaactttgagctgaattacaagagactctattgtatcttttatacattagaataaggtagagagtgagggggagctttggaggagtgcccggaagtttggcacttatctgacttctacctcgatgagtgtagcttcgtaggaggaattctggaggagtaccggagcttttgatacactctgctctggggtcggagaacttcttctataaagtaagcattcgtgttcctttcttatgttatttaattactttctttgagtaagatagatttccatctttgcgggttcattgtttagtatttatactaagtgctctagtactaggactctagataaataaggaagttcctgcgcaagtattagagtagtaattaataacttaggcgtggtgtctaggttagagattacctttgtttgttgtgtatcccatggatttgtcagaggtagacggcaggtggtgacagccctgaatcccgtcctagtaatctccacgttcggatgcatcatagagctatagccgaaaccacgctggcagaccagcaggggtcggtgcctgatgcaacagataggaaattacctttgcttagcttagatagttaagccacatagaaagtcctctcaagcctgccgaccatcggttgttgtccttagatcgtcttagccttaggtagattacacacattccctgagttcgatatccttttggggtcacccgaaagtgaagtgctacagcagtattccgtgcgcttgcggatttatctgtggtcgtaagaaataccaacaggcatcctcgttaggcttgccatagaatgggctagcctgcgccatcgtgatgagattggacttcaagtcgaaatccacgtctcccatgttgatctgcggcccaatggccacattgtcagtagagggagcagcgaactcgtgaagggtcttgtcagccatagtcctgaaagttggtggtgctggtacgactggtttctatgtcgtagagttttctgcagagcaacgactcgcggtctgacgcttcggacgaaagcttttggattttctttgaagttttccgacaagttgaaaccagtcatgcactaccctgttttcacaataaaagcgaaaacaaccaaggttatcctgctattagttcaggtaatctctattacgaatcttcctcggcaatggcgccagaaatgtttgttggtatttcttaacgacattactagaaatataattcccagcaatggcacagaaatacttctggtatattatggttacagagttcatccacaagcgcacggatataccattgtagcatttcactcgagagtattccaagggtattgtatttattttatcccatgggaaaatcatgtagactgataaacaagcatcagctactgagaatatattatctaagctaagtggaaagaaattagaaaaggaaatctatttctatacttctaatatacatacatacattcttgttaactaatacactagctaataccctatagccgatgtcctcctggtacttcgacaagccacacctgagtgccgagttccttatggcagcccgtcaaacggcggctgtacgtgaaacaagactaaaactcaaaaaaccagtggagctggtgcagcgcatagaatttaattcctagaagttatcagtggcaatggatagaggaaatatcgtgcatgcatgtaggcagtcggcagtggatatgcatgcagatctggagaggaaaacaaggatttgttgcatgcatagacaatcgagtagatcaaccaaataaatcaagagatatacatgcttgtccagtaaaatagcaagcagtacaggagatcgcggccagagggaaacggtcgtgcaacaacctcgtaatttcagaaacaaatccaccgatcagaaggaaaccacagatcttctatttttctgggcttaagtgcaagcgacaggaacaaggacgacgacacaatctgattagaacaaataatatgctaccaagataaacgggacccgatctgcatgcaatcaaaagcaaaactcaaaccacaactaagaactaaacgaagccagcactagagacgacaacggaccagcattcaaagacacaaaactgaatgaaatttgcaaatcacaaacctatgtttggtaaagggaaaagtggtgcggtaattttgtatattgataggtatggaaaataaatctataaaaaaaaatcctcaccatgctaccgaagctctgataccaactgatgacgctctctctcgtggcccgatcttctggtgagaggataactctcgttttgactgagtgcgacgtttgcgacatggctaccaaccagaacaagtccaggactgttgatacgaaaaatacacactggcctggaagatctgcttaacttcagtgcaggtccaaaaatcttacctttaggttcgtcagcgtgccagttgatttgatcctgcaatcaacaagaaataatgatagaaaaatagtggttaaatccataaacgatagccgatcggccagccgccgatgacatatcatttatctttgagccgatgtcatatttgaattgatcagcagtcataaataggcaagaaagaactaaatctattcgaccggctgtagatatctgatgaaccctgagttcctctcgacactcacggctgttgttggcccgatctttcggtgagttgatgataactacgatttgggagaaacgtcgacgacccgactacaaccatacaagacgttgcgttgcgccttagcgatcgatacacctttccgtgggttgttgatgttgccggtgcaaatcaaccttattcctgcaagcaaatcgaagaaacaagcaagaacaagataaaagcaatctgaaatgcaaataggagttgaatacgaatgataagttggggtttcaaatacaagcagacggacagtctagccgacacgcgcgctgcaaggaagtagcaatggctaaactttcatccaaacaaaacccaagaaaccctgaaggggtacctacctatttataggggtgggaggacgactaaggggtgccaagggtcgtcctccacctggttggggcgcaccccacatgggccccacttgggtaggggtcccaaacaaagttacaagcccagaggcacaagacaggtgacgcagcaccttgtttatgtgattgcggccaaacgacatggaatctggcgatgaggctagatccgttggaaagaaggctccaagagctttccatcaagtactcacgggccaaaaacgaaggtcgtatgcagattcggcggccatttgaaaacagcagtgtagctggtggccgaattggattccagcacttggaggacttgaacttaatatcgtgctgttcatccatgatgtgagcaatggttgtgtccgtagtagccatggtcacatcaatatcaatggtatataatacttccgtcgatatatacttaaatcaagtgatcgagacagtataaatcacttacatcgatatatatattaacaagaagattatagacgtttatggcatagccgatcaaatagatccagcatgcatcggctaatactcctatactattctatattaagatattaaagcaagcaaaatatatcaaacaggaagcttaatatacctaattgtgacaagatcttaacataaagagcggatttaacatgtcaatcaagcacataagatataaaagagttaaatcaggtaagatcggctgaaactccgatactaccctaatcggcaaccaaaaagtaggctagagattgagattctaatcacgacttataaggtcaaactcaactaatgcagctataagtatgaaaagaaggataatatctagacaatcaagccgttgaatgtttcatagggtggtggatatcctatataatctaggtcaacgttggtatttagcctaatcggctgccttccaatgatagatattacccgattaaaagttaaataacaatatttgtcacgcccggaatttctatccaaaattccaaacgcttacatgtgtgttaaaccctcgtccaggaatcaaccgaggcacacaatgacaatattgataatagagtacaattaaataactatttaacaatcgcaaataataaattattacagaggtagatagttcctctcaaaaaaaaacattctacgcagcagaaaaattaaactaaaacaatctacggaacagctatggcaactccactccacaggcaacttaaccaggacaagcctaatcctccagaccatcaccttcactcaagtactcctcttctgatgaatgaatattgcaagaatgagcatatgacatactcaacaagccacacagcaaatatgcaagtgcacaggataacaaaggatggcatagggct

SEQ ID NO: 25901 - DNA, 18850 bp, Oryza sativa
atttaaattatttcttaaatgcaattccatttattacaaatactttcttagctcaaataaatcccagaaaaatctaggaattatagaattaagcaaagtatttaatgaaattttatctgggcccattttatattggaatttattaattaaaactagattttcttttcaagacttttaaaattatttctaaaaattccatttaaacaacaatttatatattttgaattttcagggtgtgacaaacctaccccccttaaacagaatctcgtcctcgagattcggaagaactggcgaacaggtgcggatgagctgacttcaattcatcttctcgttcccaagttgattcttcttccgagtgattactccactggactttgcaaaaacggataactcgattcctggttcttctctcacttgtttccaggatacggattggtttctcaacataagtcaaatcctcttggacttctatctgctcaatattagcttcttcggtaggtacccttaaacactttttcaattgcgacacatggaacacattatgtactcctgccaaagattgaggtaactccaactgataagcaacctctcctcttctactgacaatcttataaggtcccacaaaacgcggtgccaattttcccttggtatgaaaacgatgaactcctcgtagaggcgtgacacgaagatacacataatctccctcttcaaaactcaaatctctgcggcgattgtcggcataactcttatgacgagactgagccacacgcaatctttcttgaatgatctttaccttttcttctgcttcccttaggatatccgttccgaaaacctgacgttctcccgtttgatcccacaaaagcggagtgcgacacttccgaccatacagtgcttcgtaaggagccatctgaagactagcttgataactgttgttgtacgaaaattctgcatagggtagattcttatcccaacttccaccgaaatctagagcacaagctctcaacatgtcttccaaaatttgattcaccctttcggtttgtccgtctgtctgcggatgataagcagtactaaagttcagcttagaacccatctcttcctgaagtttcttccaaaaatttgaagtaaactgactgcctcgatcagacactatcttcttagggacgccatgcaaacacacaatccttgccatatacaattccgctaagcgacttccggaataagttgtctttaccggaatgaaatgagccactttggtaagtctgtcgactatcacccaaatagagtcatggcctgatgacgttctgggtaaaccagtaataaaatccataccaatttcttcccatttccattcaggaatcttcaaaggttgcaacaaaccggcgggtttttgatgttctgccttgactcgctgacaaacatcacatactgctacgtattctgcgatttcacgcttcatacttgcccaccaaaatctttccttaagatcctggtacatcttagtactaccagggtgaatggagtataaagtatcatgagcttctttcagaattgcatcctttaaatctttgttgtcggggacacagattctctcacccaaccatacagttccgtgctcatcctccaagaaaccaatagcttttcctcttctcatattcttcttgatctcttgaatatcaggatcattaatttgggcttctctaacttgatcaattagagtgggcttcgcttctaaggctgcaacgaaacctctatcgacaattcccaaatttaatctttcaaattccttgcataattccaatggcaactgtcgtccttctgtagcattgcaatagccttttctgctaagagcgtctgctacaacattagcctttcccggatgataatgaattcccatgtcataatccttaattaattccaaccatctccgttgtctcatgttcagatccggctgagtaaagatatactttaaactcttgtgatcggtgtacacttctgtacgagtaccgaaaagataatgatgccaaatcttcaatgcatgaacgactgcagctaactcaatatcatgagtagggtagttcttctcatgcggacgtaactgtcgagaggcataggcaaccaccttcccatcttgcatcagaacacaacctaacccaagtttggatgcatcacaatgcacttgaaaacccttctttggatcaggcaaaatcaaaataggagctgatattaagcgacttttcaattcttgaaaactctgttcacattcttccgaccacttgtacttcacatctttctgaagcagtcgtgtcatgggcttagcaatcttggaaaaattctctataaacctccgataatatcctgcaaggcctaggaaactgcgaatctctgaaactgtctttggttgcttccaattggttacggattccacgttactaggatcgacggcaactcctccggctgagatgacgtgaccaaggaatttcacttcagacaaccaaaattcacacttgctaaacttagcatacagttgatgttctcgtagcttctccaatgcaaggcgaagatgttcttcatgctcttctttggttcgagagtagataagaatatcatcaataaagaccaccacgaacttgtctaggtattccataaacaccttattcatcaagttcatgaagaaagcaggggcattggtaagtccaaaagacataacagtacattcaaacaacccatacctagtggtaaaagttgtcttaggtatatcctcctctttgattctcaactgatgataccctgatcgaagatctatcttggagaaaacagtggcacctttaagttgatcaaacaaatcatcaatcctgggtagtggatacttattcttaatagtcacatcgtttagtgcacgatagtccacacacattctctgagtatggtctttcttttccacaaaaataaccggagctccccatggtgatgaactcggtctgatgtatcctttctgtagcaaatcatctacttgcctcttaacttctgccaactcattggctgccattcgataaggtctcttatggatcggagttgttccaggtaccaaatctattctgaactctatatcccttttaggcggcataccaggtaaatcatctgggaacacatcaggatactcccggactataggaatctcttccaaagttatctggttcagtcttgaccttaaagactcagatgacaatgcatgaacagttacaactcgaccatcatagctgttgagagttacttttctgttggcacagtctatcacacctttatgtctggctaaccagtccatccctaggatgacatcaaggtctttggattttaacaagataagattggccagaaatggtactccttgaatttctattctgacagaggggctacgttgcaaagagagtgcttgattacttggggtactaaccatcaaaggacgtctaagatcttctacttccatcccatgatttcccgcaaaactcgtagataagaatgaatgtgtagcaccagaatcgaaaagtactgttgcaggaactgagttaacaaggaacgtacccaaaatcacatctggagcatcttgagcttctgcagcagcgacatgatttacacgagccttggatgctggtacagcagagttattctgggcagggacaaccttcacacgtcggggcttcggacacttgtcagcataatgtcctggatctccacagttgaaacacaccacgggcttgttgccttgctccctcttggcaggttgttgctgtgctggagctgcaacaggacgtggagcttgattacggatgttgttgccagcattgttgttgaagaactgacgttgcggacgaacaacagacgaagaacctccctgtggcatgggctggggtcctaaagtaagacgcggcttctgattatttccctgttgtgtcttgaattgagcaatccgacgtttcttctgctccatgcgattgtacttgtcctcctgacgaatagccttatccactaatttctggaaatcaggataatctccaaccatgagtgggtaagaaagctcatcattaagtcctcccaaaaacttctcctggcgctcttcatcattgcgcacatcttccggagcataacgagcaagacgattgaactcgtgcagatactccgtaacagagcgagatccctgggaaagcgacctgaactccttcttcttgagagacactactcccgatggtatatgcgtcttccggaaagcagcggtgaattcaagccaagtgataggttcagcagtagtcctgttaaggcggaagtgatcccaccattcagaggcagggccatgcaactgatgtgatgcaaatgagaccttctcctgatcagtacactgaagtaaatccaacttcttctctatggcatgcagccaatcactagcttcaacaggattagtggtactagagaaaacaggcggcctcacacgaagaaattctgctaacttgttttggggaggtgcatgattattcccttggttttgctgattctgaaattgctgcatcatcatgttcataagctgtgtctgttgagcaagaacttgggccagagtgggattctctccattgttgttgttattggggttgttgggaccattcccattgctacgagtgttcaccatctggcatggacagggcacaagaagagaaaccggggaaactacttaggacagagaattactttaacttttattgatcttaactgagtttcattattacaaactgaagactctcacaccactaaactcaccaacttcctaacactcaaaagcaaacaaacacatgcaattacatcccaccactgatgtaaatcacatgcgagacacacacaagcaaacttaaagcaagcaaactaacacaacgatctaagacaacgacttaacaagtcactctagttcttccaagcatcggaggtcgattgaaggctcgtcttcatcatcttgagttgctacccactcaatcttggaattgttgcgcttagattcttcttcttcatcactacttatgatgatgaccggaggatccgcttgagctggagcaacttctttctccaccacacgaacctttggcgccagttgatagcgagggacaaatagagctctcttccttgcggtaagacgaatcctggccttctgcggcggtgcttctcccttcaatgcggctaattccttctccaaacgatccaccttgtcttctaacttgcaaatcttaccacgattccgatcttcacgatcttgagctgctaacacagtctccgcacgactttcatccatagcccacaacatctcaaccaaatgtttcgtggtaacatcattctcaattccttcagtctcaaggtaactgccacggtcacttccctgaggttggcgaggatggtagcgatactcagtgtcggccaattgatcactgtagcgatcacggagctctcctatggcgatccttgccacctcctgacatgcatggatgtagtttcttcctccagcttcaaacatcactgaggggacctcttcactattgctgttcaaggtgactctgactcggcacttctcttcatgacgatcatgaggaatctgggcataaaaaggggcagtcccaaatccaatgacaaaggacatcgtgcgcaactcctggacaaaaccctcaacaccaaacaggtactcaggcttgtaacgcggcatctaaagacaagtgaaaggagggagttaagacctttatccaattaatagcacaagtttttggattaatttgaataaagttagaaaatcagagtaaagaggtaagtaaataaagtaaaccaagctttgcgaaataaattaaaacagttggaaacgaggtcacaaattttgtaattttgaataactggtttcaaaagaaagttataaaatcaacatactaaatttattttattgcagcaagattaaataaaacagtattgtaaaacttttgctggtaaatgagccattagtacagtaatagatgtacagtactaataacactggaataaattttgaatgagaaccattaaaagagattatgaagtgcatgtgccattagtttggtttaattaaaagagaaagggaggagaacagttctacttttccaatatttttcagagggcttctatgggtaaccatttggcataacctagggtcaaagaggctctgataccaacttgtcacgcccggaatttctatccaaaattccaaacgcttacatgtgtgtgaaccctcgtccaggaatcagccgaggcacacaataacaaattgataatagagtacaaatattactctaattaataagcgaataaaatgtcattacagaggtagatagttcctctcaatcaataaagttctaagcagcggaaattaaataaacggcgcagacggctccactccacaggcagcttgaccaaggctacacctaatcctccacaccatcagcctcattgaagaactcttcctctgatgaatgattgcaaggtgagtatatgacatactcagcaagccacgcagcaaatatgcaagtgcacaggataacaaaggatggcataatagggttccatttgcaaaagcagcatttagcaaacatttgagaattttaacaaaacagttaagtaattacacaatattaagccaacgctatacaacataccctgttgtataggcccaaccattctgaacaaccaccccggctgcacagttctatctccaaaccaggaatgtaccattccaaaccaggagctaatcaaattattatcagtttaagcatcttttacaatgatgagaggtgtgagactaatcacgaaagacattgttagacccgcccataaccgcgggcacggctattcgaatagttttactctgatcagaggtgtaccactgtacccacaagacacaaccccacatcatgtcaccatgtgcctcaataccaccacggtatctcggaaaggagttgtgacaatacccctcgcataacacaatccactgcagcgcaccttcctggatcataatcacccccttataaacaaggcatggactccccagcgacccccgtgggcttatctccgccacttctcagtctggtgccccgcaatgaaccatgctatacaaaagataaagccgttgcccatgctggcttgtggttggcacgataaatgtttcacaaccgaaactcgtgaaccggtccttaattgccatgagcacgaccatcaaaaccatgtgcccacaacccaccattaccaggttttagttggcacattaattaattaactaatcacgattgaccatcgtgaactatcaataagccatcatgaaataatagtgagtcattagttatcccataagtgtactaatgtttctaagcagggctaagcaattatatctaatatctagttgaaccaatataaataaagctcaactagtcaaattaatataacccaaggtatcaaggaataaggtaatcaagtacgaaagggccataacaatcaataggttaattccacccaatgacattcgaaaataaatgcaatagttgaaaagaaacaatagctttaaataggatcaacatgctcaaagggttgtttgggatctgtgtgacttgccttgctggccttggaactcttcaaactcttcttccgcgaaaacggactctccggaaacgacggaatctaagcaaaaagaagcaaaatcaccaaaacagcacataaacaagcatgaacagtacatgtggatatttttaatgtgtagatctcaattttagaaaaatttagagacttgaaccaactaaatcggagctaagatgaattagttatgaatttttaaagattaaatcggattaaaacacttatatcggtttaaattgaattatgacgcaataatgaattatttttgaaaaggaaaaggggatttattgcgtcagcgggctagggtttggtggaccgggcgcacgggcggcggttcacgcgaacggacggccgagatttaaccgatccaagatggacggccgagatcgatcgggtccacggcggctcacggcggacgaccccgatgacgtcagcggtgacgtcaccgacagcggcggcggctcggcggagaagacggctcgaacggcgcacgctcgccggcgaacggcggcactaggacgcaaacggagggcaccaagacgtagaggacaacacggcgaactcaccggtgacctaaacggcggcggaagaccaacggacggcgacggcgacgaggaggaagcggcgaagctcttcgggtcgacggcggcgaagctgatccggtgatctccggcgacggcgaaggggcggacgaggacggcgacgacttggcgagcacgacggcggtcttcccgagcgacggcgacggctgaaacgacggcggcgcacggctggagcgacggcgacgacggcaaagctagggcacacggcgctagggcttttccgacgacgagaggcgaaggcgaaggtggcgacgggtagagaagacaccgggggtccttttaaaggggctcggaggcggcggcgaaggcccacggcgacggcaacggcgaaggaaactcgcggcttggagagagggaaaaccgatccgaatcgaactcgattccaaagctttccaaagcgatttaaccaaagattccaaaggagaaaaggtagaggagatcccagagatcatttcccctctaacaaatcggccggagaaggaaaggaacggccggatttggaaagcggcggcgacggcagctcggcggcgcgaaactagggtttcggcccgaggaagacgacgaccgacaagcgggacccacctgtcagcgacagcgagggcgcgcgcgcggctgactgggccggctgggccgaggagagagaagagaggttttgggccgactttcggcccaaagccaaaagaagactttttaaaacctttttcaatttaaattatttcttaaatgcaattccatttattacaaatactttcttagctcaaataaatcccagaaaaatctaggaattatagaattaagcaaagtatttaatgaaattttatctgggcccattttatattggaatttattaattaaaactagattttcttttcaagacttttaaaattatttctaaaaattccatttaaacaacaatttatatattttgaattttcagggtgtgacaccaagtctatccgaaactctatgtctctcttaggtggcatacctggcaaatcctcgggaaacacgtctgggtagtcttgtactataggaatctcttgtagagcaacttggtttaagttcacaccatgatatttaggggaggacacaaagaaagaaacggtttcccaattgctactggttaaagtcaccttacggttggcacaatctataactcctctgtgacgagataaccagtccatccctaagataacatctagatctttggattctagcaagataagcgaggatgggaaaagaacttcttctatttctatagtaacagaaggacaatactatgtcgaaaatacttgattgcctggggtattaactagtaaaggtctcccaagactaacaacttccatcccatgtttgctcgcaaaacttttagacaaaaaggaatgtgtagcaccggaatcaaaaagcacagttgcggtatagagttaacaggaaacgtacccaaaacaacatctggtgcattctgagcttctgctgctgcaacatgattaacacgtgccttcggtgctagaacattggagttgttcggggctggagcgttcttcacatgccgaggcttaggacacttatcagcataatgtcctggatcaccacaattgaagcatatcactggcttgcttccctgttccttcctaacgggctgattctgagctggagttgctgcaggacgagcaaccatgttgcggttgtcattgccacgattaccagtattgttattgtagaactggcgttggggacggacaactgatgaagatcctccttgagggtacgatggagcttgaggtccagtaacgagacgcggcctctggttactgccctgttgtgccttgaattgggcagccctgcgcttcttctgctccatccggttatacttgtcttcctgacgaatcgccttgtccaccaactgctggaaatcccggaaatccgtagacatcaaggcataagacaactcatcattcagtccctccaagaacttctcctgacgctcttcatcggtgcgaacatcttccggagcataacgagctaaacggttgacatcatggaggtactcggtgaccgaacgagatccctgattgagtgctctaaattctctcttctttagagctacaacacctgacggtatatgcgtcttcttaaaagcagtcgtgaactcctgccaagtgataagttctccttcagccctgccttggcgaaaatgatcccaccattcagcagcaggtccatgcaactgatgcgaagcaaaagaaactttctcctgctcagtacactggatcaaatccaacttcttctccaccgcatgcaaccaatctcctgcttctactggattggtggtgcttgaaaaggtagggggtctcacacgtaagaaatctgccaacttgttttggggaggtgggggtggattctgattctgattgtttgcctgctgattctgtgcctgctgcactaacagattgatcagttgtgtttgttgggccagaatctgagctagcgtgggatctcctccattgttagtagctccacttccacttccacttccgcttccacttccggtgccagtgcgcgtgttcaccatctgatgataagcagagacaacaggaaagaacgacagagagacacccttagaacggagttacttaattaatttaaattctatattgctcttaactgtgtatgattacatttaagtggcattaacactatctcaccaactatcttacactctgacaagcaaaagaactagactcatgctgttacatcccaccaatgatgtaagcaacaactaaaacccacacactcacaaacaaacttaaacaagcaatctaacacagcgaactacggcaacgatctaactaagcgactaatcccgccttgcgtcggaacgaagcgatggatcttcttcctctggagtagctggctctctttcttcagggtcttcctcttcttcctcatcacttatgatgtcgatgacaggttcagcacgatcgggcacagcttcacccatcacgcgaatcttcgaagctaactggagacgaggtggcggacaggttctctttcttgcgacgaggcgaagcttgggtgttggcggcggcgtttctcctttgagttcagctaattccttctgtagacggtacaccttgctctccaacttgcaaatcttgcctcgattccagttttccctgtcatgagctgctttgtctcgctccacacttactgcatccatagcactaagcatatgcaccacatgcatcagagtggcactctcttcaccatcaggacagatataggttccatagtcttgaccatgaggcttgtgaggatgatactggaaagctgatgaatccaactcttcttcaaaacgttgacgcaactctccaatggccaccaaagctgcttcttgacaagcatggcagtacgatcttcctccagcttcgaacttaatagacggaaggtcttctctatcactagccaacgtcacacgaacacgacacttctcctcgtcggggtcatgggaaatctggcgatactcaggagcaacttcataacctacctcaaaagccatcaacctcagctccctgacgaatcctaacacctcgatcaaatttctcggtgaatggggcggcatctaaagaaacatggaagagaagaattaatgcatattttttctaagttagctgcaccaactagacttaactgatttttgaccaaaaaggaagaaaataaaagaaaagacacataaaaagctattttataaatatttttagaatttaactttttagatagagacaaatatattttttttgacaaataactaaaacaaaactaaaatacttatgatctattttaagcacggtacagtgtcaccacaagaaagatgagtagtactagtgctaccatgattatgtcgataccataatagatgtacagtgccgactaatcaataagaaaaaagaaatattttgagaagaacaactttttgctattaaaagaaaagaagttgaattaaataaattttgtgcataaccttgcatgtgttgccaacttaattaatttataagagaatagagaagagcagttctattttcaaaatattttgaaggctacttaaggtttaccatttggcttatcctaaggtcaaggtggctctgataccaacttgtcacgccctgaatttctatccaaaattccaaacgcttacatgtgtgttaaaccctcgtccaggaatcaaccgaggcacacaatgacaatattgataatagagtacaattaaataactatttaacaatcgcaaataataaattattacagaggtagatagttcctctcaaaaaaaataacattctacgcagcggaaaaattaaactaaaacaatctacggaacagctatggcaactccactccacagacaacttaaccaggacaagcctaatcctccagaccatcaccttcactcaagtactcctcttctgatgaatgaatattgcaagaatgagcatatgacatactcaacaagccacacagcaaatatgcaagtgcacaggataacaaaggatggcataatacagttcatttgcagaaaacagcatttaataaatatttaagagaatagtaaaacagttgtataattaaccaatattaaataaacaccatacaacacacccgtgttgcataggcccaaccacatttgaacaaccaaccccagttgaacaaattaaacctcgaaaccaggaattatccattccaaactaggcatcaaattaattaccacattattaccattaatgggtagtgtgagactaatcacgaaaaatattgctcaactcacccataaccgcgggtacggctattcgaatagattaaactctgatcagaggtgtaccactgtacccacaagacacaaccccacatcatgtcaccatgtgcctcagtaccaccacggtacctcggaaaggagtcgtgacaatacccctcgcacaacataacccattacagtgctcctttcctggatcataatcaccccctttaaaacaaggcatggactccccagcgacccccatggacttctcgccacttctcagtcgggcgcactataatgaatcacgctatagaaaagataaagccgttgcccacgctggcttgtggttggcacgataaatgtttcacaacagtagctcgcgaaccggtccttaattgtcatgagcacaaccatcaaaaccatatgctcacaacccaccttatccaggttttaattatcaattaattaacatcacacgatttaccatcgtgagctaccattgaatataaccctaattaataataacaattatgtaatataatttatatttaactccttttgttagctaatgtttctaagcatggctaagcaaacttacatatagcatttagccgaaccaatccaatatataaggttcatgctaatcaaattataacccataggaaaataaagtcatcttcggccattaattaattgggaaaggttcaccacccgatgacattcgaaaacaatgcatagttgaaataaaataatagctttaaacatgatcaacatgctcaaagggtcgtttgggatctgtgtgacttgccttgggcttccacaaacgcgtcggaaacttcctcaacggaaacactctcctccggaacgtcgaaaactaaagcaaataaacaaaatcaacaaaacagtacaaaaacaagcataaacagtacatgtgaatatttttaacatgtagatcttgattttagaaaaatttagaaacttgaaccacctgaaacggatctacggttatttagttatgattttccgaagttttaatctattagaaaatcgggaaaaagaaaaagaaaaggagatgatgacgtcatgctgacgtcatgctgacgtcggcaatggcggccggctagggtttgcgagctcgccggagctagggcggtcggccgggtgattggagggcacctacgcgtagaggacatcgagacgaacccgatggtactcaccccgacttcaaacgacgaacgatggcggccggcgacgaggaggatggcggcggcggctcggcttgacggcgacgaggggactccggtggtcggcggcgaaggggaacgggcggccgagattcctctcaccacggcgcacctaacggcggcgacggcaagcggcggcgacggcggagacggcgcgacgacgacgccgaagacggccggcggcggcggcgagcttggcgcgcttggcggcggcgctacggggcacaggagagctcgggagagggggcaaacggaagaggacgacgaggggaagctttatataagctcggattgaagagatcgaactccaaacgagaggaatcggctcggaaaagattaaaactcggttttagggataaaatcaaaacgaactcgattcggatcaaatcctcaacgattctctttgattcttggggaaaaagaaagaggagaacgagaggaacaaaacccctcaaaaacccgaaggaatcggagtcggattgaggcgaatttggaggtggaaggcggcggctcgggctcggtcggcggctggaggtaggagatggatccgacaggtgggccccacctgtcggaatccacgagagaggggagcgggcggcgtcggcttgggccggcatgggccggttcggccgcgcgagagagagaggatgttgggccgaaaacggcccaacggcttagggaggggtttttaaacttttttgaataaaacaatttgtgaaatgttgtttcaattattaaaaatacttcccttgctcaaataattcccagaaaattctagaaaatagaggagcaagcatagtatttaataaaattttatctaactcatttttatattgaaaattttcctagaaaattagggtttagcttgtaggcttttaaaataatttctaaaaatgatttaaaatatgcatttttaatttaatcgatttttagggcgtgacaaacctaccccccttaaacggaatctcgtcctcgagattcagaagaactggcgaacagatgaggatgagctgacttcaattcatcttctcgctcccaagtggcttcttcttctgaatgattactccactgaaccttgcagaaccgtataacgcgattcctggtattcctctcgcttacttccaaaattctgactggcttctcaacataagttaaatcttcttgaagctctatacgatcaggatctgcttcctctgtaggtacacgtaaacatttcttcagctgagacacatggaacacgtcgtgtattcccgccattgacggaggcaactctaactgataagctacttcacctcttcgactcacaatcttaaaaggtcccacaaaacgcggtgccaatttccctttggtttggaaacgatgaacacctcgtaacggcgtaacccgcaggtatacataatctccttcttcgaaagccaaatctctgcgacgattgtcggcataactcttctgacgcgactgagcaacgcgcaacctctcttggataatctttactttttcttctgcctgtcgcaatatgtctgtcccaaaaacttgacgttcaccggtttgatcccaaaggagcggcgtacggcactttcgaccatttaatgcatcatacggagccatttgcaaactagcttgataactgttgttatatgagaattccgcgtacggcaaattcttatcccaacttccaccaaaatctagaacacaggctctcaacatatcttctaaaatttggtttactctttccgtctgaccatctgtttgagggtgataagcagtactgaaattcaaacgagtacccaattctaattgtaatttctgccaaaacttcgaagtaaactggctacctctatctgacactatcttcttaggaacaccatgcaaacataccactctggccatgtataactctgcaagcttatgtcccgtataggttgttttaaccggtataaagtgagcgactttagtcaatctatcaaccactacccaaatagaatcatgtcctgccgacgttctgggtagaccggttataaaatccattcctatttcttcccacttccactctggaatcttcaacggttgtaacagaccggctggtttctgatgttctgccttgacccgctgacatacatcacatagagccacatattctgctatctcacgtcgcatactggcccaccagaattgttgctttaagtcttggtacatcttagtgcttccagggtgaacggaatacaaagtttcatgagcttccttcatgatagtattcttcaactccttattttctgggacgcaaattgtttctcctaaccacacagttccctgctcatcttctacaaaaccgatggctttacctcttctcatgttctttttaatttcttgtatatcaggatcattcacttgagcttctctcacttgatcaaacagagtaggtttagcttctaaagcagccacaaaacctttactgattattcccaagttcaacttttcaaattcttggcataactcccaaggtaaacgtcgaccttctgacatattacagtaacttttcctgctaagggcatcggctacaacatttgctttccccgggtgataatggatttccatatcataatctttaattaactctaaccatcttcgctgacgcatgttcaaatcaggttgagtaaaaatgtacttcaaacttttatgatccgtatatacctcagtacggttaccgaaaagataatgacgccaaatcttcaatgcatgcaccacagctgccaattctaggtcatgcgttgggtagttattctcatgaggacgtaattgcctagatgcataggcaaccacctttccttcttgcatcaacacacaacccaaaccgtgtcgggatgcatcacaatacacttggaaacctttcctcgaatcaggcaaaattaacacaggcgcagtcactagccttttcttcagttcctggaaacttcgttcacaatcctccgtccacttgtacttcacttccttctgaagtagacgagtcattggtctagcgatctttgaaaagttctcaataaacctgcggtaataccatgcaagtccaaggaaactacgaatttctgtaaccgtcttgggttgcttccaacttaatactgactccacattgcttggatctactgccactcctccagacgagatgacatgaccaagaaacttcacttcggacaaccaaaattcacatttactgaacttggcataaagctgatgctcacgtagtttctctaaagctagacgaagatgctcttcatgttcttccttcgtcttggagtaaataagaatgtcatcaataaacaccacgacaaacttatccagatattccataaacaccttgttcatcagattcatgaaaaaggctggggcattagtgagtccaaatgacataacggtacattcgaacaaaccataccgagttgtgaaggcggtcttcggtatatcttcctcacggattcgaagttgatgatatccagaacggagatctatcttggagaaaactgtagcaccttccagttgatcaaacaggtcatcaattctgggtagaggatatttattcttgatagtaacctcattcaacgctcgataatccacgcacattctctgagtatgatctttcttctccacaaagataactggtgctccccatggcgaagtactgggtctgatgtatcctttctgaagcaaatcatccacctgtttcttcacctcagctaactcattagctgccattctgtatggtctcttatggattgggttggttccaggtaccaagtgtcacgcccggaatttctatccaaaattccaaacgcttacatgtgtgtgaaccctcgtccaggaatcagccgaggcacacaataacaaattgataatagagtacaaatattactctaattaataagcgaataaaatgtcattacagaggtagatagttcctctcaatcaataaagttctaagcagcggaaattaaataaacggcgcagacggctccactccacaggcagcttgaccaaggctacacctaatcctccacaccatcagcctcattgaagaactcttcctctgatgaatgattgcaaggtgagtatatgacatactcagcaagccacgcagcaaatatgcaagtgcacaggataacaaaggatggcataatagggttccatttgcaaaagcagcatttagcaaacatttgagaattttaacaaaacagttaagtaattacacaatattaagccaacgctatacaacataccctgttgtataggcccaaccattctgaacaaccaccccggctgcacagttctatcttcaaaccaggaatgtaccattccaaaccaggagctaatcaaattattatcagtttaagcatcttttacaatgatgagaggtgtgagactaatcacgaaagacatttgtagaccccgccataaccgcgggcacggctattcgaatagtttactctgatcagaggtgtaccactgtacccacaagacacaaccccacatcatgtcaccatgtgcct

SEQ ID NO: 25902 - DNA, 8175 bp, Oryza sativa
  unsure (1)..(8175): unsure at all n locations
ggcctctgcagcttatttctggtccaacaccctcaatgcctttatgttcaatcaagggccgatgaccccctgttaacaaccaaatttggtaatatcggcatcgggaaagaagattagatcgaagtgaagtcgaaggcggagatcgaatccgaaaacagagtaggaatcggctggagtccagatcggctatgattaggatcggctgggtctgagttggactaggtaagccgatgcagccgattccgacaatacgacttgatgtatgacattgggttgaattgaggtggttcaagatgattgccgcgcatggatagagtcttgagaaggcaattgtatctattaattaggatattttatgtaatttccttagagatatgcttgggcaaaagtctgccgcaaagacttatggtatcttagagtttgttagagataatagtcgtgtctggtatggacatgtcttgtaattctggggtataaatagacctgagccctatgtaattttaaacacacacacgttcaatacaatttcggcgcatcgccaccttttgctttagttttatttcgacgagttcttgctttcgggttgagctgcgttggtttcgatcttcaacaaaaggtaaaacttgttatgatggattgtgttctagggataagtgcttccatctttacgatactctaatcttgtctatgtaattcgtcaagttatcatatatcttacataatcttcgacaatatcgtcatctaacctacaatcggctagcatctgtcgacagaaggcagccgattaggttaaatagcggcgttgacgtagattatataagatatctaccactttatgaaacatccagcggcttgattgtctatatattgttcttcttttcatacttaatgctgcatcagttgagtttgatctattaagtcgtgcttagagtttcaatctctagcctgctttctggttgctgattagggtagtatcagagtttcatccgatcttatctgatttaaccatattcgctctatatgcttcattgatatgttaaatccaccctttacgtcaagatcttactgcatttaagtatattaggcttttgtttgatatattatacttgttttgatatcttgatatagagtagtatcggagtattagccgatacatgctagatctatctgatcggctatgctataaacatatataatgctgttattaatatatatttcgatctaagtgatttatactgtctcggcatggcaaccgatctatcccagtcacttgatttaagtatatatcgatataagaactatatattgttaatatctacagccgatcgaatatatttagttctttattgtctatttacaaccgccgatcgattcacatatgacatcggctcaaagataaatgatatgtcattggcacctagccgatcggctatcatttatagatttaaccgcggtctatttgtctctatttcttgttgattacagaatcaaatcaactggcacgcttatacatccaaaggcgaggtttggacctgcactggagttaagcagatctcccaggcctcgtgttttctgtcaacacccccactctgcttgacgtcatcatgattactggtttagatgtcacctcttcaaccaatcccatgaccctgaactccaagaaccagtttgagtttaaaacaaaaaccataggtggctggtctggctatgtcgctgcaaacatgggcaaaggatctgtcaccccccaagagcacacaacctttctgctaatgtggcttgagaaattcctgttctgtggatcgagttgtggccctaccaccaactggcagttcttagccgaaagccttgaagcaaagaaacaaatctgtttaggcaaaatcctcctcggctatctgtatcagatgttgaacaacgcatcgactaaaatagccacaagctcgatagtagctgcaagtggaccatggtggttactgcaaacatggcttaacttagtcgtcatgaaagctgtgaatcagccagccctatcagagtcctagtttccaagtctaaagccgatcgccaatgaagatgggggagaactaactcatcgcagatgcatgtcctatggagaagttgcatcaacaccagccaattctggagcaaagctatcagctgaactgctcaaggactggttctctagcttctacgatggcttcaagaaagatgctcgagtctagttcgcatatgaggatacagtagactttgagctaccatcggacttccggtttgaagaaatcaactctgagaagtacgataagtctagagaagtcttttcagctgctatcagcccgtgtattcttcctattggcattcatcaaggaagaaatatacaagtatcctatgagttctatcacccaatgagctcggccaggcagtttgggatgggacaggtcccaatcggcttgtacttcactgataagatccaatgcagaggagaaatctcatcaacactgatgatggatcggctgctcaacatcccaggacctcctttgggcagcattgaaaatatagagctagcaaggttcaagagcaggaactttgacagatggtggggtgaatggaagcaacacttgttccaacaatcggcttccatgtacatgacagatctattcccggatgtcatccctcaggtatatcttgactaatctcttcttctattttgcagacaacagaatcctgtcctcctcgcaaaagcaatagtggcaaggatatagaatatgctccaggccttatcccaaatggaggtggactagctccccctgtcattggctaccatgccccaggacctcaagtttactccaagggcagctgggagaatcggccgatgttggcaaaaagaggaaaactaaggcatcagctattgattcatcaactctagcaccaaagaaaaaggccaaaaagaagaaatccaagcaaaccaatgatttgcctgccatagacccgtccatagaacaagccttggatgaagaggaaatcgaggaagatgttgaccaagcggcaaccgaactgagtgacttaggagaaaaaacaccatcggctttacccaaacagactcctccaactcctgcttctccagcccacttttcaatggtaaataactcatcttgatcacctttttgaaaaaattgtagagccgattatttgtaagtcttgtatttgcagaaaaagaaaactactgtgaagaagaaattgacactagcaccatctaaacaggttccatcggtaaggtttcttctgtaaaatcttttaaatttgctcgtagccgatgataattaacacttgtctcttttagcgtcctcctccttcacctcctgtacagctgatgtcaagtgaccgtagtccatcggctatagacagccacaacattgaggaagaagaagaaccagcagctcctgccatcctagtaagtctcattctaaaaattcccagatcggctgtataacatattttgatattcaattatctcaatttccacttttgcaggtattagctgatatgttctcctttgatatcaaggattatcttgatcaagaggcaaaagatgaaacaacangcaagaccctagcttctctagacgaagatgtcaaaagaactcttgaagatatatctcatcggctagaggcatctttaaacaatttgtgggtgattgtggtccattcgggcaagacttcgagaaattcacgctctgatcccggatgatctttcgaacaccatcactccagctgcatacctcgagccacatcaattcaagctagaaaaaactaaccaaagattacccgaatggcgagagcggaaggacatcgaagccacaatccaagccatcggcnaactcgtgcatgaagagaagtccaagcttgataaattatctgaaggtccgatccagtccaacatagatcggcttgaggcccgaaagattgatctcatggcacaacttgaagaatgcaatgctaaattggccttggaaacacagaagctagccaatctcccaaaagcaatcgaagagaaaaaatcatgacttaaatcggccatcaaaaatgttgctgatttaaccaagtctgtgaaggttatcccaggaaccgatgcccaagacatccaagaagtagaggaaattagacaatgacctatatcggctatcctgcaatacctctctaaatgattggctttgtaataagacttagcttgaaactcatttttgtaatcggctatttgtagtctaactcttaatccatctgccgattaatataattttcgcgttgaaaatccactttttttttcatatatctgcccccctaattttgcaatgacgaaggcattgataaaattataacttgtactaagggcgatatagcaaatatcggccatcatacatcggcaaaacaccatcgattataataatacagaaaaacaactaagggcgatataaccatatcggccgtcatacatcggcaagacacaaccgattatgataacaaaactaagggcgatataactatatcggccatctgaaggcgatctaaatacatcggctaacatgcatcggcaacacttagccgatcatgcaatgacccagacacttgggtaatatttcttcaagtacttgtcattaagtgctcgtccataaacttctccatcaaacccttgcaacatacaagctcctttggacacaaccttatggatttgaaacggtccttcccaatttggtgaccacttgtcacgccatgaaaatcgcctagtttaataattcattctttaaatcatttttagaaattattttagaagcttacaagttaaactctaataatctaggaaaaatttcaacataaaattgagctagataaaattttattaaatactttgcttgtttatctattttctagatttttttggaaattatttgagcaagggaagtatttttaataaatgaaacatcatttcacgaattattttaattgaaaaagtctttaaaattccctaggccgttgggccgtttccggcccaactcctcttttcctcgcgcgcggccgtgcggcccaagccggcccaagccgagccgccaccgcccccctccttttagccgccgacatgtggggcccacatgtcggggttgtcttcaacctccagccggcctgccgagcccaagccgccgccgttccccgccaaatccgccccaaccggccatctctgagtccgattggttgaggggtttttatccctttgttgtcctctatcctttccccaagaattggagctaattgcttcgtattttatccgaatcaaactcgatttcgagtttatctttccacctaaccctaggattttccggcttcgattcctctcgtttggagtccgatttctctaatccaagcctataaatagcatcccctagtcatcctcttctgtttgcccgaagtcctagccgtcgccgttgcccatagcaccgccgccgcgttgaactagtcgccgccgccgccgatgccgttccagccgcgccgcgccgccgctgtagccgtcgccgccgcttcccattcgccgccgtcgggtgcgtgcgaagaaggagtaccccggcaaccccttcgccgccgtcgcaagccgccagagcgccgtcgccaccgtcgagccgagccgcgccgtcctcggtcctcgtcgccggccgttgttcgtcgtcgtccgtcgttgttctttgcaccggtgagttcgcgtcgtcgtcctctacgcgtaggtgtccttggatagcccggccgagccctctaccaccggtggtcgcgtcatcccgcaccatggccggcgatgatgtcgtaatgacgtcataaatcttttatttaattcgtaataattttctgtatttgatgaaaatctgattaaacttcagaaattcataactaaatcatcgtaactcggattcgagtggttcaagttgctaaattcatctaaaatcgagatctacatgttaaaaatatccacatgttctgtttatgcttgtttttgtactgttttgttgattttgttcatttgctttagtttctgacgttctggaggagagcgttttcgttgaggaaggttcagaagcgtttgaagaagctcaaggcaagtcacatggatcccaaacaaccttttgagcatgttgaacctgtttaaagctaatgttttattttaacttatgcattattttcgaatgtcatcgggtggtgaacctttcccaattaattaatggtcgaagatgactttattttcctatgggttataatttgattagctagaaccttatatattggtttggttcagctaaatgctatatgtataattgcttagccatgcttagaaatattagctcatcaatgggatgaatcatattacattattatttatgtttatatatttaatggtagctcacgatggttaatcatgttatgataattaattgataattaaaaccttattaaaggtgggttgtgagcatatggttttgatggtcgtgctcatgacaattaaggaccagttcgcgagctactgttgtgaaacattaaccgtgacaaccacaagccagcatgggtaacagctttaccttttgtatagaatagttcattacggggtgccagactgagaagcggcgagaagtccgtgggggtcgctggggagtccatgcctctggttattgagggggtgattatgatccaggaacggtgcgctgtggtggattgtgttgtgtaaggggtactgtcacagttcctatccgagatatcatggtggtattgaggcgcatggtgacatgttgtggagctatgtcttgtgggtatagtggtacacctctggccagagtaaaactattcgaatagccgtgcccgcggttatgggtgagtttaacaatgtttttcgtcattagtctcacactactcattattggtgatagtttgtgataactaaattgactcctggtttggaatggtatattcctggtatggaggtttgatttgtacaaccggggttggttgttcaggtgaggttgggcctatgcaacacgggtgtgttgtatagtgttcatttaatattgcttaattactcaactgttttactgttctctcaaatgtttattaaatgttgtttatgcaattgagctgtattatgccatgctttgttatcctgtgcacttgcatatttgttgtgtggcttattgagtatgtcatatgctcattcttgcaatattcattcattagaggaggagtactttagtgaaggtgatgatcaggagggttaggctttgttcgggtcaagttgcttgtggagtggagtcgccatagctgtttagtcttatgtttatttccgctgcgtagaattttattcttttgagaggaactatccacctctataataatttattattttgcgaatattaattagctgtttgatagtattctattatcaatttgttattgtgtgcctcggctgattcctggatgaggatttaacgcacatgtaagcgtttggaattttggatagaaattccgggcgtgacaccacatgccgaatttgttatctgagttcctatcggcaaaattagcttccaaacaagctctccctcagaaaaagacttaggcaccaccttcttgttataatgttgagcaaccctttccttatccttggtagcttttgcaagagctctcaatctggattgaaccaaatcttccttctcatcggccatgagattataatattcattagctgacaactcattctgcaaatctgttcccatggtaaaactgcctcaaatcaatccgtggcaagccatccgataagaccacaatgcttcagccaacctagtatgccattgccgaggataatcagaaatctttctcttaatcaacttgatcaaactcttgttagacgcctcggcttgtccattggcttgtgcataatacgacgcagaattcaacattttgatacccatgctatcggcaaactgaacaaactcattagacacaaagatagacccttgatcggttgtaattgtttgaggaatcccaaatcggtaaataatatactcttgaacgagttgtatagcatcccccaaatcattagcttcaacattttgctcccgagatacatgctttaaagttaccagccgaaatccatccatcaact

SEQ ID NO: 25903 - DNA, 6888 bp, Oryza sativa
acttaatatcttaagccctgaagcagcatcaaccaatttatcggcaaccggcattgggtacttgtcctttggggtagccttgtttagatcccgaaaatcagtgcacactctgaccttgccatttttcttgataactggaactatattagaaacccactcagcatatcggcatggacggataaaaccagcatcatataaacgtgtaaccttagccttgacagcatcgagcatatcggctttgcatctcctcggcaactgctggtatggtctaacccccggtttaataggaagccgatgttcaacaatcgatcggctgagtcctggcatctcataatactcccaagcgaagcaatctttatattcctttaaaagctctatcagcttggctctgaattctggagataagttattgctgatgaatgtcggcctgggtctatcacctggacctatatcaatttcttccaaatcatcagctgacatgaaaccctgtccttgcttgtcatcgagatcatctactgtatccttggtgtagacgtttgaacccaccacgatgccctcaaaataataatttgggctctccatcttcaattgtgtcacgcccggaatttctatccaaaattccaaacgcttacatgtgtgtaaaccctcgtccaggaatcagctgaggcacacagtaacaaattgataatagagtgcaattattactctaattaataatcgaatataaagtcattacagaggtagatagttcctctcaaacaataaagatctaagcagcggaaaataagataaacgcacagacgactccattccacaagcagcttgaccaggactacgcctaatcctccacaccttcagcaacactatagaactccacctctgatgaatgtttgcaaggtgagtatatgacatactcaacaagccacgcagcaaatatgcaaatgcaagcgataacaaaggatggcataatatagtgtcatttgcataaatggcatttaataaatacttcagaatttaataaagcagtaaagtatttaattaagcaatattaatccatcgctatacaacatacctattgcataggcccaaccattctgaacaaccattcccggctgcacagttctatctccaaaccaggaatataccattccaaaccaggagctaaacaagttattaccaattacagcatcatttattacggtgagaggtatgagactaatcacaaaagacattgttagacccgcccataaccgcgggcacggctattcgaatagttttactctggtgagaggtgtaccactgtacccacaagacacaacctcaacatcatgtcaaccatgcatcgtgatacttaacaagtacccgaatagagatggtgacaataccctatgcataacacaattcaaagcagtgcaccgttcctggatcataatcacccccttataaacaaggcatggactccccagcgacccccgtgggcttatctccgccacttcatagtctggtgctctaaaatgaaccatactatacaaaaagtaaagccgttgcccatgctggctaatggttggcacggttaatgtttcacaaccgaaaatcgtgaaccggtccttaattgtcatgagcacgacagcaaaacgatgtgctcacaacccaccattatcagtttcagttgacaaattaattaatgaaccaatcacaattaaccatcgtgagctatcattaagccatcattaaatcatagtgaatcataagttatcccatttatatgagctagtgtctctaagcaaggctaagcatcctaagcactttagctaaaaccatataatgttctagctaatccaattattaaccaagtgacaaaggatagataatcaataaccaaaaaggctataacaaaggcaataggtcattcccacccaatgacattcaaaaatatatgcaatagttaaatagaaacaatagctttaaacaggatcaacatgctcaaagggttgtttgggatctatgtgacttgccttgctggcattggaactcttcaaagtcttctcctgcaaaatcagactctccgggaaggtcggaatctaagcagaaaagagcaaaatcaccaaaaaacggacggcctacgaaacggacggccgagatctaatctaatccaaaacggatggccgagatctaatcggtctaccgtgggtctacgggtaacgcaatgctgacgtcggcgatgacgtcatcaccaacggcggcttggcaactcacgctcgccggcgtacgacggcggtgctcctgcggtcttcggcggaaacggagggctggacgaggacgacgacgacttggcgatcccgacggtggccttcctgagcgacaacaatgaccagagcggcggcggtgcacggctggtctcccttcggcggcggcggcgcacgacttgacgcggaatcggcactacaagcggtggcgagctaaagcgagggtggcggcggatagaggaggtcccgggggtccttttataggggctagggggcggcgacggaggcccacggcggccggcgaaggcgaaggaaagcttagggttcgggaggaaaaacgaatccgaatcgagctcgaatcctacgatttccaaacgaaattagatgaagattccaaaacagaaaaggaagaggggatcccggggatcattacccctctactgattcgattggatcgggaaaagagtggtcgaatttggaaggaggcggcggcggcttgcgcgcggctagggcacggctgcggcgggaggaggaagacgaccctgacaggtgggccccacctgtcagagggagagaggagggagagcggcggctcggctcggcgggctgacttgggccgggcgcgcttgcaggccaaggagagagagagaggggttttgggccgactttcggcccaaagccaaaagaggacttttaaaacctttttcattttaaattattcatgaaatgcaattccatttattaaaaatacttccttggctcaaataaatcccagaaaaatctaggaactatagaatcaaatgaagtatttaataaaattttatctagcccacttttatattggattttattatttaaaattagatcttctctttctaagcttttaaaatcatttctaataattccatttaaacaacaatttataaatttaggattttcagggtgtgacaaacctaccgtcttaaacagaatctcgtcctcgagattcggaagagctggcgaaaagatgcgaatgagctgactttaattcttcttctcgttcccaggtagcttcttcttccgagtgattactccattggaccttacagaaacggataactcgattcctggttcttctctcatctgtctccaggatacggattggtttctcaacatatgtcaaatcctcttggatttcaatctgctcaagattagcttcttcagtgtgtacccttaaacactttttcaactatgacacatggaacacattatgaacacctgccaagcattgaggtaactccaactgataagcaacctcacctcttctactgacaatcttataaggtcccacaaaacgcggtgccaattttcctttggtgtgaaaacgatgaaccccccaaagaggcatgacacgaaggtacacatgatctccttcctcaaaacttaaatccctgcggcgattgtcggcataactcttatgacgagactgagctatacgcaacctctcttgagtgatctttaccttctcttctacttccctcagaatatcagtcccgaaaacctgacgttctcgcgtttgatcccacaacagcggagtgcggcacttccgaccatacagtgcttcataaggagccatttgaagactagcttgataactgttgttgtatgagaattccgcgtaaggcagattcttatcccaacttccaccgaagtctaaagcacaagctctcaacatgtcttccaaaatctgatttaccctttcaatttgtccgtctgtctgcggatgataagcggtactgaagttcagcttggaacccatctcttcctgaagcttcttccaaaactttgaagtaaactggctacctcgatcggatactattttcttaggcactccgtgcaaacacacaattcttgccatatacaattccgccaaacgacttccggaatatgttgtcctcacagggatgaaatgagccactttggtaagtttgtcgactatcacccaaatagagtcatggcctgatgacgttctgggtagaccagtgatgaaatccatccaaatttcctcccacttccattctggtatcattaagggctgcagcaaacctgtgggtttctgatgttctgccttgactcgctaacaaacatcacacacagctacatactctgctatctcacgctttatacttgcccaccaaaatttctccttgagatcttggtacatcttggtactaccagggtgaatggagtataaagtgtcatgagcttccttcaagattgcatttttcaactccttgttctctgggacacaaattctctcacccaaccatacggttccttgctcatcttccaaatacccgatagcctttccccttctcatgttcttcttaatctcttgaatatcaggatcattgatttgagcttctctaacctggtcaatgagagtgggcttcgcttctaaagctgcaacaaaacctctactgacaattcccaaattcaatctttcaaattccttgcataattcccacggcaaccgccgtccttccgtagcattgcaatagcctttcctgctgagagcatctgctacaacattagcctttcccgggtgataatgaattcccatgtcataatccttaatcagttccaaccatctccgctgtctcatgttcagatccggctgagtaaagatatactttaaacccttgtgattcgtgtacacctccgtacgagtaccaaagaggtagtgacgccaaatcttcaacgcatgaaccactgcggctaactcaaggtcatgactagggtagttcttctcatgcggatgtaactgacgagatgcatacgcaaccaccttcccatcttgcatcagaacacaacctaacccaagcttagatgcgtcgtagtacacatggaaacccttctttggatcaggcaaaatcaaaatgggtgttgatattaagcgacttttcaactcttgaaaactctgctcacattcttctgaccacttgtacttcacatctttctaaagcagttgtgtcatgggcttagcaatcttggaaaaattctctatgaacctccggtaatagcctgcaagacccaggaaactatgaatctcggagactgtcttcggttgtttctagttggttactcattccacattactcggatcaacggcaactcctccggctgagatgacgtgtccaaggaactttacttcagacaaccaaaattcacatttgctaaacttggcatacagttgatgttctcgtagcttctctagtgcaaggcgaaggtgttcttcatgctcttctttggttcgggagtagataagaatgtcatcaataaaaaccaccacgaacttgtccaggtattccataaacaccttattcatcaagttcatgaagaaagcgggggcattggtaagtccaaaagacataacagtacattcaaacaacccatcttgagtggtaaaatccgtcttaggtatatcttcctctttaatcctcaactgccctgatcgaagatcgatcttggagaaaacggtggctcctttaagctgaacaaacaaatcatcaattctaggcagtgggtatttattcttgatagtcacatcatttagtgcacgataatccatacacatcctctcagtatgatctttcttttccacaaaaatgactggagctccccatggagacgaacttggtctaatgtattgtcacgcccggaatttctatccaaaattccaaacgcttgcatgtgtgtaaaccatcgtccaggaatcagccaaggcacacaataacaaattgataatagagtacaattattactctaattaataagcgaacataaagtcattacagaggtagataattcctctcaaacaataaagttctaagtagtgcaaaataagataaacggcgcaggtgactccattccacaagcagcttgactagggctacgcctaatcctccacaccttcggcatcactgtagaactcctcctctgatgaatgattgcaaggtgagtatatgacatactcaacaagccacgcagcaaatatgcaagtgcaagggataacaaaggatggcataatatagtctcatttgcataaatggcatttaataaatatttcagaatttaataaaacagaaaagtatttaattaagcaatattaatccatctctatacaacatacccgttgcataggcccaaccattctgaacaaccaatcccggctgcacagttctatctccaaaccaggaatataccattccaagccaggagttaaacaaattattatcaagtacaacatcatttattatggtgagaggtgtgaaactaatcacgaaaaacattgttacacccgcccataaccgtgggcacggctattcgaatagttttactctggccagaggtataccactgtacccacaagacacaacctcaacatcatgtcaaccatgcgtcgcgatacttaacaagtacccgaatagagatggtcacaataccctctgcataacacaattcaaagcagtgcaccgttcctagatcataatcacccccttataaacaaggcatggactccccagcgacccccgtgggcttatctccgccacttcatagtctggtgctctacaatgaaccatattatacaaaaagtaaagcc

SEQ ID NO: 25904 - DNA, 29197 bp, Oryza sativa
acataaccaatcatgaccagtacatgtggatatttttaacatgtagatctcaattttagaaaaatttagagacttgaaccaactaaatccgagcttagatgaattagttatgaatttttaaagattaaatcggattaaatcatttatatagattttaattgaattatgacgcaataaagaattatttttgaaaaggaaaaaggatttattgcttcagcggctcgggtttacggtggaccgggtgcacaggaatggtctacggaatggacggctgagatctaatcctatccaaaacggatggccgagatcaacttgatctaccgcggtctacggctgacgtcgacgatgacatcggcgatgacgtcaccaccgggggcggctcggccacgcacgctcgccggcgaacgatggcgcggcggcgcaaacggagggcacctacgggtagcgggcgacgcggcgaactcaccgcaagcacggacggcggcggacggcaaccagacggcgacggcgacgaggttgaagtgacggcggcgttcggttcgacgacgacggcggtgctccggtgatcttcgacggaaacagaggggtggacgaggacggtgacgacttggcgaacctgacggtggccttcccgagcgacgacgacgacctaagcgacggtatgatccttttgcttcaatgccctgaactcacgcttcttcaaagcaacaactcctacaggtatgtgtgtcttcttgaatgcctcagtgaactccgcccaagtgattggttgtccttctgctctgttcacccggaaatgatcccaccattctgatgcaggtccttgcaactgatgtgaagcgaaaacaactttctcctgatccgtgcactggagcagttccaacttcttctcaatagtgtgcaaccaatcacctgcttccactgggttagtagtactagaaaaggtaggtggcctcacacgaagaaaatcagctagcttgttctgcggcggtggagcattgttgtttccttggttgagctggttctgcatctgctgtatcatcatgttcattaattgagtctgttgagccagaacttgagcaagagttgggttatcttcattgttattatttccacttccactggtgcgagtgttcaccatctgttgcatattagagaagatagaaggagaggggttacactaaagacaagaccttaaccaggttaacactgatctgatgtgtgtagaccattatattgttcaggttgattaagcaagcaacctagtacagttacacactcatcaatgaactactccaatgatgggaatgcaaccatacctacacacaaagcaaacaaacgttctaccctactaactattcttcaaagacactttggcggcataggtttctaaggtaggatccaaacttcattccatcttgaccacttggcacttcggtccttcctcgatccacttgactgacctccataagtagacctcattggcgtcttcaagtttcaacaactagtttcagaactactcaagttgaaagcaggaggggagaggatgataaaacaatttgcaaagaattctagataaggaagaaaggagaaattttcacaaatcatgttttcggaaaatttgtccttaaggtttgaccatttggcttatcctacagtcgagatggctctgataccaacttgtcacgcccggaaattcactagtaatttccgaacttatttgtgcatgaaatcctcgtccaggaatcagccgaggtacacaaattgacaatttaatatacagattcatcaaattaactaaaacgataaatacttacttaagaggcactaagtcctcaccaagaagaaaactgcagcggaaaataaaatctagcgaagctccggctacactcccacaggcagctcaactggggtataagccaaacgtcttctccttctggatcctttttcttcaactgaggttgattgattattgcaaggtgagcatatgacatactcagcaagccacacaacaaatatgcaagtgcacaaggataccaaaggatggcataatataggctcatttgcaaaagcagcatttagcaaaacatttaagaggaataaaatagtggagtagttaatcagaaattttaatcaacactgaacagcacacccatgctgcacaggcccaaccatcctgaacaaccatacccggctgtacagatcaaatctccaaaccaggagctaagcaaattattaccagtataacatcattaattattgtgagaggtgtgagactaatcacgaaaaacattgctcaactcgcccataaccgcgggcacgactattcgaatagttttactctggccagaggtgtaccactgtatccacaagacacagcctcaacatcatgtctaccatgcgtcgcgatactggaaagtacccgaatagaagctgtgacaataccctctgcacaacacaactcacgacagtgcaccattcctggatcataatcacccccttataaaacaaggcatggactccccagcgacccctgtgggcttatctccgccacttctcagtctggtgctccgcaatgaatcatgctatacaaaaggtaaagctgttgcccacgctggcttgtggttggcacgattaatgtttcacaatagtagctcgcgaaccggtccttaattgtcatgagcacgactctcaaaaccatgtactcacaacccaccattatcaagttttagttggcaagtaattaattaaccaatcacgattgaccatcgtgaactatcattaagccatcataataatgagtcataagttatcccaatagtgtgctaatgtttctaagcatggctaagcaatcatatctaatatctagctgaactaatatatatagctcaactagttaagttataatatcccaaggtatcaaggaatagagtaatcaatgcaaacaggccataacaaaggaatagattcacaccacccaatgacattcgaaaataaatacacagttgaaataaatagagaatttaaatataggatcaacatgctcaaaggattgtgtttaggatctgtgtgacttgccttgcaataatcggtcttcaattaatcttcttgaatacttccggcgcactcgcgaacctttgcaatgacggaaacgacaagctaacacgcaaaacgaagaaaaagactaataaaaaccaaataaacaatacatataaagtaaacaaacatgtagattataattttagatgaattatgagacttgaacggcctcattctgacttcaaatgaatttattatgaattttacaagattaaatctatttaaagcccatttaaaaagaattaaataaatttaattcaatttatggaaaattttaatatgtagatctttattttacacaatttttgcaacttgaaccacattaaactgagttcaaatgaattagttatgaatttttaaagattaaatcggattaaaacacttatatggattttaattgaattatgacgcaataatgaattatttttgaaaaggaaaaagggtttattgcgtcagcgctagggtttgcggtggaccgggcgcacggcaacggtccacgggaacggacggccgagatcaaccctatccaaaacggacggccgagatcgatcctatccaaaacggatggccgagatcgaacggtccacgacgggtctacggcagacggccacgatgacgtcagcgacaacgtcagcgatgacgtcagcaccggcggcgactcgggcggctcgggcgcgcatgctcgccggcgaacgacggcgcggcgacgcgaacggagggcaccaacgggtagagggcgacgcggcgaactcaccggtgaccaaagaagcggcggaggaacaacggacagcgccggcgacaaggaagaagcggcggcggagatcgggtcgacggtggtgacggtgctccggcggtcttcggcagcggcgaaggggcggacgaggacggcgacgcgacggcgaccacgatggtgacctccccgagcgacgacgacgactggagtgacggcggcacacggctggagcggcggcgacaacggcggcacgaggcggcacggcgctagggcgctacaagcgacgagaggcgaaggcgagggtggcggcggttagaggagagctcgggggtccttttaaaggggctagcgagcggcggcggaggcccacggcgaccggcggcgagaaggaaagattaaggttagaggagagagatcgatccgaatcaaactcgaatccacggatttccaaaccgaattagctcatgattccataagagaaaagatagaggagatctcaaggatcatttgccctcaatcaatttcacccgatcgggaaagacgcggccgaatttggaagaagacggcggcacggctcggctagggttcggcggcgcgcggcggcgcgagaaaacgaacctgacaggtgggacccacctgtcagcggccgagagagaggaggaaggggcgcggcggactaggccgactgggccggggagggagagagaaagagagaggttttgggccgactttcggcccaaagccaaaaggaggatttaaaaacatttttctatttaaattattcatgaaatgcaattccatttattaaaaatacttccttagctcaaataaatcccagaaaaatctaggaattatagaattaagcaaagtatttaacaaaattttatctagcccaattttatattgagatttagcaaattaaaattagatcttctcttttagacttttaaaatcatttctaataattccttttaaacaacaatttataatttaaggatttttaaacaagaaaaactcttaacaattataattagatcattatttatcaaataattactgaactgttctttgtatcatttaggaattgagctccgaaagatccgagaatatttcagagagtgtaattaaccatggagaatttaataaaaaaattaaatccattcatgctttatatttaggaaattttatttcccacatttaacttcacttgtaaattaaagatcatttaatataaattctattattagtttattaaataatttataaatcctgaaacaaaaatcaggatgtgacagaggcccacggcggccggcggcgagaaggaaagattagggttagagggagaaaattgaatccgaatcgagctcgaatccgacgatttccaaacgaaattagcgagagattccaaaagacaaaaggaagaggggatcccggggatcatttcccctctattaatttgatcggatcgggaaaggggcgggcgaatttggaaggggcggcggcggctagggctcggctgcggcggcgcgaggaggaagacgactctgacaggtgggccccacctgtccgcaggagggagagggggagagcggcggctcggctcggcgggctggatgggcctggcgctagcaggccggggtgagagagaggggttttgggccgactttcggcccaaagccaaaagaggatttttaaaacctttttcaatttaaattattcgtgaaatgcaattctatttattaaaaatacttccttggctcaaataaatcctagaaaaatctaggaactatagaatcaaatgaagtatttaataaaattttatctagcccactttcatattggaatttattatttaaaattagatcttttcttctaggcttttaaaatcatttctaataattccaattaaacaacaatttataaatttggggtttttagggtgtgacatgtatcctttctgaagcaaatcatctacttgcctcttgacctctgctagttcattggctgccattctataaggtctcttatggatcggagtttttcttggtaccagatctattctgaattctatatctctcttgggcggcataccaggtaaatcatccgggaacacatccgggtagtcctgtactatgggaatctcttccaaacttacttggttcagacttgaccttaaaggctcagaaggcaatgcgtaaacagttacaacttgaccgtcattgctggtgagagttacttttctattggcacagtctatcacacctttatatcgggctaaccagtccatccctaggatgacatcaaggtctttggattctaatagaataaggttggccagaaatggtactccttgaatctctattctgacggaggggctacgttgtgacgagagtgcttggttgctgggggtactaaccatcaacggacgtctaagatcttctacctccatcccgtgatttctcgcaaaactcatagacaaaaatgaatgtgtagcaccagaatcgaaaagcactgttgcaggaactgagttaacaaggaacgtacccaaaatcacatctggagcaccttgggcttctgcagcagcaacatgattgacacgagccttggacactggtgcggtggagttgttctgtgcagggacaaccttcacgcgccggggcttcggacacttgtcagaataatgacctggttccccacagttgaagcacactcttggcttgtttcccggctccctcttggcaggctgatgctgggctagagttgcaacaggacgtggagcttggttgcggttgttgttgccagaattgttgttgaagaactgacgctgtggacgggcaaccaacgaagatcctccctgtgacactgcctgaggtcccatagcaagacacggcctctgactattcccctgctgagctttgaagtgagcaatcctgcgtttcttctgctccattcggttgtacttgtcctcctggcgaatggccatatccaccaacttctggaaatcatgataatccccagtcattaatgggtaagagagctcatcattcagtccttccaagaacttctcttgacgctcttcatctgtacgtacatcttctggagcatagcgagctagacgattaaattcatgcaagtattcagtgacagagcgagatccctgagtgagcgtcctgaactccttcttcttgggagacaccactcccgacggtatgtgagttttccgcaaagcagcagtgaactcaagccaagtgattggttccgcagtggtcctgttgagacggaagtgatcccaccactcagaggcagggccatgaagctgatgtgaagcgaaggagactttttcttgattagtgcactgaagcaggtccaatttcttttctatggcgtgcagccaatcactagcctcaactggattggtagtgctagaaaaagtgggcggcctcacacgaagaaattctgctaacttgttctggggaggtgcatggttgttcccctggttctgctggttctggaattgctgcatcatcatgttcatgagctgtgcctgttggaccaggacttgggcaagcgtgggattctctccattgttgttgttgttgttgttgttgttgtttgggccattcccattgctgtgagtaagcaccatttggcataggcaggagcacaagaagagaaacaaggaggaaaaaactacttaggacagggaattgatttttattaacttgacttttattgatcttaactgagtttcattattacacaaaactgaagactctcacacaacttaacttaaactccctaacactcgaaagcaaacaaacgcatgcatttacatcccaacaatgatgtaaaccacatgcaagacccacacacgcaaccaaacttaaacaagcaaactaacacaatgatctagggcaacgacttaacaaggcgttctagatcttccgggcatcggaattgattgaaggctcgttcggcttgcccccatcatcttgagtagctccccactcgacctttgaatgggtgcgcttcgattcttctccatcatcatcacttacgttaacgaccgaaggattcgctgagactgggacaacttcttcttcttccaccacacgaaccttaggcgccaactggtagcgagggacaaatagagctctcttccttgtggtaagacgaaccctggccttttgtggtggtgcttctcccttcaacgcggctagttccttctccaaacgatcaactttgtcctcaagcttacatatcttaccacgattccggtcttcacgatcttgagcagctaacacaatctcagcgcggaactcatccatggcccacagcatctcaaccaaatgccttgtggtagcatcattctcaattcctgcaggttcaaggtagctgccacggtcacttccctggggttggcgaggatggtagcgatactcagtgtcggccaactgatcactgtagcaatcgcgaagctctcctatggcgatccttgccacctcctgacaagcatgaatgtagtttccccctccagcctcgaacatcagcgatgggatgtcttcatgattagtgttcaaggtgaccttgacacggcacttctcttcatcacggtcatgaggaatctgggcatacaaaggggcagtcccaaatcctatggcgaaggacatcgtacgcaactcctggacaaatccctcagtaccgaacaagtactcaggcttgaagcgcggcatctaaagacaagtgaaaggagggagttaagacatttatccaattaatagcacaagtttttggattaatttgaataaagttagaaaatcaaagtaaaaggtaaataaataaagtaaaccaatcttgcaagataagttgaaacagttgaaaacagaatcacaaattttgcacttttgaataacaggtttcaaaagaaataaaataaaagagagttataaaatcaacatgctaaattatattgcaacatgattgaataaataaataaataaatgaaaggttgtaaaatctctgctagaaagtgggccattagtatagtaatagatgtacagtactaacaacacaggaataataaataaattttgaatgagaacaattaaagggactataaactgcatgtgccattagcttggtttaattaaaagagaaagagaggagaacagttctactttttcaatctttttagagggcttctataggtatccatttggcataacctagggtcaatgtggctctgataccaacttatgacgcccggaatttctatccaaaattccaaacgcttacatgtgtgtaaaccctcgtccaggaatcagccgaggcacacaataacaaattgataatagagtgcaataattactctaataaataagcgaatagaaagtcattacagaggtagatagttcctctcaaacaataaaattaggaaaataagataaacggcgcaggcgactccattccacaagcagcttgaccagggctacgcctaatcctccacaccttcagcatcactgtagaactcctatgatgaatgattgcaaggtgagtatatgacatactcaacaagccacgcagcaaatatgcaaatgcaaggcataacaaaggatggtataatatagtctcatttgcataaatggcatttaataaatacttcagaatttaataaaacagtaaagtatttaattaaacaatattaatccatcgctatacaacatacccgttgcataggcccaaccatcctgaacaaccattcccggctgcacagttctatctccaaaccaggaatataccattccaaaccaggagctaaacaagttattaccaattacaacatcatttattacggtgagaggtatgaaactaatcacgaaaaacattgttacacccgcccataaccgtgggcacggctattcgaatagttttactctggccagaggtataccactgtacccacaagacacaacctcaacatcatgtcaaccatgcgtcgcgatacttaacaagtacccgaatagagattgtcataataccctctgcataacacaattcaaagcagtgctccgttcctggatcataatcacccccttataaacaaggcatggactccccagcgacccctgtgggcttatctccgccacttcacagtctggtgctctacagtgaaccatactatacaaaaagtaaagccgttgcccatgctggcttgtggttggcacggttaatgtttcacaaccgaaaatcgtgaaccggtccttaattgtcatgagcatgaccatcaaaaccatgtgctcacaacccaccattgtcaggttttagttggcaaattgattaattaaccaatcacgatcaaccatcgtgagctatcattaagccatcattaaataatagtgaatcataagataccccatttatacgagctagtgtctctaagcatggctaagcattctagcactttagctaaaaccatataatattctagctaatccaattattaaccaagtgacaaagaataggtaatcaataatcaaaaggctataacaaaggcaataggttatttccactcaatgacattcaaaaataaatgcaatagttgaatagaaacaatagctttaaacgggatcaacatgctcaaagggtcgtttgggatctgtgtgacttgccttgctggccctggaattcttcaaaatcttcccctccaaaatcggactctccgggaacgtcggaacctaagcataaaagatcaaaatcaccataacagcacataaacaatcatgaacagtacatgtggatatttttaacatgtagatctcacttttagaaaaatttagagacttgaaccaactaaatccgagcttagatgaattagttatgaatttttaaagattaaatcggattaaatcatttatatagattttaattgaattatgacgcaataaagaattatttttgaaaaggaaaaaggagttattgcgtcagcggctcaggtttatggtggaccgggtgcacgaagacggtctacggaatggacgtccgagatctaacctaatccaaaacggacggccgagattgaatcggtctaccgcgggtctacggatgacgcggcgctgatgccagcggtgacatcatcaccggcggcgactcggcacctcatgctcgccggggaacgatggcgcggcggcgcaaacggagggcactaatgggtagcgggcgacgcggcgaactcaccgagggcttggacgacggtggacggcaacggacggcgacggcggcgaggttgaaacggcggagacgttcgggtcgacgacgacggcggtgctccggcggtcttcggcgaaaacggagggcgggacgaggacggcggtgacttggcgatcccgacggtgaccttcccgagcgacgacaatgaccggagcggcggcagcgcatggctggactccctccggcggcggcggcgaatggcttgacgcggaggttgcgctacaagcggcggcgagctaaagcgagggtggcggcggatagaggaggtcccgggggtccttatataggggctaggggcggcgatggaggcccacggcggccggcgacggcgatggaaagtttagggttcgggaagaaaaacgaatccgaatcgagctcgaatccggcgattaccaaatgaaattagatgaagtttctataggggaaaagatagaggagatcaaggggatcatttcccctctaccaatttgaccggatcgagaaaggggcgacgaaatttggaagggggcgacggcggcttgcacggctagggcgcagctgcggcggcgcgaggaagacgacaaccctgacaggtgggccccacctgtcaacgggagagtggagagcgagcggcagctcggctcggcgggcggactggaccgaggcgcgcttgggccggggagagagagagaggggttttgggccgactttcggcccaaagctataagagggattttaaaacctttttctatttaaattattcatgaaatgcaattccatttgttaaaaatacttccttggctcaaataaatcccagaaaaatctaggaactatagaatcaagagaagtatttaataaaattttatctagcccacttttatattggaatttgttatttaaaattagatcttttcttctaggcttttaaaatcatttctaataattccatttaaacaatagtttataaatttaggatttttagggtgtgacattttcgaaccgtaccgatgccgagttgatgagatggcaccaggagggtaggaaaaatgacggtaagattcaacaccctgccgatgctcgacagtggaaaaactttgatgcactacacccggaatttgcaaagaacccgagaaacgtaaggtttgcctggagcacaaacggaaagaacccgttcagtgacctaagcagcacatagagtcatgtcggaccatcaggcttcattccattccatttcatctcacatcagggcacaacgagatacatatcaagggggacagagaggctaccaagcttaacaacgaacacccaacaggggctcacacacctagcctttctcacagagatggtggaggcgcaagtggatcgaccggaagtggggggcttcctgcgaatccttcccaacctgtgggattggatcataccggacttaacgcttgcctgtgcgactagggcggaggtgttcctgcgattcatcttctggtagcgggcttccagatccatgtactgctctcgaagctcgtccagctcctcgagtgcctgctcgtaggcatcctcgatgctgcgggccagctcggagaggagggtgcaccgactttcttgggctggtccggtgaagcggaggtggtatcggttgtcgtcctcggagcggaatgggtacaagctcaaaacattgactatacctagggggacggagagcttgcagaatcgatacagggtgtcacgggacacatcgtaggatggcggcgtccaggatgatccgagggtgacgagtctggaaagagatcatgatcatctctttctcttcctctctggggaaggggaggaagagcttcaccttccagtacttctgggatccccggacgatttgctcgccacgatagattggcccagaaaagaaaccgaggtgctggagcagctgacccagctgccaggcatacccaattgtacacacctaagggagtacctgaggtggttgctgaggtggttctggagggggcgcagccatggttactgcgaggtctaccatggagctagggtttttctggctagcttagttcaaaggagaggggaggggaggactggtgcactttctcagggtcgcttggggctcctgttataggcaccaaccactggggctcctgtgataaggtcagtagctccagtgcttatcctgtggtatggtcggtcccatttactggtaatggatagtgctctgctgtagatctcgtcagtcagagttcctgtagatcctgtcgatcagggttcctgttgcgttcccacgagtgccgtcagcacacagtggttccaggtcttccggggtccttgaacggtcagacactgtgctggtccttattccttacggtcgaagcttcatgttggtcccatgcttctgttgcctcaggttgctaagcatacgaatggcttcttcgcggtcagctaatcataattaggcctggttggatcttggtgcagctggttctgagtgcccacttgttagtggttgtcctttatcttaagcagcaccagatttagaaaattggggaaagaatccaccgggaggaaagataaggatttgagtttgaaaaggggatgagaaactaacccacaaagattgcccaaaaggtggcagctacatagcaaggaaaacaatacacaaataatggatcgctgccccttattgcgagaactcgcactagtgagcggcttaatacaacgtctacaacacacatctaacgtttttagtcagttcagtcagtggttaggatagctctagcataccttctatctcttcaaccttaatccttatggtctgtataggagtattcgaatactggggataagtcgagatttatcaaaagaaatttttcaataatacttgagaagggagagtagtaagaatctaaggttttatcaaaataggttttgaaaatatgtggtttatgtgtaataggctacgcttagctgatcctaggtcttaagggtggtcgcaagggtccttaggtcctgcagtcgtctagctctgataccaagcttgtgggccctcgattttatgcaccggaaaccccatatgttttacaataccattccctggaccagtaaatggtacacacatggcacagttgtatatcaaaagctgacatcattatacaggttaaactatacattaataatacaaggataacccaaatgggacccaaatagaccgagcatggtcatatacattacaaaataccaaaagaagtagatgagataacggaagcgaagcagcggcggtccaacgtactccataggcatcgactggtgaacctaggtcccgactccaccgtcttcaatatctcttcatcaacattgttcccgtatggtcgactccaactcctttctaaaagatttagttaagcaagggtgagtaccaacctactcagcaagccactactacaggatgcatttagtgcacacaggggttcaaggatggcttggtatatttacataaagctagttttcacaattcatttcacaaacctatgacctagcaattttaagtgaaaaacaacattaagttgatgttgtcattaatccgtgagggttcatccaccttccccaagcctcgattggtccggtccaccttcctgtccaacgagcaaagtcacacttcattctcaatctaagcaagattaaaatctatgaggctaatcaagagtagtacaagtcccggcactcattaaccgcgagcacggctattcgaatagatttgatttactcacactgcaatggatgtacgcttttaatcctgcactccgcgacttgcctaacgaatgagcctagtcccaacaaatgagacgtgtcacggcccagtttttcagtaaaccctcgcattatggcacccactccaaggactatgaactcccattgcaccccgacgcccaaccctacctcgagtcggaaggtgaggggagtcctggcgctcccgatatcacaagaagttacattacatgtaggttaggtgtgttttaagttttgccagcataaccaaaccaatccaccacactgcaacaacattacatcatcacaagtgcagaaccaccatgataggggtgctgccccacgaggatttcttagtccaccggttctatacccactcgagaagtgtggtcgtactctgatcatctcctgcatagcttcttgaattggtccttaactgaccagggcctgcgccgagtcgtttccagaaccacccatattccattcgtgccgccccagtcgaaaacatttgttttattaggtttttggttttcgcaaagctttttgtgctgcggcctgcgagtggcgctcatgtctccacccgccttctttggcaatcactctcgacaagtgaccacccccaacacattcatatccaactagtatggagtgtacaatcgtctataaataagcagtactaagcaatatcaatatttgaccacgtataacaaatagactcgggcaacaaagatatatataaaggtaacaatatcaaggaaattagcatgcaactttatttataaacaaagcatttgtaacatgggttcaacatgccttgcttttagaaatcgatatcttcgagaaatccacatctgttgaatatccgcaatatccgatacgcagttaatacgcaaaatcctccaaataaggtaccaaacatttcaaaccagaagtgccgttggatatatctcgattttaaaagaattccggaagttgaacggagtcaatcggagtcacggtttgcaagatatgaatttccgaaggttatacggattaataatccgaggaaaaggtttcctttcaatgaatattcttcgtgaggccgctctgtcagtgggattaaagaagaattagggagatgtttcaaacttacagagaggaactcgggttgtaaggggatgtagtatgaacttgtagtggataaagaggccgcaagtgggctcggcaggggatgtaatagggagatgaaatagacttttcggcagcgtcaaggtcccgaggagtcacaacacagtaggccccaccggtgggtcccacagctttttcttttcttctttttattttcttctctctcttatccttccttcctcttgtcggtatcttctcttgctctctccccctcgtttctttctctgcttctcgcttcttgtgcgcgacaaattggacattacgccactgtaaagagtgggtttcatcagtatcgttaaaatgccactcccaatgaatgccaaacatttggttttgccatattcaccattttataaagttttcatcattttccacacatggtctgaccaaaatacccttcggtcggttaaagaagacgagttgggctggcattggagaagcagctcaccagtcttcgggcgcatccacgccgagccgacgacacgacaccgcgtgtggagcggcggctcagcgcgctgctctccaagggcccgaacacgacggtggagctgttcccgatggtggcactccgcgctgccaccggctgcttctggccgagcaacgcatcggctccggtagcttcggcgcggtgtaccgtggttcccaccccgctggcggggaggagggaggaggatgggttggacgcgacatagaaggggctgcccgagcttgactttgacgggagcgactcggcgttggcgggtacggcatcggctgccgcggtccgtattggtatttcttaactacattactaaaaatagtcattccagcaatggcgccagaaatagtcctggtatatttatagttacagaaataatccgcaagcgcacggatataccattgtagcattttttatcccaagctatcgtattttttatcccaaggaaagataataagagtgaactttactaatgcagtttatacatatattacttataattgtcagagcctaaacagggtttaagtataatataagggtagagtgacacgaagcaaagctatccaatcctcataacgaataattctactaagtggaagaagaaatagaaagcactcaattcctatacttctagtatacacttaaatcctaacttacatctgttaatgtacaattatgtggccgataccccctaacagtgtcctcctgatactttgagagactaccttgggttgccgaatttcttaagacaacctgtcatggtagtccaaccggggctaaatacggatgagtactctccccaggaaattgtcttagaaatatatactaacaaggaggaatacccgtactgagctgtcaccatcagcggcccacctctactgtcctgtagcatatatacctaattaattatgcttaataatctaagcaccatacttacattattaaatactactctatacccgcatgctagacatagagtaactgataaattagacattaaacccgcaccattacacctctctggtaggctacccacacaattaacacaatacagatataaaataagactagtacttaaacaaagtaggcaaaatttgctacaggacgtccgaaaaatatgtaattagctagaggacattgtaagaacgtgtatttgctgtaaggcatcataacaaaactggtaattaactgctggacaccggcgggattattttattatttttagagggataggagagagaaacaatcattaaagaccagtttgcccttggctcaaattaatccaatgtgggccccactatgagtatgtccttctcgtgtcgccatcgtaggtgaagtggtgaaccccacgtcggcgccatcgagcgtgcagctcgctagcctccgcgagaagtaggcatcgaaacggccgcaaccgcacaccctgagtggcacagcggctgcggtggcgttgacagcgcactcctcaacagcatcgctgggtgatgccctccatgccgtctgcccacggcctgctgatctgccggatgctgtgccagtggatggcgactttctccgtcagcagcgagttcttgatgttgatgacgatactgtccctctagacgacgctgatggtgcggctcggcgtgtggccgttgatggtgacggccagcttgcggacgcagtccggggacgtgaactggtaggtgatgtcccagtcgtggcgccgcggctgacgtgacgccgcacagcgccgcagcggcgaggaagaggctgcagaggaggcggcggctacaccgcgtcatgtcccctcttgctcgcagtcgcagctgcattgtttggtttgctccggttgctagctgctctgtctgtgcgtcgttttgagttacacaggtggatttggagctcgccaagtagcgagcttaggtttttgatgtttcgagatgtttggagcctgctccggtaccgctgcgatggcattgatggaacacctcgtactcgagcgccccgagcatcaccggtagagcagcgccgcacggcagccggaccagctcacgcgcccggtgccgtcgttggcgaccagcgcaatggcgtcgacgtcgtcggcgcgcacgcgccggtgagcatcgcgggaaagaatgagagagggagaaaaggataatgaagaaaaaaagaaaaaaaatcaaagggtagaaacgtacttacacatgtgtttcactcttcaattcttccagatataataaaataatcacgcgggtgtccagcagctaattaccagttttttgtggtgccctacagcggaacacgttcttgcggtgtctcctagctaattacacttttttggatgtcctgtaacaaattttgccaactaagtaaagtaccgaagatatataaagaagagtattccattaatttggaaagtattacagaagagattacaagagccgctagagccataccgaaaactcttccgaagactccgatgacttccgaacactattctattctactccacttagtactatactactaatactaaagtatgaagaggactttagcttgcttgagtgtgttgagagagtgaatgaactcctccttttatagagctggtatgacggttgtagaaacacgaaatgtcgattttgccattacaaccatcgttgagaagcaatcctggacgtccacgtgtaaggccagcgggagccgcagctgccaaggttcggccgaacctgggctggcccagcaagcctccagctttggcaagtcgctggcaagtgggtcccttaggcggttgtggtagttaaaagtcggtttccggcggttgcttctgatatgtgggccctccttatccatatgcttgcttaggagtgaggtctcttaacttttatctttattttatttgataaattcctgcaacatattattctccaagtacaaacggaaatatattattttggaaataaacatgcattgtaagcatagctaattctccattattttagttatattgatggtcgaaatttgtcggtaacgaccgtcaacaaccccaacacccatgtgatcgttctccccctcttaccaagaacaatggggttttgtttattagagttagcaacttgatacttgcattcagcgcgcgtgttggctaaattgtctgtctgtttgtcttcggaaccccaccatattgtgatttcttcatagtgaaactttcatattcatttagtgtttgttctacttgttcttcgattgcttgcaggaagagtgacctcgttgcctggttgttgtgcaccacaagctcgcgacaacagacgttgtattggttgctaaggcgcagcgtcattagatggttgtagtcgggtcgtgaacgtcttcttcatccaagtgagttatccccgcctcccatagaaagatcgggacacaaaccctcgcgggttcacatcatcactgctagagtgcctcttccaccgccaatccgaaccaccgccactgttgtagcatctggctgctcactgtcagcaattggcatcacgctaggctgcagtgcttccacctttcgctaaaatgcgcctagcagtagcttggccacccatccacaacctcaaatcggggcccaaacctgctttctcacactccctagtgagttccgctgcaaactcaatctccagctagcgtttctcgctgcgccgcgactcctctctctcccttaactccttcaccttcccgaggttgcggccatccccgtccggaggagcaccgccgtcggccaccttcccttctcccctacccgtcgcgtgcgaacggtgagaatcctctcctcgtctactcccgcgccacctctctcaccgccgctgaccgctgccggccacctcatgtgccgtgtcatcgtcttcttccctcggtaagcacaccgtcacactccttcccaccttcaccgcttcccatgtgcgccgtcgtgccagttggtcgtcactagtgatcatagggctacgcgccgccgctacccagccagccaattgtcgagccccactcccacttgcaccggtcatccgattcaactcgggggaatttgggccatccatgtggcctcccggtgccacctcactatgcccgcccaaagtaatagctcaagtaggctcaaatatgtgctaaatgaatagcaaatgctcaaatcagataatgtaaagttgaaaaatcattcaaagtcagtaccatgttggtcctaggctagaaaatactatacgcgcaagcctagatacaaacggtaccacaagatagcacttgtaggagatgacaataacaagcacacgatagcggcgatgacagtgttagtgaccctatcaaatgtaaaattgacagcgatccacttgtaggagattattaggtagttgtgagggcaataaggttaaaaaagagacgacggagacattctcaaagaatataagcatttctaacaatgaatctggacatatctatatcaagattcatagctagaagttgttatattttggaacgaaggtagtaaacacaaccattacttcatttgaaacgaaaataatctatatagcacatacaagggaaacattacggattaacaattgtcaaccttcctaatataggagaacagctgtattttgttaatcatatgtgtcggacatatatcgcatcagttagtatggctgttgtcggcatttagctttcttttgaacccttgacactaatgaactagagatccaagacttgttcatctcagcaatttcaccagagcgccaacaacacagacgaccatcttcgccacctgtccatccaaaaatgcccctgttttgcccagtatgagtgtttgcggctggatatacggttctaacaacgtctgtatggcctccttcaaggatagcttccgcggaacctattgccccttcaagaccagctcttacagggaagtaacctattgtccctgcagttgtgccgccaatcacccataacttgtcgtcgggcagagagtagtgacaatcaacaaaatagtccacctacaaaatatagtaaacagaattagacgttgagaataaattgtctaggtaatttgcctccctggactgctatattgcattgccaaccacgctaattaaacaatgaagcatcatgggcagccacatcgtgtagtttcacattgtggcagcaatccctctgtttcgccacatcaaccaatctagagagcaggaaaagctgagttgacgtttagactaagtaggtggacagcaatggaggcgtagtgagcatagttgaaaaaaccggaccggtggatgacccggtgaacacctcggttcaccggtccagcggtcgaaccgacgggttggacggttgaaccgcggtttaataaggtcatctagtttatatgttttgaacttttgatacttgcacataagggcacgtggtgggatggtcagcgcagccggcttacaacctggtgaccaaaggtcgaatctcctccgtgagcgatttggcattttttcaaaaaaaacaaaaaatcgtcttggtaggctgaagaactaaatgggccttcgtgtggcccatttacactctcgcatgtcttagcccggttcaaccgatagcagtttattgtccgtttcacctcaaaaccagccggttcaagcggttcaaaccggttcgattacatggccggtctttctattgaaccgaaccgagctaacctctggtttcggttatttccggttcaaacgctaggccggtccggtttttcactatggtagtgaggtcccgtaaacgggaatgtaacacttgcaacaacagtgacaaggcatctagaggagatagtcagttcagtaagctgtgaaaaataaagatcaagcaaattttgggttcatatgagaaaatgacaagagggtgcaacataaaatgatgcatgaggatattggattggctccatgattggagagaataggtttctgtagccagcaagaatggtgactggaatggagagttccctatagtgtctccacagtggaactgtgcaaggagtaaagaaagacggtcacgcactctatataccctaaacaagtgcattggagattatgtcaatgtcctaagcaacaagtaaaaaagaatagagggagtatatctaaaatttggctagttctggagttagttgatgaagacgattacagatataaggtgctacaatatcattcatttcgtgaagttctgtaatctttttgtaccatgagccaaatgaagaaagcaatgaactaatgaggtgtgattgtttgaatatcataactctctaatattaatataaaaaaaactgtcaattaccaaataccacactacatgccaacaaatgctgagtagctagaatgtataaaggcaaatattagaaactcacatggtcaaggttccacctatcagttgccaaggaacgagcatcatctatattcagttctctactcccatcattccagtcccaggtactgtgagaattcaacagcaaaaatcacaattagacttttgtccttatttatttatttgaactttgaaatataagtcagatgacatggcattgccaaaccagagaaagcaaaccgaataaactaccttaatgtttcaatgtggctcaagcaccagatcttctggtatgtgttgccgaaaaatcccacttttgcaacagaagtctccacattcataacctagggaagatcagatatcagagaactatcacccaaaattgacatcttcatacaaataacctcatgcagaaccattaaaattaaaaaaaaaatacttcaaaagggagatattgtaataccacaattgaatagtactaacaaccaagaaaagaataggcaaaactagaactgcatccgtaacatacaagaattgtaagctctattgtatgaagattaacaaagaactatggagattaacagtagcattgttataagaagcggtgaggaataaaattgtaagctctatcatgtacttcacgaacaaataacagcatattacacacatggccagttattgaagttacaaaaaggggaaaaaacatcatgcgcatttggcatcgtcatatgaaacaacaaaggaacataacttgaagtactaatgggatacttcagtaaacaacaaacatcaaagtatcaaaccataacctgacatagcaggatatgtaagacaaggcatttgggcacaggaaacaactaaaacatacagatagcaaatgattgtcctcgttcatgtcaccatcagtgtcaaaaacacatattaatccatcaactgctgcagaaatgagtttgctatgctgatgtggtgcaaattttacctgtccaaaaaaggtgacaacataaaaatttataatcacccagaatacagaaatagtatgagaggaacagtagcaaatacaagatattttcacaataaaatgcattcaagtgattcagtaagcacattatcaaaatgtttagagtaagtgatgaaagtagttgtctcctgtgatataaaaatagttgtctccatgaagagtagaaaacatacaaaaccatccaagcatcactttgtaaaatataatggtgcatatttgatatctagtccatcaatctaaatgctgataatgcatggtacggagacagcagatcattagatcatgatttttatataaaagtactgtttgcttctaggaccatttcgattggatatccgcatgctcacatattttgatagtatacacatgtagtctccagcattaatgccttcaaatatgccagcaggatgactcagttctcacttgattaaggctgtgttcgggaggaggttcccagcacgcaaaacaaagcttgtattattacatgattaattaagtattaaccttttttttgaaaaatggattaatatgatttttttaaaataactttcatatagaaagtttttgcataaatcccaccgtttagcagtttgaaaagcgtgcgcgcggaaaacgagagatgtgtttggaaaatggggggaagaacacagcctaagtgtttttatataaaggtgatgttatggaagggttccttcacaactgttcattggagagccaatgatcgtctacacaagattccgttggcatacagtttcatcgacatgggtcaccaaagacttcagccgtagttactgccacagcttgaggttgagatgccttgccacaacagatgtagtgcacgaacagtatcatgtactgtagcagtgtagcaatacaattaaggtttaggatttaccttccataataaatctattgcctcaaccaatcacatctattgtgtcaatatggcttagttatttggtattatatctattactccctctcccaaaatacaacttctagcattcaaaatttatcccaaaatagaacaacttcacctacaattccttttcaacaaaacacaaccttccaccattcaatttttttccacctacttcctcttcttaatcaatcattctcccatttaataccacctactttctttaatacccgtgcccaagtctacaactccttgtattttgggacggaggtagtagttaggaatgttcagttagaaattagaaatatggtgtgttaaggtagagatactattcatggtactgttcacgtaagtgcctccagtactgcagcaaaagaacctcccatataagggacccatgtaacccatgtaagtaagcaataaagaatcataaagtaggtgtagcttgatcagggtctactggcaatgaggacaagcctagtaccgatgagagtgatctcacttctatcccagtctttagacccttaacccatccatgaattagtgtccataacagatgaacacattcagtgtctgctccaaaagatgaagtcacaaggtgtaatgctcagttgctcacagcattaagccatcaagtcgagtcaactcacaaaaggtcagtttgggtaattagtcagatgactagtcggtgactaggcagcagcatgcatattagcatgacatcaaaattgcacaaatgatctttctgcacataagatataactattgatgcagccaggtgtccaatacctcttagattgtgaatactctccattcaccaggaccagagccctccaaattccacaaatgcagctaccaaatgaagcagctatgaaacagaacagcaagtaaacaagctttaacattgatcctgcttggtccatgattcctattcctccaattaggttaaacattacattcctttaacaggtgaaactgattcatgtacctagcctgaggctgcatcattcaagtcaacactaaacaagagctatctattgcaaggcgtcttttagttgagatagttatgctctaaacatgagcggttcaactgccggttcacatggttcgaatgttgaaccggaagtgctatattgtatgcatattctccatttgtcactgcgaaagttagctggacagtggatgcgtagagctttcaaccagctgacctgtgttcgaacccccattctctacctttttcttgctattttcaataagtacatgaaccgtgggccttgtgatctttgcatgcacaaggcccttgactggcccatcaaggctcatcctctcttggcatgattaaccggccggctcggtttgccttggttcaccggttcacatgaaaaccatccggtttagacggtttgttccacttcacatgcaggggcggtctttatagcaaaccaagccatccagacctctggttctggttttttcggtttaaccccctggcctgtccggttttttgtactatggctctaataatgcaatgagtcagctactttacataaatacacaataacataaaaatgtatgaccaattttatttgcggactacttgcacccacatattttcttgaacagattgttccattaatgtagagaaggaacaaacagtcctgagtaacaaaaagaatgcaaagtaaaatatatgacgtagaacaatacatacttgagtcacatcatccatgtgagattcctctaagcatgctagctgtttagaatttctccaatcccacaatagaacctacaaccaacaaattagaatgagacaacaagaatcaaaacgagtgtaacatcataagattcttttttctagaagtcacgtcacaaacatatggaagtaaaccatcctggtatgttaatcagatgaattttgagattgagatagttcatagttggaactggttttggagataattggtaaatatagctacaggggctggaatagagaggctattggagatgctccccttcccttgcaatggctggagacaccgatctacagctacaattgcctttcatgcaagagacggtgcacacaagcatcagaatggctgagcaaacaatagtccactattcagaaattgtacatctagccatcattctcaattctcagttactttgatgtttcatcttgatctatttgaacaccagattgaagcattcaacaaattagtttcatcaatttattatggttttagccagtttttgccaaacaaacagacttccgggattagaatttgtggcttataatccgaacagtggatggtgcagttcattacttttgctctagtgttttcagttaagtgagaatgtaaacagtcctaatatctgtgaaagaataaaactcaactcaattacctgggaattagaaccggcagcaagtaggttaccacttgatccaccaaaggagaagctgaacaattcttgagaaccccttagcaaagatatctatgcaaaacatttgaaccagtgatggttgaatttagaaatatatataattacttaaaccaattataatactaatgaaaacagctaacaaactggtcgtacaattaagccaatcgcactgcttaataatgttaaatcagtcctagtaatgttatattgaaaagatatggccaacaaatagagtatgaaaagcagtagtagatgcaaaattgtctgtataatttagcataagcacaaaaacaatatcatgacaatttataaccatatacaccgaatattgatgttagttccatgaaaaggcaacatcaattgtgatccaattatcagcagaacagagacaaacttaattgcacaagattgagtagactattagaatttaccagatataaaagttgcattcgggaaggtctttatgtgtaacaaaaggccatgcatttacattttaccatgtaaaagataaactcaaaaagatgatttcatggaaatactactgagcaagaagtgcataagctagcacagtggttgtgctttgggccgtatctcgaagagatataccaaaaaactggaacttaaaagaatcaaatttgattgtcctcaactcaacatgtataattcatatctgaccaaccatccaccagcacccaaaatatgtagacaggtctaagttgacccattaatagaagatcctttaggagaatgtgtcggggggttgcagaccacaacatcatcactaactccttttaagtaacagaactaagtatgtgatttgtcagcacattaacataatgaatagtgtggacagtctactgtacccatctcaagtactgcagttctctcatttccctccaactatcaagcaggacaaatagcactgccaactatcaatagcaggcatatctctaagactatccaaaggtggtttagctgattaggtgctaaaaatgcagtccaatcagcaaaacatggtgattcccacatgccagcctcaaattcttcatcaccctcctattaccacaggtccctgctgttggctgcccctaaacaatgaactgccatagtttctgaatgtgaggatccccatcgcccacacacagtgccatttgtgtagtcattgacacacttgatgactcctggccacagtaaaggttggcctgcttctcatgctaggccgaagctaattatggggtcctccaatacggcggcagctggcctgaccaacaagagcagggtgatgtggcgtcaaaccaggtggaattggaccaggggggagtttgtttggtattgatagttaaggggtgtcagttattccatagttagaagttgaaaattaatcaaatacatcagctggcaagagtaaagtatacttattcccttaattatgcatttgataaccagattaggaaaacagacctgcttaaagcttcttgtatcccaagctcttatagttccatctgaagaacaagaacagattacttgtggggatgatggggctgaaaaggaaatttcatggattgatccgctgtgtccagtgcattcacccaaaaattgcccagttgctggagaatataattttagtgcatttgttgacaaggaaaccgcgagcgtagagttctcctgacttgttaccagatatatgaaataagatgcagagggcataagtcctaaagcatgcataatatcagcagtacataccacatacataaaaaagatgaaaagagaaaaggatgagtatggataaataatttgtgatgaaaagagaaaagtgttattacggataaataataatgataatagagtaaatttcacaaaactacatgtttcatggttcaagttgcagaaaaccacacacattctgacacttgtcacttaagtacatatattttggtagtttagtttcacaaaaccacactatcgatggatggattcacccgtgagatgacgtggttgtttcat

SEQ ID NO: 25905 - DNA, 17225 bp, Oryza sativa
cgatggctggtaataggatgccatatcctcgtcctaggtgaaacagccacatcatctcgcgggtgaatctatacatcgatagtgtagttttgtgaaactacacaaccaaaatatatatactcaagtgccaagtgtcaaagtgtgtgtggttttctgtaacttggaccacaaaacatgtagttttgtgaaatttactcatgataatataacagcaacaacaaagacaggaataatgtggtcttgaaatctgaatggtcctttttgcatgtcatggaattcgtaataacataaaagcatacacctaatagcacaccacagttattaacatcccaaaccaaagctaaagtggtcgacaagtatcatctgaagctagtgaaatccatttaaacgggtaaagaatttgcagtctgaaatgaaccagggtgggggaagggcgcctaccaagaagctatctggaagacgtagtcgtcgccgaagttggtctggatgctgttcttgaggcccaaacgtctcgaggagatgccgctgttagggcttggagacgaggagttggacgtcgcgggcgaggatgtccccatgcataggacggcctctgcctctatctccacctccatcgccatggccgccgccgtatcctctccgcctccctccatcgcgccgcgcaatcccttccttcgccgcctgcgggtggctcgatggaaatgtctcagcgagaagggtggatgcgccttctttccgggcgactggcggcgaaggaagtagggaacggccggcggaggggccgaccacgcgacgcgagcctcgactcgcgaggaaagccgagaagcgacagcagctggcggcgtgctgtacgcgtgcgggtgttggactggtaccctgctagggtttattgatgggcgtagtgggcttggtttgatctaatttctggggtgaaactgaataagttgggcccgtcccggtagaccattggcgtggtccgaaatgaaaaagttcacccaggtccctcatctaagggttgaggttgaattgcgtctaacgtatccctcattagtacaaacaagatcctaaaacggtctggatggtggtttcagctgatgtgactggtttgagttagttctcaaactatgtgagcatggcattggaagcaaaattaaaaaaataaaaacaaaacatatggggtcatatgtcagtcaaaaaaaatagattaaaaaaaaaaggagaaatgagggaaggacggcgagctccctatgccatgcctcatcgatggtcggtagcagaggcactagcaagaagaagggagaagggggatggaggagccgtctgcaacattttcacaccctgattttcgtttcagagatttataaattatttaataaattatttctagaatttgtactaagtacacattaatttacttaatttacaagtaaagtgtgtaaactaaaatttcccaaataaacatggttggacttaatttttattaaattctttgtgataaattacagtctgaaattttatcggatttttcagagctcaatttttaattttattaatacaaagatcattttaacatttatttaaatgaaaaataattaaaatccatcatttctctctggggcgaacccggcccacttctcctcatctttccggtcacatgtttccctcttgccggcccgcttccttccctcgtctcttctctttttcttttgggcctcctccctcgctcctcccactgacatgtgggcccagacccaacaagtcagggtcatcttcaagctcggacgggagtcctagctccaccacgatgccaccctaaagccgcagccttcctccacccaattcggtcgaatccttagagattttacaaaattgtttgaggggtttttgtcccctagatctcctcttttcgtttcaccaataagggcttgttcggttggggcgggaatggccaggaccacggcccaactctcatggatcatctcggcgtggaaaggataccgactacagaaaattacgtgttcgattaagcccagtcggtattttaacccaacccatctcggtgtttcccctgcgccccagccctgaaaaaaaacatctagtccggagtgtgtggaaaataccctcgaggggaggaggcaacataacgagaggaggcgctgctgcggagcgcagcacgcggcgtgactcggacacgacggcgacggcacggtctctcctccggtggccaccttctccccggtgagttcctccccttcccctctcccctcctctcctagggttagggattctgcgagcgcgctactactgtggtggtaacaacacacggtgatggcaggtgtggcggaggacaccggcgtatcacatcctcttgccatggcagtggaagctctgccacaacggcaagggaagacaggaggacacgatttcttgatttattattgatttcttccactatttcttgatttgttcttcttcatcgcaaattgcttataattgattatgcgatatcttgtttgccagtcaagtagcttgctcttggatttgtctgagaacataggaagatttttgtttgttccttgatagatatggaatttttcatgctgacatgattaagaccactctcaattgatgtatttcacactttaactccatgaagtcaaggtttagaagaaaataccaagtttgagcaaaaagctacataagcttctattttaaacacttttcttcaaaaatgcaaacacacacaaatgagatggttttggtgagaaatgactatgaatgaatattatgcactcatttgagctagtatgatgcgtttatgcaaccccaacaatgagaactcatctaagtgctagtagtggccatttatggtctagataatattttggataagattgggatctaaatttattttgatcggttggcctttcagagaaactttgaataccataaatgtttgaattagccaaccctatcttttccgttttgaaaccatttccaaattccttttagaattaattgtacaaaaaaattgaagttaaaagctaaaacaagatacttagagctacatttttagttgaaattcatttttttaaaaaaattagctcttctttgaaatataaaagtattgagagatatttgaaacacacattgagatcatttccaattagatttttataggaaagccatagttttcaaaattttcatttttggctaaaaggtttattttgaaattaccaactagcacttagccaacttgaacacatatatgagatgtgatatacatggatatgaatgagcattaaacagtcatacatcacaacctatcttgcttaagaatgcataaatgatgactttcacatatgcaagaaatgttaattcttaaatgctatgagaatgcaatgtaacctacacaaggttaaatacaagataattcattgtagatacatgttaccgagatgacattggttctttacgtgaattttgcaatggttggctccaaattccgaacttggtgagatccaccatttcttgcatgagtcatacctatattctcattatagcacatttttgtccccaacaacattgggtccataaaggtaagtcacacaagacttaggcacccaaatgaattttgtgctagcatgtggtgaactagtcaccctagtagcacaaatgtcattttttgccttcctaagcaaatcataatcaaatgaggagtttagtttagaaatgttactcagaggacaatttttaccaatatgtccctttgcacggtaattgtagcaaagtcgattcttgtctttacatggtgtcttcttcaccacatcttgcatcttacttgctaccttgctattaagcttcttctttgatgacacagagtcatccttcatgtgggggcatgatgcaacttcatgacccttctcattgtatccatagcacttcctattgcttcttcttgttctcctctttggaagtgtggcttggtcatcaatcttgttgaaacacatcaaggcatagtgtcccactttcttagacatgaagcaagtaatgggagttttgatccaactttgaatttgtcccttaatcttgttgttggacttattgttttcttgatagaacttggtgcaagctactgttgatcccctctcaagctttttcaccatgttcccacgggtatcttgagaaggttgagcattgcccacaagtccatgatccatgtgcttctctctttttcctacacaatccaagtcacatgtagtgctcggggaaatgtttgtgttggagcaacaagtgttagcacaagtaaaatcaacttgaacatgtggctcataagattttaccgttgcaattatcacctcatgagctatctctaccatggcatgagaatctacaaggttctcatgagacacacaaaagttcatcgtgtgtttcttgtaaatccatatactttttagtgatctcctcaaattgagatttgagctcttaattttccttctccaaagatgctacacaagcaatagaattagtggcacaagcaaattcatttttccaattttttatacctcataattaatgaagaattagatcccttgagtttcttgtgtttatcggctagacccttgatttcttcatttttcttaatgaggcatgcttgttgcttctcaataaccctcatgagtttgatcaccattgttgtgtccttcttgttcaagtgatcaaccacgaagtcatcatcatcacccataaagcacatatgatcttcagcaatggaagatgaacaaattgatgatgtggattcttcaattaaccattgatgttcattcacttattccttcaaaaggttagtttcacaaatactttaggaagtagagcatccatccatatcatcctcatgcacacatttagtgctaggtgatatgcatgagtcaacaacactatgaaatatagcaatttcattatcggtgttatttgagtccaatgggagagttggaagatcatcaaccttactcaccaatttattaccttgctcatagtgtatgttgatgagatggatgatgaggtgagatcttcttggtcggaggagataatcacttgggacttgtcatgatgaggtaatgaagtagagcaattcccaaatgatgcttccacaagagtatcctctccatcacatttagacttgtcatatctttcctttagtgttatccaaatgagatgagcatctacaagtggcatgatggttttgaacacatattcactcaaagcactaaacaaaacattaatagcttgagcattgagatgtgtgcatttctcttcctcttcaaatgatagctctttatcattaggaggagaaatactcacatctacaactcgctctatatgaggacccatggccctaaacacattaagcacatgaatactccaagatatgtaatttgaaccatctaggaaaagaggttctaggaacatttcacctcttatcgacatcttctctcggggtagtaaagcccaaaatgagagaccttgctctgataccaattgaaaggaccttgatgtcacctagagaggggtgaataggcgtcacgcccagaaatttagcccaaatttccaagctattttgtgtattaaatccatgtccaggacaagacagggtacacaaaacaacaagtgataaacagatccaaacgtaaataaagcaaaaatacttacagaagaggcacttagtcctcgcaccaaaatgaaagtagcagcagcggaaaaaggcgatcctagcgaggcttcagctccactctacaggcaaaactcaactagggtctaagccttggtcctctaacttcgtcttcaactcagaagcactacacttttgaaaagggggaacaatagcaaggctgagtacaaccaccatacttagcaagccacaccaatgatgcagacgtgcaatgggatacaaggatggcttgtggctatttgcataaaggcagttgtaaaacattttattgagcaaaacagtaaaactattgattaattaaagtaatattaaatttccactaatcaacactacaccacgttgaataggcccaaccaacctacctgaactacaatgcattgggtcgatttattgagtgtgagactaatcacggtgaatctggtcgatcacccataaccgcgggcacgactattcgaatagttttactctagccagaggtgcacaactgtacccacaagacacaatccatcggcatgtcaccgtgctcggctagacatgtcaccatgtcgagtgattgtgacaagacccttcatataaccccctctgaccacagaaccggaagcgcccttgtttcaaagagaggaggacgggttattcacatttaatttgatggttataggcgaattgagaccctcgggggaaaatagggatgtctcctacgttacccataatatgtagaagtatcgacgtaatttcatagagtcattcgatctgaatgctacatgaagaacataagccagatgacggaacgtggagacctaggatgtagaagatcataacatgaacgatttggcatatttggattcctttcctatatatccactcatgtggtacttcatcatacgattcatataagatccatctgtctagagatcgtcatatacatctagaaagccgtatgctttggaagaagcttgtacagtttgggaaggggtttttttgagagaaaagaataatctatttcaaccgatatgcccttaggcatggccatacataacataggaatcacaagtggaaggggtgggcaattagctagagcagcaggtgctgtagcgaaactgattgcaaaagaaggtaaatcggccactttaagattaccatctggggaggtccgtttggtatcccaaaactgcttagcaacagtcggataagtgggtaatgttggggtgaaccaaaaaagtttgggtagagccgggtctaagtgttggctaggtaaacgccccatagtaagaggggtagttatgaaccctgtggaccacccccatgggggtggtgaagggaaagcccccattggtagaaaaaaacccacaaccccttggggttatcctgcgcttggaagaagaactaggaaaaggaaaaaatatagtgatagttttattcttcgtcgttgtaagtaaatacgtaactaggaatatggaaaattgcatttttggaatttgcaataatgggatgggcgaacgacgggaattaaacccgcgcatggtggattcacaatccactgccttgatccacttggctacatccgccccttatccagctaaaggattttctcttttttccattcatcattattctatttattctgacctccatacttcgatcgagatattggacatcgaatgccactctttaaaatggaaaaaaaaggagtaatcagctgtgacacgaaaaaaaaagaattcttttgtagctcatcatttattggcaaaaatagaaaaggtcaatatgaaggaggagaaagaaacaatagtaacatggtcccgggcatctagcattctacccgcaatggttggccatacaatcacgattcataatggaaaggaacatatacctatttacataacaaatcttatgataggtcgcaaattgggggaattcgtaccaactcggcatttcacgagttatgaaagtgcaagaaaggatactaaatctcgtcgttaactgaattcagaatagaaagattcaaaataaaaaatacccagcaagatattgggtatttctagctttcctttcttcaaaaattgctatatgttagcagaaaagccttatccattaagagatggaacttcaagagcagctaggtctagagggaagttgtgagtattacgttcgtgtattactcccataccaagattagcacgattgatgatatcagcccaagtattaataacgcgaccttggctatcaactacagattagttgaaattgaatccgtttagattgaaagccatagtactaatacctaaagcagtgaaccaaatccctactacaggccaagcagccaagaagaagtgtaaagaacgagagttgttaaaactagcatattggaagattaatcggccaaaataaccatgagcggccacaatattataagtctcttcctcttgaccaaatctgtaaccctcattagcaaattcgttttcagtggtttccctgatcaaactagaggttaccaaggaaccatgcatagcactgaatagggaaccgccaaatacaccagctacacctaacatgtgaaatggatgcataaggatgttatgctctgcctggaatacaatcataaagttgaaagtaccagatattcctaaaggcataccatcagagaaacttccttgaccaatagggtaaatcaagaaaacagcagtagcagctgcaacaggagttgaatataaaacagcaatccaaggacgcatacccagacggaaactcagttcccactcacgacccatataacaagctacaccaagtaagaagtgtagaacaattagctcataaggaccgccattgtataaccactcatcaacagatgcagcttcccaaattgggtaaaagtgcaatccgatcgcagcagaagtaggaataatggtaccagagataatattgtttccgtaaagtaaagaaccagaaacatgctcacgaataccatcaatatctactggaggggcagcgatgaaggcgataataaatacagaagttgcggtcaataaggtagggatcatcaaaacaccaaaccatccaatgtaaagacggttttcggtgctagttatccagttgcagaagcgaccccacaggcttgtgctttcgcgtctctctaaaattgcaatcatggtaagatcttggtttattcaaattgcaaggactcccaagcacacgtattaactagaaagataatagaaggcttgttatttaacagtataatatagactatataccaatgtcaaccaagccagccccgacagttgtatatccatacaacaaaatttaccaaaccaaaaaaatttgtaaatgaattgagtgaaaaatcaaaactcagattgctcctttctagtttccatatgggttgcccgagactcgaacccggaactagtcggatggagtagataattattccttgttacaatagagaaaaaacctctccccaaatcgtgcttgcatttttcattgcacacgactttccctatgtagaaataggctatttctattccgaagaggaagtctactaatttttttagtagtaagttgattcacttactatttattatagtacaaagaacatttcagaatagaaactgtgaaagttttaccttgatcatttatcaatcatttctagtttattagttttgtttaatgattaattaagaggattcaccagatcattgatacggagaatattcaaataccaaatacgctcactgtgcgatccacagaaagaaaagtaagttgttttggtgaacatcaaagaaaaaacttgctcttcttccgtaaaaaaatattctaaaaataacgaacccaaccattgcataaaagctcgtaccgtgcttttatgtttacgagctaaagttctagcgcatgaaagtcgaagtatatactttagtcgatacaaagtcttcttttttgaagatccactgtgataatgaaaaagatttctacatatccgaccaaactgatcaagaatatcccaatccgataaatcggtccaaattggtttactaataggatgccccgatctagtacaaaattgggcttttgctaaagatccaatgagaggagtaacagggactttggtatcgaattttttcatttgagtatctattagaaatgaattctccagcatttgattccttactaacaaagaatttattggtacacttgaaaagtaccccagaaaatcgaagcaagagtttgctaattggtttagatggatcctttgtggttgagtccaaaaagagaaagaatattgccacaaacggacaaggtaacatttccatttcttcttcaaaagaagagttccttttgatgcaagaattgcctttccttgatatcgaacataatgcataaggggatccataacgaaccatatggttttccgaaaaaaagcagggtacattaacccaaaatgttccatcttcctagaaaagatgattcattccagaaaggttccggaagaagttaatcgcaagcaagaagattgtttacgaagaaacaacaagaaaaattcatattctgatacataagagttatataagaaccgaaatagtcttttattttcttttttcaaaataaaatcggatttcattgaagtaataaaactattccaattcgagtagtagttgagaaagaatcgcaataaatacaaggatggaacatcttggatccggtattgaaggagttgaagcaagatatccaaatggataggatatggtatttctatatgtgctagataatgtaagtgtaaaaatttgtcttctaaaaaaggaaatattgaatgaatagatcgtaaattctgaaactttggtatttctttttcttccggacaagactgttctcgtagcgagaatgggatttctacaacgatcgcaaacccctcaaatagaatctgagaataaaactcagaataaaaaaaaattgttgtaatccaataatcgatcttgtttaggatgattaaccaaattaatccaaaaattctgctgatacattcgaatcattaaccgtttcacaagtagtgaactaaatttcttgttattagaaccaataatttcgacaagttcagaaccatttaatccataatcatgggcaaacacataaatgtactcctgaaagagtagtgggtagacgaaatattgtctaggaaatttaagtttttctgaataaccctcgaatttttccatttttatttctacttgaatcagagagagagaaatatttctcggtttatcaaatggtgatacatagtacaatatggtcagaacaaggtgttgcattttttaatacaaacccctggggaagaaaaggagtctaatccacggatctttttccgcttcttttctatccaatttgtttatgtttgttcttattacaaaagagaacaaatcctttagttttgcaggccaattgctcttttgactttgggatacagtctctttatcaatatactgcttcttttacacattcaatccataacatccttttcaatccaaaatcaagaataattaggatttctaaaaaaaaaagaaaaaataaaggtctactaataggaaaaccagcttttccctacatcaggcactaatctatttttaacatctaattagatcagggagttcttccaattaagaagttaagctcgttgctttttgttttaccagaattggagccaggctctatccatttattcattagacccagaaaatcagaatttttttattccattccaaaattccaaaataagaaattgattttattatgacatgctattttttccattcattacccttgaggatcagtcgcggtcttatagactctaccaagagtctggacgaattttttgcttcatccaagtgtaaaagatcatagtcgcacttaaaagccgagtactctaccattgagttagcaacctagataaactaggatcttagatacgatcgaaatccaaaaatcaatggaattacaccgcacacccctgtcaaaatcttaaaatagcaagacattaaaagaaagattttatcaccattgaaaacactcagaacaccacacctcaggtttcacccctactttccacgggcagcgggcaattccctctcgtgcctaggtgaatctaaaagccgcataggccgtcgtagggcctatccgaactccatcacgctcacccttgcctggatgcgtcaaccagaggaaagctatacttcaagttaggcagttacccattcccgcttgtggcaagcgctgtatgtcttccagtgtatcccacgaaccggaccttaattgccatgggtgcgaccagcaaaaccatgcacccacagcccaccattcagtcgcattttaattggataattatgaccaaagaaacatggtcggatgtcccaagcacgcagctcgtcatgatattaaaaggtctaatactacaattatcccatcaactgtgctagtggtaattaagcatggctaagcaaatggttctagctaggtcaacataagtaacacaatctaggcgatttattcacccaaggttgacaaagaacatatatcaaataatacggcacaagcaagcaagtaggtaaaccctgatcccatgtaattagcaaaacatgcatatgtatttgcaaacgataaaacatttataaattgagatcaacatgctcaaggggaatgtgtgacttgccttgcttcttcacaacaaccttctgatctcttttccttgcgcctgcgatctttcaaaacgatggaaactacacgctggcacgcaaaacgaggaaaaactttagtaaaaaccaagcaaacagtacataaaaaagtaaacaaacctgtagatctcaattttagatgaattttacaagttgaatggctcaatttggagttcatatgaattagatatgaatgttagaagttttgagccatcaaataaatttctataattattaactgaatttattgcgcaatttaaagtcatttatgacgtcaccgaggggagaggggtagcaatgacaagcaggccccacctatcggtggctaaaaggggtgggcgcactgtggaccgagtccacgcacgcgtgtccgtgggcacaccacgtggcagccacgcggtggccacggtggaccgacgtgggagttggcaaggacgtggcgccgaggtggcaccagcgtgggacagcaccacgacagccacgttgacggcctcgggtgaatccaacggtgcttggcggctgccgggctcggcacggcttcaagccggccagccggcaggggagcggcggcgcatggcccgatggtcgccggcaacgaccactggcgcggcggcatgcacgggatgcagcagagtgaggctgggagggaagggggatgttcaccgagcggacgggatggtgaggcgaagacgggaaggcggcctgcgacgaggttaggcggcgtcgctcctcgggttggagtcggggatgacgctccgatgactcccggccgcggctgtaacatcctgaaaatgtatcattttctaatcttgcatcatgctgattcttatgttcttaataaccttctaaacctaggaaaatataattagcgggacctcctaaaactaacttgcataaaaacatctatggtatttaatcccttttgtgtttttcatttaaaaacatatttatttcttgttggaattctattttcgaatattaaaccttctttcgactaaaactcttttattcaaatttagtttgaaaaccatttttactattatgaattatggtccaagaaatcctccaattttgccttgaacctaaaccaaagcagttccaatctcattggaattaattgttagcccatcctttgatcttaaacccatcctttattctcgatccaaatatccaaattcctccttttgatctagccaccaatttaatttctgtggcttgatttcctcttcagcacaagaatagtattatttcaaatattgtgaataattgctcttgtgctaagaaaattccaacttatactcttcattcaccctttttagccacaaatatacataataccaattttagaatcggtatcctatttattgccttcaactaattcccttctatattctcaaaaatattttgaggaatattattaatttcccttcctatttgagtgcttccaaataaattccctccaactccatctctaaatattgcactcaaataaataaattaagaaatctcttttattaattctctccgaattcaaattcttcgcaaacctagttatccaatcaagtattcaaattagacttcctttctttttgtcatcgggacgaaactccattctttcttccttttggcccaatcccttttcttttctattttcctcctccttcttgggctgccggcccagctaagccgagccggcccaaaccagcccacaccccagcggagccgcctcctcctcccgtgcgcgtgttgcgcacggcgcacaccgccgccaacgccttccctcgctgcgaagttaccggccgccgtcattcttttcttcacgctaccgttgccgtgtcttcctcgacctcctcctccgaaccgcctctcacaaccgcccttccctcctataaatagccggcccttctctacacacaaaccgaactctctctcttctctctctcccatgccggccaccatcttgccatgcccaatctcctttaccggagcaacactaaccaaatcctcgcgccaccatacttgcccccctccgacgaacccatttttctagtttcccctctcctttagccatcctataagccaccatcaccacttcttttactcgccggagttgagctcttgtcgtcgccgtttcggccatctccctcgctctctctgccagccaccgccctccccgggtgcgtcgtgctcgggaacacgcatggacgccgacgtcaccgccctccagccaccgaagcgccgccgccccgattgccttctcctctctcttctcccagctctctctggaacagagaagaagaaaggaacgggaggaagaaggagaagaaaaagaaaaagaaagactgtcaggtgggcccctgcacagtgacttttcttattttctagatttaattcaaatcctattctttagaagcccatatctcctaaaccgcgtgcataaagcgcgcacgtgttctattacgtgcgagcgccagtcaaatttggacataaattcatctaaattcaaactcttcattttgatatcaaatttgctattttaagattttatttgaatttccttaatttattcaaataccatttgaataaatatttgatttaatcttataattgaatttacaatttaaacttatatttgctttccaaatattttcttttatttccaaaataccctttagccactaaaaagccgccggctttacgccttccatggggacgtttgcgcggtctacggacctcaacgtcaaaccgttggttgtaaagcccggcaaaaaccaaacctaaggtcgaagtgctgctcctggcaccccacgccttgatgcgtacagcggtcagagcttcactatccccttgacctccattgcacgccgcacagttagctcttgagctctgtgtgatcctagccgctccgccgctactcacggttgacggagtaacacttccaccccactaaaactgcacccacctcctattcttctagccgatatgttgtctatcaacacggctagaaatgataccaaacctagttgtcatgctgtccaactctagcgacgactagcgaacacccaaaaccctagccaatatttatcctacctcgatatcggcctaaacaactaaaccctagccactattctacaaaagctcaaccttcacccatattagccacatgcctatttaaccatatcaactatctagtatatttcctatcgtccaaaccacgagagcctccacaaaaaaatatagagcctagccgatatgctatcctactccacaaacgactcccatacaactaaaccctaggtattatactacctaaacctaccgctagcaaatactagccccataatccctataccctataaaagatataggttataccttaaaccctagcccttttagccgtttatcgttttcttaccattttatggcttttattgaaattagttcttcctctttctcagtagagtctattgtcttttggatggcaacatatggtatttcgagaatcggataatcaggttgcctatcttggattatttgcgttggagcaaggcaagttattattcctccctttgagcataattatcctatattctacattctattctatgcattagccatttatgattttgaatgcataatctgaacatatagcaaaccagttatatgctagcttttgcttagccctgcctagttagactgcataaaatataatgaacttagattgggacagtacgtaagatttggttgatttgcgggtggctagtactgtctcagtcgatataagtttaccaagtgcttatgtcaaacgaacgagtacgaccgcagcttctagaatggggacagacctagatattatgttaattaacaatgtggtacctctgtacagtggttcttatgtaagtcctcgcgaaggaggcaaatatatgctgagcagggcaaatgtgatatttaccgaggcgcacataaatatcttgattatcgcgcgatgtttgtgtgattttatggaaacctggttgagatgacgtggggtctctcctccagttctctctaaaaacctcgggaactccagaactcctctcgctgctgataacgttacgttcagagcgcatggggactagagttcatggaacaggtgccacaattgttaataacttaatactgggccatgactaagctaatgattattagcaagttatggactgcgggtaaagcgtacatctactgcagtatgaatatgtttaaaactattcgaatagccgtgctcacggatttgagcatcgggactgatatggtactttggttagaaatataattcaagattttcttaaatactgctgcatatcaagcatttcaggatttctacctctttattctcagcattctgcaagtaaatctagctctacacagatattacctctcatgcattcattgttgaataatataatagcttgctgagtacgttgtactcaaccttgcttcaacccctctttttcagagtctatttggagtttttgccgaagctgggagttcaatcatataagttagtttcattctaacttaattttcaagtatagactagatacatggtttaagtctatagcaaaacattagagttaagccattctatagcttctgctgaatagttagccacaaacttgtaaatatcctattattttatataaagatatctctttggagtctttaccaaatgtatgcgatgaagatccagattggttgaacctgtatcaatctactgatccaaggcttgatacaactaaaca

SEQ ID NO: 25906 - DNA, 26600 bp, Oryza sativa
agccgaaggaggcgacggtgcaccgcgaggaggtcgggaacggcggggatcagcgaccggaggtggcaaacggcggcggtctcgggttgatggcgaaagtggtgcttcggaggtggactgggcaaactaagtggcagccggccttgcgcttgcgactgcgaagccaatggcgcaagcgatgagccgcagcgacgtttgaagcgtcggtggcgcgcggctggactcggtggcagcggtggaaagaggtggtgcgcgtggcggcggcgttacggaggcgaagaggggaaatagagtaggggccagggtagagcttggcacagcgatgccgacgacacaaacggcgcggcacggcggcccctaggatggtagtagcgggcggctggtggcggtgaatggcggtggtggttcgagttggcggtgggatggtggttccggcgatggaatggggaagcggagcagaggccggggtgcagcacggtgaggtgaagccgacggcacaaacggcgcggcacggcggtggctacggcgactgcagcatgcagctggagctcgccggtgggcggcggcgcgcggggtggcgtggggagagcgaggaagagtgagccggggctttggaaaaatggggaaaagagagagggagccccgaggagcatttttataggctcggggaggggagaacatggccggaatgggcggcaacgggcagtggcgtgggactccagcgacatgggtgagtggcggctcggcgtagggctggttcccgcggggagagagggggagtggggcgggatgtgggcgcaaggtggagaggactcgggtccacgccagttgggacgaggggaagcgcggatcggcgggaggggtgggcggcgtggccggaggttaggaatgagcccgacaggtgggacctacctgtcggcggctcaggggagaggaggtaggaggagacagctgggggaggcaaactagactcgagagagagaaccaagcgggctgagggaggggaagggagaatgggccggtggcccgaggggaagagggggaagagggtggcctggctgggaggggaaaggggagattgggccgagcccaaagacaaagaggggattttaatttcttttatttttatttaaatgagtttaataaactttgtgactttaaacttatttcttgagctccgaaaattcgcaggaaatttcagagagttcattagggcacaaagaatattacaaaatattctcggtcaatgatttttaaaggaaaattttaatttcccctataatttcacttgattaaattgctttaatttttatttaatttctagaaggtgcattatttaatgatttttaatcccgaacgaaaatcagggcgttacaataggcgttcctaaaaaattatcacacttcatagcatattggagagatgagaacttttggttcaaatcggaacttccagtataggattggaagttccggtctcaagcaaaaagttcggcggataacgaaataaaacactagctatgaactcgtagctcgaataaacaaaatgtatatgaatcaaatggtgacaaataaggtatctaagcaagatataaggtcaccaactatattaattaagcatgcaagtagatcaggtaaaaacaagatcaagatatgagagatggctagaacgagcaaaccaagagaggagacacgttgatttgtttcccgaagttcggatccaaggatcctacgtctccgttgagggaccataaggccgggtctatttcaacactttcttcacgaggttgcacaaatgcaatcatcggtttcactcttgatttcttcccttgcggaggcgaaatcgaagccttcacaaacttttcatggcacaccacaaccttgggtgctcaccggcaacacctagccgtctaggagaccatagtccccaagggtaaccaatacaatcaaagatttgcttgctatgaactcgagtgctcaaagtatggagtgaagctcactagctctcaacttcttaatctcttaatccaaatctctccccttctcaaatccctctcacaaagaggcaccacataaggtagggaaaacggggatggctctttggttttgaatttgtctaatgttgcccaagaacagcagccactcaaagaaagagtggaggagtttatatacccgagcccctcaaaaactaaccgttggaggccaacactgtaattttcggaatttctaaaatgcattttcggataagtccaaaaacttacagaagccaatctcagattcgcagccattttcaaaatttccgataattttcggatatttccgaaatattttcggaatttcttttagtttttcggaatttccgaaaagcacagagtaaaatgactattacttttcgctcgggagtccattttagatgatcttggactctatggaaagctcattcagaggactacccaactcaaccaaaaacaaggtctaaaaccactcaaaggataggttaaagcttgggtttctctcaaggtagcactacgataggtcactttgagcaccgagacatacacaaatacctcgacgttgcatccctcttaatagtacgacattcctaaactcaaatgtaaataggaagagaattataccaatagggatgccttctttacatctttctttcattgtcttaagggacgccaatgccgaaaccgtttcaccatatattctttaaatgattgatgcggttacttgtagcttcaaatggtctcgcacggtccatcatgacaaagccgtcactcttccgtcaccaccgatttggttcttcggtgccaagccccttgcttgcccttcaccgccgcatggtccatcgtgaccgaccatcgcttgcccttcaccgtcttgccatagtagccactttgtatcccacatcttcaatatcttcactttgtcattcttggtatcgttacgtgtaattatatcacttgagcatcaacacctttgcaatccttgggacctatttctttcattcaactcaataaaattattagtcccaatgatccggttgtcaacctccacatgttgaccaaccaatcgcatgtataaaatgatatgaataaatgatgagtatttatcaacaccacaagtgtcatatactcaaatatatgctcaaatgtaaagatcccaattaaatgaaagtgaataacttagatcgattacaagcataactaaactataggatttttccccctaaatgcatgcatacaaaatgtttgtgtgaagcaagagtatgcataaaagaatgaaacattaggagcttatcctatacaagaatcgaaggcatttatcaaatataggcattaaaataaaaacatacatttatcatcttcatgttctcaatgtaaagagaccaaacaagatatggctcaaacaaagcattagtctcacatgcttatgtaatcacatgaatatatatatatatgaatatagcaatatgtgcacggagagaaagagtgacatatatagcttgatctccatgcatttcatccttgtgatttaggtacatcatcaatgaacgtttctttctccactcatatgaagtccggatatcacctctcacatattccactttcatatccatatgagactagtagacaaagaaatgcttataacaatgttggtctcatgtaattggatttgtcattaatcaccaaaaccaaattaatggcacttgaactttcaaaagaaaaagagaaaggaaagatgctcatgtgattttgcaaaaggacccgtgtagtttttagaaattaagtgcatgttcctttgcataggaaattttgccttttaaaccctgatttttccataatttacacaattaaccctctttattgggatatttgtttgaatggcgtacgaaatttgcaaatatcaccgaaaatcatattctcgcatgaaaggggccacgagacattgaatttttacctcgactttgcatttcaggtacctttattgctgatatatatgattatgaaatttatttatcgcatttatgattattgattatttgtaatgctttattgcctttagttaatatctttgcagtaaaatgtatagaattgcatagaatacattgaaattatttgcgggaacttttgtgtatcattatttgcaacaattgtgcattcttacctgaatgtagttttgcgcatgttttgaatataggaaaatggctggcatcacgaattagaaaatttgctaaatctagaatatctccgacatatttattcaatgtcgaaattacgatagagcaggaagttctacggtaccgttaatccaatcgcgctatgtgcattgactcgataagtttgatccagcatttcaatatctcaccagtgcttctaagctactctcatgaatgagtatgctagacgactaggcgcgttagcatttagaaggttatggtgcacaccctacctcttgcagagcaagaactatcagcaagaatgggtattttcgactatgattgactaagaaaatgaccaagagagtacggtaattcggtgcaccgaacttgcaccaggtaccatggaaactctcaatgattctacccgagcgtcacaaaagtcgtacgcaagcatcactagtgcacatttataggtgacttatgatggttgtatggtggttaaacactcacaatagccattgggagccaaccaggaagccacgcgtggagggccaactaccacggcgaggatcttggcagcggcgctggatccgaccacaggctcgctgcccctccccacctcacgcagatcagaggagaccgatgccgccgttgctggagccgaagacgaagccggtggtgattcacgcgtgttcggcgtcgcctccctcagcaccagcatcatgtactcattcacccaggtccgtgcctcccctcctagtcccttgcctcgcccagcccgctgcacacggggatccccggggcggcgagtcggcaaacgggggcaccaccgcaaccagctgcattgcctgcacgtgtaacataccgaaaatttgctattttctacatatgcatcacgccgattcttatgtttttaataacttcctaaacttaagaaattataattagagggacctcctaaaactaacatgcataaaacccctctttggtatttaaaatctttcgtggttttattctaaaaattggtcttgttaaattgaggtattctctttgatttgattttgcatcttaaacgttctttcgaccaaaattttctttatttaattttagtttgaaaatcctttttacttttatgaatcatggtccaagaaatcctccaacaatacctttgaacctaaaccgaagcaattccaattttattagaattaattgtcgacccatcctttgatttcaaacctattcttatttatcgccaaatatccaagttccccattagcctcgaatacttctccaaatccttgctaaataatttgaggctaacatcctatttatttcccttccctctcaatcgagtgcatcaaataaattccgttatattctatctctcaaaagattgcactcaaataaattagaacatccttattttaaaatccctcaccatgtatcaatatctccgaattcaaatcctttttaaatctagccatccaaattcctctaaatcaattatttgaatctctagaaaaattagactttcttccttgtaattttgggccgaattcttcttcccactcaggcggcccaagtcggcccagctacccctcccagccacacagccgatcctcctccctgtcccgtgggcgccgccgccgtgtgccatgggcgcgcgtggcgcacgggtgcacacgcagccgctgccgtcgcctgcagctttgccgccgtctttccttcgccgctaagcaaccgccgcccgacgtcagcgccacctcacaccgctgacgccagccactgcaccaaaccgacatgatcggccaatcggatggaaggaccggtgccgtcgttctcttcttcacgacattgccgccgtgaccaagacgacgacctcctttgcgaaccgacctccaaagcctataaataccggcaagccgtccctttttctcccacatatccgaggtctctctctccctctctttctctctctttcttcctcatgaccggctgccgccaccgtcggccgatctccttcaccgtagctccacaacccaaaccctcgcgccatcgggcttgcctcgacgaggggaatccatttttctagtttcccctcttccctatccactccatcaagccaccacaaccacctcccttgcagccgaagagaagctcttctactcgccgttccggccaactcctcctctctctcggccagccaccgacttacccgggtgcgcgtcgctcgggaacacgcttggccgccgccgtcgaagccgttccaccatcggagcaccggcgccccttctctctctctctttctctctctctctctctgttgttacacgggaagaagaagagaaggaagaagatgacgggaggaaggaggaaaagaaaaagaaaaagaaagactgacaggtgggcccctacacagtacacttcatattttctagatttaattcaaatcctattttttagaagcccatatctcctaaaccgtagatccgattccaatgaaacttggacctaaattcatctaaattcaaaccctatcttttgacaccaaatttgctattttaatattttatttgaatttattcaaatattgtttgaatttatatttgccttttcaaatatttctttttaacccagaatactctttagccactaaaaagccgccggttggaactttacgccttccatggggacgttcgcggtttactatcctcgacgtcagactgttggttgtaaagcccggcaaaaccaaacctaaggttgaagtgctgctcctggcaccccacgcctcgatgcgtatagtgctcggagtttcactatttcctcgacctccacagaacgccgcacagttagctcttgagctctgtgtgatcctagccgctccgccgctactcacggttgtcagagtaacacttccgccccactaaacccacacaaacctcctatccctctagtcgttatgctgtctattgacaccggctagagaagataccaattctagtcgttatactgtccaactgtagcaacgactagcaaacaaccaaaccctagccgatgcctttctaattaaattccaactaccatccaaattccatacccacctatccaccatactattaactacctactcttctagaacctatacataaaatatagaacctagccgatatgttgccctactccacaatcggcttaaatataaccaaaccctaggtattatactacccaaacctaccaccagccaatactagccacatactcacttaaccagttatatatcccttactctccaagcaaccaaaacccacacataaaatataaacgacatgagttgcttgatcccctctccacctcaacctccaaccctctagaacctccacataaaatattaacccaataatccctataccctaaaggagatagattataccctaaaccctagctctctttagccgcttatcgatcttttgttattttatggcttttattgaatttggctcttcctcttcttcagtagagtttattttattttggatggcaacctgtggtattttaaggatcggataatcaggttgcctaccttggattattcgcgttggagcaaggtaagttattattccttcccttgagcataattaccctatattcttatatttctattctatgcattagtcattcatgattttgaatgcataacctgaacatagcaaaccagatatgctagctttgcttagccctgcctagtaagtctgcataaaaatataatgaacttagattgggacagtacgtaggaattggttgattttcgggtggctagtactgtctcagtcgatatagttattaccaagtacttatgtcaaacgaacgagtacgaccgcaattctagaatggggacagaccttgcaaagtaggttgtctagcaaaggtggtacctctgtacagtggttcttatttaagtcctcgcgcaggaggcaaacttatgccgcgaagggcaaatataacatttaccgaggcacaggtagatgatttgttgagctcaagtgtgtgtattgtgaaaacctggttgagatgacgggggtctctcaaccagttctctctctaaaaacctcgggaacgccagaacttctctcgctgctgataacgttacgttcagagtgcatgaggatgaaagttcatggaacaggtgccactgatgtcagtaaccgaaaagctttgccatgactaagctaatgaatattggtatgtcatagattgcgggtaaagcgtacatttactgcagtaaaataaacatgaatctatttgaatagccgtgctcacggaattgagtatcgggactcatatggtactttggttagaaacctaattcaagattttactaaatgctgctgcatttaaaacatcaggctttctatttctatattctctgccttctgcaagtaatcgtaatcctactcaaatattaccttttcatacattcattattgaatataatagcttgctaagtacgttgtactcacccttgcttcaaacccctttttccagagttaaattgaagttcttgccgaagccaggagttcaatcatataagttagtcttatttcaacctagttcacaaatctaaattagttagatggtttaagtctatagcaaaatattagagttgagacactctatagcttctgctgtaatagttagccacaatcttgtaaattcccctattaatttatgtaataacatctcctttggagccttgttcaaatgtacgcaatgaagatccagattgttgaagctgtatcagtctactgatccagggtttgatacagttaaacatgtcggtttccgaatcattagttttgagatccgacagcacgtccggctcgcttcccccgtttcgttttctgatgctgttttattttgggggattcttgaattgaggataaagggatgacatggaggtgctcgacgagccgctctacgctaatttcctgcaagtcactggcgtcgacaggccatatcacgcggagcttctttctaacatggtaaaccttgacaaaggtttgaccattactacttattgacggtcgttagtataacgccccgattttcgttcgggaataaaaatcaattaataatacatcttctagaaattaaataaaagttaaatcaatttaatcaagtgaaattatagaggaaattaaaatttcctttaaaaatcattggccgggaatattttgtaatattcttggtgccctaatgtactctccggaactttccgtgaattttcggagctcgagaaatagttttaaagtcacgaagatcatttaaccaattaaaataaaaagaaaacaaataaaatcctccctcctctctttgggcccctttcggcccaatttcccccccccttctctccctctcgggccggccttctccctcggcccgctcggctctctctctccctcaagtctgctttacctccctcgcccgttttcccctctctctctccccgacaggtgggacccgaggccccacctgtcagctcctcctcctacctctggctggccggctgcaaccgccagggcccgccgagccaccccacgacgccgccgtttccgacctcctccaccccgcgcgcgagcccgccggtcgtgggaccccgtcgccccacgtcctctacccttttccccactctccccacgaaaatcgccgccggttaacctctccaccacccccacgatgccccggccatctcgccagccggttgccacctctctcgagcacgatcccgtcgctccaagcccataaaaagcatccccggcctcccctattcattttccccaattcttccgagcttctcgcgccctgtactgctctcccctcgctgttcccatcgccgccgctcacccgcgactctccatccgctcgccaccgctgctacagccgtcgccgtgctgttccgccgccacctgcggcttcgccgtgccttgccgcacctcggccccgctccgttttccccattccatcgtcggaaccccctccccaccgcgctccctctctccaccactcaccgacgagctccagccgccgctcctcgccgctccagccaccactgcgccgtgccaccgccaccgccggcatcgccccgccgagctccaccccggtccctactccattttcccatttcgcctccggaacgccgccgccacacgcaccacctctctccctcaccatggccacctccagccgcgtcgcaacgccgcttcggtccttgccgacccgcgtcgtcgccttcctcggctccgcagggacggggagatccttggccactggccctcttcgccggaaatccgcccgagctccacctccctcgtcgccggtgagctcctcctcgtattgtcgtggtcggcagtcgtttccatttacctcgcaccagttctcacctccctagcccctccttgattttcctcagaccgaggccgagcccgtcccccccttcctgagcgacgcccgtcgccggagctccgtcgcgccgtcttcccgaggagccccgctgccaccgttccttgccgtcggccgcccgtttgccgtcgtgccgctcggtgagcactcccctccctctccccttcctccccttcgtcggccacctcctgtgcctgctcacaacgcgccgccgtcgccggtggccgtccgaccgggtcgccgccgccgcgctccgcgccgctgccggctgtgccgggcagtcggctgccgcctcaccttaccgcgccgcgccgccgctccctagcgtgcgccgccaccgcccgcatgcgctgccgctccccgcgtcgtcgtcggccgtcatcaccggtggccgcgctgccgtgcgccatcactcggctggccggctttgagccgtgaccgtgccccagccgcgcgccccgtggccgtccgatcggcttaggccaatccaggccgtcggttcccgtggaccggcggtggaccgcctcggtggtcccggtccacggtggaccggctcccttgtgccactgaccggtggggcccgcttgccggcgccgcccctcccctttgatgacgtcagcaaccctcttttcctttggaaaaataaataataattgcgtcataattcgttaataattctagaaattcatttaaatggctcaaaacttctaaaattcatatctaattcattcgaactccgaattgaaccgttcaacttgcaaaattcatctaaaattgagctctacatgtttgtttagtttttatgtactgtttccttggtttttattagagttgttcctcgttttgtgtgccagcatgtagaatccgtcgtttcggaagtccgcggtcgcgaggaaaagagttcggaagatcaaagtgaagaagcaaggcaagtcacacattccccttgagcatgttgatcccaatttacaaatgttttactgtttgcaaataaatatgcatgttttgctaattacatggggtcagggttttacctatctgctcgcttgtgccatgtttacttgatatctgttctttgtcaaccttgggtaataaatcgcctagcttgtgttactttgatgacatagctagaactatatgcttagccatgcttaattaccactagctcagttgatggggtaattacagttttagaccttttagtatcagaatgagctgcgtgctcgagacatctggccatgcttcatggtcgtaattatccaactaaaatgcgactgaatggtgggctgtgggtgcatggttttgctagtcgcacccatggcaattaaggaccggttcgcgggatgccctggaagaacttatcgtacttatcacaagccagcgtgggcaacggctgggcttgtagtgtagctttcctctagccgacgcatccaggcaagggtgggcgtgatggagtttcgatgggccctgcgatggcctatgcggcttccggattcacctaggcacgagaggggactgcccgctgccttgcgaggagtgggggtgaaacctgaggtgtggtgtgcttggttagagggggttatgcgaagggtcctgtcacggcctctttccggtatgtcgtggtggcatgtcgtcgcacggaaacgtgtcgtggggctgtgtcttgtgggtacagttgtacacctctgatcagagtaaaactattcgaatagccgtgcccgcggttatgggcagtcgaccagattcaccgtgattagtcccatcttaacaaatcgactcaatacacaaatcgactcaatacactgtagttcaggtgggttggttgggcctgttcaacgtggtgtagtgttgatcagtggagattcaatattactttaattactcaacagttttactgttttgctcaataaaatgttttacaactgcctttatgcaaatagccacaaacccctccttgtatccccttgcacgtctgcatcgttggtgtggcttactgagtacggtggttgtactcagtcttgctattattcccccttttcagaagtgtagtgcttctgagctgaagacgaagttagaagaccaaggctcagaccccagttgagttttgcctgtggaatggagctgaagccccgctaggatcgcctttttccgctgctgctgcttttgtttcggtgtgaggactaagtgcctcttctgtaagtattttacgctttatttacgtttggaactgtttattacttgtcgttttgtgtaccctggctggtcctagacagggatttaatacacaaaatagtctggaaatttgggctaaatttctgggcgtgacagttagcgatcagtttcacccgtcaatattactaaaataaaggagaactagttatgcttacaatgcatattcatgttagaataagaaatattccactagcactaggttttctaaccttttgtatagaatgagaataaatggaggagaatcgatagcaaaatagacgatcaatcaatccgacgctgtcgtgaatcagacttagaggaagatgggccaagaactcagaaataacatactcacaagtctacggggagaacacacgaggagaccaccagccaaaacctgggctggttgggccgacccctggttcggccaaacctcgggtttggccaaacccctctcgtagccgtttgatccagggctttgcctggacgttgtagattagaccccaatgacggttggagggtatttctgaccattccaaccgtcacaaccgtcattgggaggctataaaaggggctctcatcctcacttcttccacacacctcaagcgggaagaatcaagctctctctctagtttagtactagaataggaatagaataggagtcttaattcgagaagtcttcagaaggattcgggtatggttctagtagctctgctctcttttgtaagacttatactttatttagaatattcttctttatactactctggtattgtattacttttcgagtatatgtataccaactttattatatattcaagttatattgattatgatgctagcttatctgggaaatgcaatggtgtgggtataatgatcgtgtatacgattgctctatgtcatgacgatgatattagagtagtatttggtaatttaagcgtagtgtttagattactggatatcattattttgggttatatgctgcgaatacgtcgaggtgggctgctgatgctgacagctcagtacgggtattccatcgcgcgtgtatatagtcctaggttactttcctggggaaggtactcctccgtatttagccccataatataccatgagtgtttctacgccattgctggaaattatatttctagtaatgtcgttaagaaataccaacactactccaatcacactactactatttccaatcacactactattattgctattggagaatgaaattttttgttgtgtgatctttgcggcatttagtaatggatgttattttgaagtagcggtcgtttggaattgaaccaaatcagctgtaatcatgctcttatgacatgattaaaagaatggggaggtggattcgtgaattacctttttctctttttttttcttctagcactttcatggctatttggacctttctgtcgaaatgttctcaatgtcttaattagactatttccattttaatatcgaaaataatacagtgcaccatattcgtgtgtgctattttaaaatagctctgctaagttaccataaatttctatactatcaatatgcatgcagcatggagccttctatataatagaatcactaaggaatacttctagtctgatcctgatggtaacaaagttatcagtgaagtcaccttttgggccagggaagagaatatattgttactacaaggtagatttttattttctaaaatgttgctcaatgatatataaatgatcccttaatcccttaatcttttgtttgtagcacattgcaaaacaacacaatatcagttgcatgtagctagaataaggttaatgtgctcttcttctcgattattccttttcgttccataaaatatgtatgattagtcacagtggcatctaacttcttccctttatgaaggaatgtagaaatatacttactcagatggagatatgatggctaactgcttactattgagctgatgtatttctgaagtagtaaagtcgtcggtaggatgtttcaaagaaactaatgatgtaccacgcaatgacataaatcaggaaaggattgttggcaactttttgtgacaagttggcaagcacgattgcagcacctaaagctttacggtgatcctaaatttgccaaccaccctaatctaccaagcgctaaatcaagatgagttttgataaactaaaccggcttgtggagccgatctagatggaacggtagataattacccgtctcgtgggcaaaacggaaggttttcaggacaaacctacaaagaggtgtcgcactctcgtagcagtggcggacaatttacagcacaaatcgacaaagatggacaaactaaactagaactagaagcaatatgaaaaaacgattctattgattgattgtatgattgtctttacaattgaaccggccttgtcccttatataggggttggtcttgccctctacaggccctcctccacgtccaactcgggataaaaaccaaaggaaacccgaaacatgccttcccaagcaaggaaatctcgagacccgacaaaacagactcgggctagaactttgccggtcagaccggccacacaccgtcggtctgaccggccaacacacggcggtctgaccggccttctcagaggaaaacgggcaaaacttccgaactttggcaatttccctatttcaatcctaggtaccaaatttaggtgtaaacaagaattagttggagttgcatgctatagtccttatttgtatggtattatttgttcaagttatgatatggacatacctctttctttttttaggaaaaagcaagagatgtgcatacaaagaaatgaagtaatagcattttcatatccatttgaatttatgcttcttggagttctaagctactatgtattttaaatagtactgctaaatcataactaaatacatgttttttgtatgatggattcactatatttaaagtccttaatttcatgatgatgctatgtcatcttggcatatggttaattaattgaaatatgatttacttggtgggttgtgggtacatgcatgatttcatttggtggtcgtgcccatgacaattaaggaccagttctcgagaatctctggaagatatactcatactaaccacaagccagatgggctctaggctgaatcttaagtataatcttttctagctgacacaccgttggcaaggtgttaacaatgaaatttggtaagcccctaagagaattatcacattaccaatagtcaaattcttgctatattcggttaaggaaattaatcgaataaaaggatgcatatccagaaatgaccgagttcaaggaggatgcggcatggcaagttatctattaattagaaatagtttgttagtttccttttatctttaggaaagtgtgtttagtgtcctataaggactttatgttttccttttatctttaggaaagtttctttcttgtcctacaaggactagtatctccccatgggtataaatatgtacacccggggtcatggtaattatctctcgatcaatactactctcggcgcatcgccatcctctctcctgaggtttttacttatcaaccggcggaatttggcacctgacgcggggctgcatcgggtcagttcgatctccagcgaaggggtaagtcctacgttccgccgccctagtgaatctattggctaaattggtgttgttcaaggctgcattgctttcgatctcttggatcgctctagtttggttgatatattttcttacctgatatctcaattctatccctaattgcattgtgtttagagacacatcggtttagttaggactgtctcggtaaggtatgatcttttgtcttagccgatataaagacacaactagctcggatataaccatgactaccttatgtattaatcaactaaaggtgcatatgttttatattagatttacttgttatatatttgaacaaacgttgctacacaatgagtttcatgtgtttttgtttgcagaggtactcgcttgggcgaaggaaaagagactgagcgtaacgaattcatggatgatcaaagaagttgattgggaccaaaccaagaccttcttcaagtccacttccatcttaacatgtcacttttggtccatagaagacaagagataaagttctacatgttttgaattcggattcgggcctcctgacagcatcaacttcaaacggatctagccgctaatctagaaggaatttcggggcccatgagtacttgttggaaagcttatggagtctactttcatatggatttggtcccacgtcaaaattcctaccgagctgtcgagaatttgcaaaacaagccacgtatctcatccagtccgaatctgatttgggttttgggccttgtaattatgtcgtgggcttagcccaagcgggtgtgcgccctaggccaaccctaggacgtccctaatcacatttattcagtagccgtcatcgtttagagtcaggttttgcttagattattcagtcaagaacagttttgccgctagatcggtttgtggaaccccaaattcgagcgcttaatcattcatatgcaattgtgttgcaatctatcttgttattgattgtgttcttcgattcgcatgcaaggattagccttctcggcgaggtcaaccgggtttcggcatggttgataactagaggagacgtggtgctgtgattgcagggctcagtagcgtgtttgttcagaagctggatcgagttgtgtcgcaactccgcccaaatcattgtttatcagaacctttcggaagatcgggacctgacatcccctcatcaatagatttgttatatccatcacattagacagatctatcagcttatcgaggattagattatcatatccaatctcgtgctgcatcggttagtttcgacctactagattgttgttgataatataaaccttgttaagctgacagattcatgctaatgttttatcggggtgctagccgataaattatctggacgttgcatcggcttacaaggattacatacaagttggcttatccaattgcagcaaaactttcactgtttatctaatcgtttggattttacgacatcggaccttcagccgatgtatgctttaaccttcggatctttacatgttctatcatatcattgttagccgattggtttctactggactatattattgttatattatattatcaacagtcgattgcctttatattgttatttatatcaagcgttagaatctacatcagaattatagccgatagctcaaaaccctatcccaatcggctagtatcggcatcggccggaattaatctatcggcttgttagctgatcggctatttgatccgttgtttacatatcttgtcagttgcagggtcaaactgactggcatgcccgcatctcatcaacctttggacctgtactaaagctaagcagatctctcaggccagtgtgtgtttttcgcatcaacacaagggtaggcgtgatggagtttggatggacctggattttggtctatgctgcttccgaatttacctaggcatgagcggggttgcccgcccctggattttggggtgggggtgaaaccgaaggtgggtgtgctagttagggtggttatatggagggttttgtcatgatttccccctttgcagtatcatggtggtacttcgggtatggtttcatgtgtagaatcgtgtcttgtggttaaagttgtacacctctgatcagagtaaaactattcgaatagccgtgcccgcagttattgggcggtcaaccagctcaccgtgatttttgctgggcctgtcgcaacgtggtttagcgttggacagtgatgatgttaatactacttaattatctactgttttactgctttcaacttatgatttacaaatgttgcttttactgcaaaaatatcctatgagccaatcctttaattatccttgcatcataccttccccttggtatgacttgttgagtacagtggttgtactcagtcttgctttattttttccaatcccccagaagtagaagttggttcaaatggtgagttctatgaagattaggcttgtgccagccgtcaagagtttgcctgtggagttttggaggaagcttcgctttgctgagaagattaagtttagttctctagtttttccgccgcatatgagttttatcttgttatttttgtaagacgtggaactgtatcaaattgtcatctatgtactctggttgatgcctggacagaggttaaatgcacagatagccggtgattcgggttgtcgaatccctgggcatgacagagaccaccatgcctcctcccactgcagccacagtcgccacagcagccgctgctgccgtattccaaccacctgctgtcgccggccagccgctaacgccaccgtcaccacgagctctgcgcctgctatcaccaccacgacgacctctcccgccgctagtgcccccgttgccacagcagccaacagtcgctgcacgtcggccagccactgctgccgccgccgtccagttgctgtcttcgcgccgttgcctccgtgccgtcagctgtcacgacaaaaaatttagcccaaatttccagactattttatgtattaaatccctatccaggaccaacaagggtacataaacgacaaattaatatatagatccaagcgtaaataaagcgtaaaatacttatagaagaggcacttagtcctcacatcgaaacaaaagcagcagcaatggaaaaaggcgatcctagcagggcttcagctccactccataggcagaactcaactggggtctgagccttggtcctctaacttcgtcttcagctcagaagcactatagttctgaaaaatggggaaatagcaagctgagtacaaccatcgtactcagcaagccacaccaatgatgcagacgtgcaaaaggagacaaagggaggtttgcggttgtttgcataaaggcggttgtaaatcattttattgagcaaaatagtaaaatagttgattaattaaggtaatattaaatctccactgatcaatgctacaccacattgaacaggcccaaccaaaccacctgaactacaccggttcattaaccaattattaaggatgggactaatcacggtgaatttggtcaatcgcccaaaaccgcgggcacggctattcgaatagttttactctggccagaggtgcacaactgtacacacaagacacaatccatcggcatgtcaccgcgtcatcatgtgcccatgatgagcatgtcaccatatcgagtgattgtgataagacccttcgcataactctcccctaaccatccacaccacgctaaagtttcacccccaccccctaccccggaggtgggcagtcccctcgtgcgccgtggtgaattcagcagctggacaaacgaacacccggccgacccaactccattacgcccagcctcgccaccggtgcctaggaaattgtcgagctataatatagatcaagtagttactcattccagcttgtggtaagcacagtaagtcttccagggtttcttgtgaaccggtccttaattgccatgggtgcaactagcaaaaccatgcacccacagcccaccatttggtcgcattttagttggataattacgaccaatgaaacatgttcggatgtctcgagcacgcaactcgtcaaggtactataggtctaataatgtaattatcccattatgtgagctagtggtaattaagcatggctaagcatatatgattttagctagatcaacataagtatcacgagctagataatttatcacctaaggttgacaaaggacgggtaacaagtaaacatggcaaaagcgagcaaataggttatacctgatcccatgtaattagcaaaacatgcatatttatttgcaaacagtaaaatatttataaattaggctcaatatgcttaaggggaatgtgtgacattccttgcttcttcacttggatcttctgaactctttccctcgcgaccgcgaacttccggaacgacggagtctacacgctggcacgcaaaatgaggaaaaactctaataaaaaccaagtaaatagtacataaaaagtaaacaaacatgtagagctcaattttagatgaattttacaagttgaatggaccaatatggagttcgtatgaattagatatgaattttagaagttttgagccatttaaatcaatttctagaattaaatacgatttattgcacaattattaattaatttctcataagaaaagggctgtcgctgacatcattaaggggagaggcgcgccaacaggcgggccccgcatgtcagtggcataaggggaggcacacggtggactcggttcaccgcggcgggggcggcaccgtggacctggaccataggaccgacggcctagattggcctgaagccgatccaacgggcacgggcggcgcgacaggacacgggcacggcacaaagccggcccggccgagccacggcgcgtggcggcgcggcaaccaacggcgatggccggcgacgcaagtagcggcggtgcatggcacgggaggtgggcaacgaagggggaaggaggaaaaagagagggggagtgctcaccgagcgccatggcggcaagggggcaacgggcagcggtgaggccttctcaggaagatgacgcggcggcgcctcagcgatgaccaacgaaggcggtggagcggctgaggttcagagaggggcggcggagccgatagggtggtggcgcgtcgcgacgaaggcccgcggaagtagcgggaattggcggctagtgacagggaaatggcggtgagggctcgggtgcacgctagaagtggtattttggtggagttccggcggcgatgaacggaggccggggtgtggtggggcgctgcgaacgctgtggaggcagtagcgtggccgagcgaggcgatgctcgccggcggggagcggctggaggcagtagaaacagtgatggcttagcctcgcggtgggagcggcgtttcggtggcttttggggaaaatggagcggtggacggggtggagttcggcacggcgatggcggtggcggcctagagcagaggtggctagggcaacggtggtgagtggctggagctcgccggaaagaggcggaagttggttgcgcggtgggagcgatgtttcggtggtggtggggaaaaacggagcggtggccgggcttgatctcgcagcggcgaagccggcagtggaggacccaggatttgaacccagggtaggcctagccaaagaaaatccaaatacaatacaatatgattcgatataaaatatggtaaacgatacgtatataactctaaatggttcgatacaattagaaaataacaaataagtttaacttttaggataaaagcttgtaagtctaactattttttttatcaaatgaggcaaatgaatcggacggattaaatgctgacatataaagaagcaactccatactaacttcatcaaaccgattctcaagctcttgacgaattctatcgatgacaccaatgtacacttctctcctatagtggtcatcaattgtttgttccaggtaaaaacggtgggatcttccatgaggcatatatttagcatccattgcgggaatatcaatggaatatttgatgcaaaatgatgtaacctttcctaagaaaccttcccaaccatgcaaaaatgtcatatgaagggggtagtatgctagtagtggtctactactactagaactctagattctagaagggggagagggactgagggactgaggaagtgaggaattgctcactggagaggcggactggtggagagccgaagaaggagtggccggtagagcactagcgctgggctcttgggcggctgccggctgggcgcgtgctgccaccgacgcacgtcgggcaggaccgcgggagccaggaggccgccggctggtcgcgccgacgcgggacagagagagtgtggccaggcggggcgcgccggcgaggggcggagagggcgcggccgcacgggctccgacgcggcacgaaaaggcagtaggaggagcggcgctgtgagtcgcggcctcgcgggagcgccggccaccggattcacgggctcgcgggagcgccgtggcctgtcgggagtgggaggccaggagagtaagtggagaggggagataagagagttagagttttcttttgttgggccaggctttcttatgggccaagaaaaataaatacctgttcttatctgggccaaattatagggtagtcctgggcctacctagactactctttggtcccgccactggaagccggtggtggcggtggcgtagcacggcaacgacaggagccgcggtggctcgtggttggaggacgccggtgggcggcggagctcaggccggcgtgggaagaacgggagagcgtggggaacggcgaggaggggaaacaagagaggatggccgggatgcgttttatagcgctcggcggccgggattgtggccgagagaggcggattcggggtggcaaccggtaggaggtggggcgccgacgtggaggaaatggcggccggatttcgcgggaaggggtgggggaagtgggcgcaaggtggaggaggaccacgtgcgcgcggttagatgcgggcggggagcgggatgatgcttggaatttcggtgatgtgggcggccatggcgactgaagctgggcgactggaggaaggaggaggagttgacaggtggagtcgctgagccctcctgttggcgagggagggacaaaggaggtcgggagagaggccaaatagactttaggggaggggggagagggccgagcggtgagctgggccgggaaaggaggggagggagggggaggctggcatgagagggggagggggagggtcgaaaggaggctcaaaggaaggaggagatcttaaattggtttttcaattaatttaattgattaaatgaactttgtgatgttaaaattagatgttgagctccaaaaattcacagaaaaatcaagagagtatattagggcatagagaatattataaaatatttctggccaatgatttttaaaggaaacttttaatttcctcaataattcacttgattaaattgctttaacttttatttaatttgtagaaaatgatttattaattgatttttaatcccgaacgaaaatcggagcgttacattagccaccgccgctgccaccacgggcgctgccgcggctgtctcaggccacatccgtagctgtctcagccgccgccgctgtcacccatcaccagccgcgtggtcggccaccattgtctccgcgacggcggcagggtgcagggagttaggaggtgcaatggaggtggaggaggcagaaagccatggatgaacggtgcggcgagctggtgaccctaacgtggagagcggcgcaagtggcagcactgatgatgtaagagcatttcgaagaaagggctaaacaggttcctaaaaattaatttttgggattttggttaaaactaggtctgttaatcacggttctaaattttatcccctcctataaaatcgataccaatctcatcagaatttgggaaatttgggaagcagaacgccgtcctaatcgcaggaatcacgccaattgttttactgtcggcgccaaaagttttttttccgtccgcttccttttcctcgtcgcgccgttttttttcgagaaattttttttccgcccgcttcctttcccttctcgcgcctttctcctctcgccgttttctttttcgcgagaaacaacagcgcccacgccggcacgccgccaggctagggttttggggctcctagcgccagctctgtcccgagcgcccgtccgtccagggctctgccggccgtccgtccagggctccgccggccgcctatccgggggaccgccggcctgccagccgtccgtccaggggcagcgccgcccgccgcccgtccagggcaccaccacctcgccatcgaccgtccatccaggtcaccccgacgacgacgtgtgctgctactgctgattcactttgaggtattttcagagaaactcatttctacctgtgctcgtatggtttatacgcactgtacaagtgcttgtgcctgtcaccaatcgttgctgctcgctgccgttgcctggttgcttatgccgccggcgctgacagaggaacagctctgcgtgcgtctgcagcactgtgtccttcgcaaggttgtctggatcgggatattaggtagtaatgttttgctccaagtattatcgtatcgtaatattggaatactatgagattttctttttttaagtttaattaatattcatattaattacatatatattatgcaaatatagacatttatcatgagaaaccacgttggttttgatatatttaactgatttctatatatacttgagcatattcatttacattatttccaaaccatcttattttaaataatattttgtagtaacgtagggatcgtagaatcgggataccacttaagatttcgtaggatcgtgtagtaatgaatagtaggatcgagatactatgaaaattaggatactaggtgggatcggtatcgtttcggcttggtaggatcgtagtatcataagatactagaatacgaatcaggatactgacaaccggacttcgttcgatatcatatcgctgcgccttatatagcctcacgaattcggacgtcaaagggtttttaagttgtatttggacgtcaaatattaaaacacgtttcttattgtataaggacgtcattttgagaaaatgaaggaagcatatactttacacactgtaattatatacataccacgttttgatattgtatttttaggttaaatgaaatgaagaacatttaatcaatgttagctaatttgtgttcaatgaaattttctacgtaaattatgtttgttttcgtggctgcgcacgccgcgctctcccttctagtaaaaataagattatatcatattggatataatgtgctcacattgtggaaaacttaatactaatatttgagtttgtttatattattgctgtgacatataatttgggaaacacacattacaggtgcacgatagctggtggaagggaaaggccaaaagggagaagaaaacgagaaaataaaagtttcaggcgccgcttcaaaatcccgcctcaaacggtcaaaagcccctgatccccctttcccctaccgggcctctccgctgccgcctcatcctccacccccctcactttcctgtcgcgatgccacggcggcggcggcggcggcgtgcggcacccggcggccaagttcccccagagctacgcctggcttatggcgcccgcgcgctcacgctcggccgcgcggttttctccctcctgccctcgcctcgacattgtgagtccccctgtcctgcgtgccggggaagagtggcctcggggtgcctcgcgtgccgccgctgggagcacctcctccgtgacggggaccccgtcgcttatcgccgcctcatcacacgagccgtctgcgccattgcggccgacgatctgtccgcgcccccgccgccccggtacactccgggcaactccgggcattcgcaggccagggtttgtcctgctgctctcctactctcgatcttgccttacttatgtgctgcttagggtgtgtacatttctcgtcttctattggttatctgaggctgccctttttttttgcctgcatggtgtttgactcacagctcgttcgggagatgatgaagtcgatcgttgcggatcagtctcatggaaccaagaacgtcctctgcaatggtttgcacg

SEQ ID NO: 25907 - DNA, 2149 bp, Oryza sativa
cccgttgaagtgctgccatgccagtatacatggtatggttgttactagtgaaagaataattttcagttaaaacactgtaaaattatcctaacttaatttgttggatatccttgtctccttggtgttggtggtgtgaggcatctctacgagcatgttcaatcttgttggtcaaaaggggtcatttctggcaatgagtgaaaaatgatgagataataaacaaagttcacacttaaactaccaattttattacctgaaccagccatttatagaatcagatcattagatgtggtagttagtaactagccagtaagcattgaaataaaccaattattccattgaaatactgataaactaccatttatttggctcaacgacaactatttggaaaaataggatgtttggattctgttggggctattaacaatgtcgtttaagatgtgctaaagttagctaatattgaataaaggtaaggacgtagggttttgtgaatacttggtcttcggtgccaatgacattggcgcctatcccccttcacataagtggcttagcttccacggggaggctaggggtacggtgccaatgtcattggcgccctcatgttggaccataacaccaatgacgttagccccacaagaaaggtccattcccggaataaatttttctggggtctatttgtaaagtaagttttcaaaaaggaccaaaaagtgaattacaggcttataatcgttgataaccactcatcatatagctctgaacaatattaggttagccatacggacttatgtaaacttgtacaaactggccttggatgtgtcaaggaagctgtgatgcaattatatctctttagtttgcttcttcgcacatactattgattttactacttcgaatcattacgacctgataacttcttatatgattggtcgagtgacatgttggctactttgatatacacagatattattttatacttcccattaataatattaggttgttattgttattagggtggccagtctatatgtatcagtgatcttgtttcttcttcatcttggagtattcttttgcacagagtaagtttaacaaaaatccttttctctgatgattatggcctgcaatctttttttatttgataagatacttgtttgtgtttcagatcggggatcttctcatgtgctatttgctgaggtgcacatcaatctttctgcctgttaaaaagaatgattattttcaggtctctggtgttccactcaatgtggttctgcgaaatcctatatttgcaagtactgttgcgagaaaacatcaaccccaaactacaaaagcaaaatgtcatacagtaagcatttatttccagattttatagtttttcgactattgagtacaagtctttgtccagtgaaccccgtacaaatatttgattcccaacttaatgctctgaagacacaagtcaacaatttatctcagtatgactaggtctaccatttaaacaagtctcaacattcataaatttattttttcatgtataactataggtgaaaatagttctcaaatacagaaggaaatgtttacctcatccaataatgtgatatcctgcgatgttttatgatattcttgagtaagcatatttttctaaagaacaatagttttgttgtgtgtgaaaacaataacaataacaataacaataagttatacataaaagcctttcagaggtggggaaaggtgtcttctttggtagaaaaaacaaaactatcttgattagcctgattagttatatgtgattttggaataaaagctagacggagaacagtgtctgggattgcagcggaaacatgacttatctgacttcgtgttgatttcattacttcataaatgttgagttccaacaaggccacaacttttctgcaagatttttaattaaataggcaaaacacagcagaattacgatgaaatgagtatatcgcaatttctggttttcatgaagttccaggaatacaaaactagtccaaagaattggcacataaatttaaatttcccggtaataccaaatatccacatggagacatttttgtttataaagtatttttatacttttgtcaattttgtcagagaaatcttcaaattgcatcgtctccataactcgtgctataagaaa

SEQ ID NO: 25908 - DNA, 698 bp, Oryza sativa
tgtatttaaccacatcggccttacatatcacagcgcattcattggataatagataatgcctcaactttgtgcagagaaatatagacacaaacacaacttttccataggagaataccttgtctctccatccaagagcctgcggcttaaataaaatacagctctctctttcccttcaagctcctgaatcaaaactcagccgattgacttctcaccggctgatagatataatctgaaaggtatacccttctgtggagggattaaaactggaggagaactaagatattctttaatattatccaaagccttatgttggttagcccccagatgaattcttgatcggctttcaatctcaacaaaggtgtaaaaggttccaacctaccagataaattagaaataaaccttataacaaaatttatcttgccgatcatttcctgcaacttcttcttgcactcctgaggttgaatcttcttgaatgcataatactccttttgagttacctcaatccccctctcatgaacaagaaatcccaaaaactgaccaggcgatactccaaagcacactttggcggattcatcttcaggccatattttctagtcctctaaaaacccttcctcaaatccggtatgtgggtgttctaccttcttgactttacgaccatgtattaatataaaacttaaactaaccagccgacagatcat

SEQ ID NO: 25909 - DNA, 1182 bp, Oryza sativa
acaccattttttgccttccattgcaagaactccagagtggtatccaactttttgtgcccctgctcgcaacctgggtacaacgacgttctgtggtcctctaacatcttgtccaatttatgggcccccttttcactttcgcagtcctccttggcgtcctgcaacatctgaccaagatcatctgcaacgtcgttaccatcagcatccctttcctcctcgcccgtttgatttccttcaaatccagcgtactgaccaaagtccggaatattgtcgtcttccacttcatcttcttccatttcaaccccttactctccgtgggatgtccaacagttatagcttagcatgaaccccgactcaaacaagtggaaatgaatagtcctagatgcagaatactccttctgattcttacacttattgcatggacaacaaataaaacccttatgcctgttagcttcggccactctcaaaaaataatgcacgccgtcaataaactctttggaccaccggtcagcgtacatccattgccgatccatctacatgagatggaaaaaatcgtacacaaataattattcgtacaataatgacagtcatacaataattataaaataataacaaactctttcaacagtcatacaataatgacatatcattattcatacaaaaattataaaatattacaccaaataattcttatttactatttctaaagtttaaactaatattaatgtgttgtacttcttttaattttcattttagcttgttttctattatttaagattaactttcactatattttccttctcaactattttataaaaccttctttagcaaataaactaaatttctatatattctttcttccccacacaaattttctctctcatcaacttacaactaaattttagagacaaaaaattgtgcaaaacatagctccaaatgtaatatgacaaaaaaaacattggaggatgaagttgctaaccttttagccacctccgatttgtatataatcaccaaaataaattcactagaaattttggtatgacctcccatcttttttgaagaaattttgaagcttgctcgggcagctggaggaggaagaagacatatatatatatatatatatatatatatatatatatatatatatatatatatatatatatatatatatatatatatatatat

SEQ ID NO: 25910 - DNA, 5105 bp, Oryza sativa
ttgcaaccgggactattgtggaattcggccgaccgatgaaagatggtttctccaccagtgggacctcaaagaatctcgctgttaagttgagggacctccggtgaacttattcctaaattaaacgaaatgccatctaattaatgggccagtctgaatctacagtgtgtgtcaccgtttgcctggtccttcaggactctcttcctagcccatgcacgcccatctatggcccgcacagggtaaaatttttatatattcttaccgatttaaaagtaagtgctaaaaataaagtacaatgaaaaagaaaaccaaaattaagtctgcaactaagttttaaaatttaaattttggctacagaaatgtccattattgaaccttcttcttgtatcttcatcaaactatgttcatcaggaaacaagagttaacctgttgttcataatctcctgtgagcagagacatgttttttttattactctgaataatcatttaggtttttcctaggactgaataattatttaagtagagacactactacaaatatttgcagtgtggtgtcactactacaacagtagtactccatccgttccaaaataaatcaacctgctatccaaattcattatattcatattctattttagattggtttgtttttaagattgagggagttggtaggaacacagcatcaacggcagaagaaatgttgacagagacatgcacatcgcataaacgatttatagtttactagtcttagctaatcttgatttgtcttaggagatattgatatcaaattatgcgtttgatctctgactactctgtcttgctttttcctctggcagcactatgagctggacacattggctaccgagaaagcaacagcaacagacggctacatgctaacaccgaaatatttgtcagcattctgaaagtactgtccttttggtttaattaggagataaggtcaaggtgatggacattttatggggaagattaggtgctaacttgttgcaatttgcaacgatttttcaatggccttttagcaaaggagaactgttgtttctgagaataaccgtgttctcacaaaggcaaaacttgatttctcgctcgtttcacttttcattctgactgaataaaaaaatgagagtattattccagttctaatttgaatgttaggattaagggtaggtgaatccgacgtgatacgggcaacggttgaggcgaccaaccatttaatattttcgggccaggggtgtgatgtaagagatgagatcaatcaaccttgagaaaatagatttgcggtttttgttggaaaagcaaaacaaacttcacaggaaataaacttattcaggtaaaatttctatattctaagtgatctgtatatagctccgcgtgggcaaattctgtaccaaattttgttaggcaagccttttgcgtatttaaaaaaaaatggtatatgtagctcacctgaataagaagagaggaaatttagtgagaaaagaagtcttaaatcctcaatctaattgttccctccgtcccaaaaaaaaaaagacaaaccgtgagttcccgtgccaacgtttgattgttcgtcttaatataaaatttttttataattagtattttcattgttgttagatgataaaacatgattaatactttatgcgtgacttatctttttaatttttttcataatttttttaaataagacggacggtcaaacattggacacggaaaccagggtttgtcttttttttgggacggaggaagtatctaccaagagtgatagacacgactggttccggcttagctccttaaggtggtgggctagatgacctgggttcgaagcctcacaccttctaattatttgatattagatccttccatattattcgtgccttttattattttaaataatactagagaaaatatcatgcgttgcaacgggcgaagttgattttaatcttattattgttatatgatttagttaagataaaatttactgtatgagttcactcggatatattagtgcctgataagtacaaatcccatctccatggtttcccggaatcggatcctctgctcagcattgaagaagaaaacaagatgctacagccgctcctagaaaagtgaagctaaacggtgcttttgttggaacagtaaaacggtcacacagtacaaacagtgacatgtactcctgttgttttatatagccatggaacgagagatcctttgtgattgggaaaatacatactggcagtatactgcatacttcatatgtgtacttaacaactgtcgttatattcacaaatgaacatctgagattcacctatgttttttactccagatttaacagtgagtagtttgtttactcatagatttatatgtaactaatccttttactcagaagacatggatatatatgagacgtctgagacgtctatttatatattcgatgaatttttaggtttgctgtacatagtttttctctattgagtatgtagtatgggtgaaaacagaacgaacatttcctgaccgtccgctcgacggaaagctcgtgggaaggatacgagagagaaaatgagatatctggtaatattctaattcgagtctaaatccgaatccaaacctgcaaacaaatatgggttaggataagcgaagagttgtatctacccgtatatccaatttgatcaaacatgtatgaaaatttattatgaatatgatgaaagattggttcatatttttttacgagctcaccaaaaaatattacttaattttttcttgactatctttttaagactaattgcctcactagatttaaaatctatgaattagaaatataaaattgataggatacgggataagtgatttattatctgataccatctgtgtcggttacagtttaaatggaaaatatggttatgatataggaattttgtgattcgaccataatttcacccatactcttaagtgcaatactactcctttgtcccataaaaacaaatctaatataggatgtggaacattccctatccagattcatagtactagaatgtgtcgtatctcgtaccagtagtctataaacatctagatagtagaatgtttagaataagtactatcaacctaaacatatctcatgtgacttctattgcatgtgtacggttctaatagattgacgtgcaatctttttgcgtcttcgcaggaaaaaaaatgtgtactgaggagttgttgtgtcattagcatcaaaaaatgtgtactgaggagttgttgtgtcattagcatcatcagctcaagtcagtagtactcccttccgtccaaaaaaggcaaaccctgggttttcgtatccaacgtttgatcatctgtcttatttagaaaaattatgaaaaaaaattaaaaagataagtcacgcataaagtattaatcatgttttatcatctaacaacaataaaaatactaattataaaaaaattcatataagacggacagttaaactttagacacggaaacttagggacatttcacacagatgcagaggatccaatgccccagtcaatttccccacgtgccatctcgctgcatccgccgccgtgcttgcgcttgcgattgcagagttgccattgccatcgcattcagttgcgttgatccgatggcgcagtagcaaaaccgagtctcctctcctccctccctccctcccttccctttgccatcaaacgcaagccgggagaagcaccaccacctagatagaacaataaaaattgctgcatccgtcagagctggccactacaaaaaccagctgcatcacaggagagagcaggcagagaggcagctctccagctcgcgtttggggttgaccagttactccggcgaaccgacggcaagccggcgccggcggcgagggtcgtcgggagcggaagagagggagaaagaatggccaccaccgcctccgtccgacctcccctgctccgacaaggtggatccctgcatctcatcgtgccctcttgtgctattgggtttatagtactttcttggattctttagattgggttgatttgattgatggcccaacatagatatcgtcttggaggagatgggagcaacgggtgtgttgtgttttgctgctgttcttggattggattggattggtttatgtttcttgttactcctgtagagcaacccaagaactcaacccattactttatttattttacacttgtgtttctgtgcacttggatctcaaggaatttattatgttatcagttgttagttgtgatcctgttctgtctgctatccggcccaaacccatcaacagtagtatgacctcctagcataaaattaaattaaattaatcagtagcattctctccttagagaaaaacaaagtgggataaagtaaactaaccagtagaataccccagttgggcacttctgattgattttcattccttctaaatgtgcaatagttgattacagatgaacataatagatgatgatgatgttggtacagattatgtaagttcagtattttctctcccttctaaccgtcctgcagaattgggaatcttaaaccaaattgcagtactgtgggggcaaggcaaaacataaatgtttcagttaggagtagacatcatcttggtagtacatgtccaaattaaatattaatcagtgtaccacactcctagcactcagtttctatgcaacaatttcaacactttgagatatcagatatgtggctgaaaaatgcttatctagatcttatggaaattaatagtagtatatctttttttttcgggcctgttcactttgatgccaaaaaaaccttatcaaattttggcattgctaaaattttagtatagttgtcaaaattttggcaggattttttatatagttattaaaatttggcagcaaattaaatgtagccacttttttagcaaccttactaaaagtaaggttgaaaatggcatcaaagtgaacaggccttcaatctaatttctgaattctggagctgcaaatctgcacacacactaacctgatgaacactactacctgtattgcagcagcaggttcagaaaaagcctcactcctttgcaaaccaaagcagagagcttctgtcagaagaag

SEQ ID NO: 25911 - DNA, 1326 bp, Oryza sativa
catcaggacacttctcctttatcttgtccatgtggtattcatacctctgaagtgtgcagctcttggcagctccccacatgttctgagaaaacaatgtgccatgatacttcttcttcatgttcttccacaagtgcctcatgcattctcggtgttccactcctggatagacaccatctacagctccctctatccctttgcttgttacaacaaaatgacaaggcatgagatacaagtgtacatcacagtcatgaacaaaagaatgcaaaacggaaatcacttgttaatatacctgcatcggtgctgatgaccaatcctgtaggagtacctatggcttgcttcaagttctgaataaaccatgtccaactctccttagactcggtttcaatcaccccataggccactggaaatagccaattgtggccatcgactgcaacagcagctgccaactgacctctttaccttcctattaagtgagttgaatccattgcaatgtaaggatgacatccttgcaggaaaccatcaatgcatggtttaagagctacaaagaatctcctgaaacaaacatccccattatgctcttcagtgtccaactcaacaatactaccagggattgccttcagaagtgcctctttgtaagtaggcaatatatcatagctctcatcccacttcccatatatcatgtccataaccttctccttggccctaaaaaccctgaaatatgggacatccatcttatacttcttattgaccttctcttgcaactcctttggtcccaatgtgggtttctcctttaaccagtccaccaccctatcagctatccatcccttagaagccattgtatcaccacacttattgactgaaaaacaaatgtggtctggcccattaagcttaacctgcatcaaacaatcaatgggcttgttaaaattcacatgaaggcacacatgttaaaattcatgattgaaagcatggaaaaaaatcagctcactacataccttgcatccatcatatttggacttgctggtggatgcaaaaaacattcacttgcaaccctcctttgctcgcctacactttgccttaaacctatccttgttttttttaacagtttggaaagcataatcattcaagattgcatggtgggttactgctgatttgcattcatcaacatcacgaaacagcacatctacatcaatgcatggatcatcaacatcatatgaaaaatcatgaatatcatcacaatcatcatcatcatcaacaatttcatcatcatgttcgtagctgtatcggagtcagagcattcagaatcatagcaatcagaatcagatgatg

SEQ ID NO: 25912 - DNA, 3026 bp, Oryza sativa
  unsure (1)..(3026): unsure at all n locations
tattggctacttcatgagctatgttcagcgataaccactcatgcaattgctcatcactactaatctcaacccatgcatcatcacaaacacgccagaaagtaatgtattgtttagaaccccacacaattttagagccgatgaaatcaactaactgcagcaatttgaagctagctatgtccacatctgttgtaaaatgcctacttgtgaaataggtctttggccccccatctggcaaactgaaatgtgaccttactctaacatcaagaatcaaattacatggaacaggcctacaaataggagcaacacaagataaagaacaactttcagtaaaatttttaggtgcttgtaggaatggagacaacatacaacatataaaccctaggttagattagcaatggagacaccaagttcaattagagtaagacacaacatctaaaccctaaattagcactggacacaacatctataccctaaatttgcatggtattgcatatgttcctataacctagcagggtcacaaccacaagcatgcacggggtcacaggatcacaaccacagggtcactggaagagaatagagagaaaatacctttgtatggtaggaatcccttgcatggttgagggagcgtcgatgtcggctacctccgagctggtaggaatcccttccatggttgagggagcgtcgatgtcgcctacctccgagtgctggccctcccaccgtcaccgcgtgtagcacccgccgccgccccgcgtcccacagctcgctgtcgccgcccccacagcaaagccgtcgccgccccacagcaaagccgtcgccgcgccccacagcttgccgtagatcggcgccggcccgctccacatcaaactgccgccgccgccgcccccacagcgcgccgtcaccgtcccctcagatcggcgccgcnccgcgccccatcaaaccgcagccgccgccgcctcctcagttngccgccgcctcaccgcacagatcggcgccgccgcccccctcagatcggcgccgacccggaccggacgcgccgccgccctccaccacaacgagcgggcgccgccgccgccgcccctttcagccgccgtcgccgcatgcgtactcgctgccgccaccgcacacacgagtgagagagaggtgagaccgtgaggaatgcacgagtgagagagagaaagagagagtagaatagggtttgggatttggagggtattttcgccattaggaactctggaaagattttcttttttttttaaattgaaccctaacggagtcagtgaaagagggttagacggaagttttgtactcaaaaaggagggtcaaataagcaaagttcaaaatgtagggccaaatcggcaattacaatttaaaatggggtcaaataaacaattgcccaaaaaaaacgccatactacaacaaacatgtgttcacatattcaaaacaatggaatcatctccactgttgttttcaactggttttactgtttccaattgtgagttggacagttcgttctggatctgcatagtcagaaaatctcgttagtgaaacggcaacgcgcaatcaataactatcctgcttaggtatgagcttccaagtcccgaatccttttgtctcaagtctgccttggtaatgtgaccaagatccaaattcgaattggttcctggtcctgtttggacatagaatcgagtccttgtgaatgggcaattggatttggatagaagggtacattcttttattttagatagaagaaaagtttcttctatctaaaataaaagaattttgctgcttcattagttacatatcctgttcctgaaagaactccagaaggtgaagatccagcaggaggtggtagccattcttattgagaaagataaagaannnnnnnnnnnnnnnnnnnnnnnnnnnnnnnnnnnnnnnnnnnnnnnnnnnnnnnnnnnnnnnnnttcgattccacctcagaacgaaagaaaatgcaagtgaaagagaattataggacaagagctgatggatgatagaacaaaagagccattcaagttgtttggatgcacatacttttttcaatcctctctgattgactttatcagaagattcctatggtctggtttaccttaattacaattcccagtcaattcagttgatacaaatcaggatctagcgcgggccagtttggaatttctaccaccatttccacccgttgaacgttaaaaaaaaaagaggtaactacagcctacaagtatattgcaaaatccttctacttttgcacttgacgaaaatttgatcaactccttgtgaaaattatactttatttcaagtaggtatggtaatggccagatcgggcatggatggagagcaggaacacacctgaaaacactagtgaatagaaaccaatacctatacccatattcaattcataccgggcgggcatgggtaacctagtaggttgagcaacatatgaataataatcaacggtcttcaacatagcaaaggaaattttacaacagtgggagaggtggagactatgatcggggaattgagtgtctttctctctatagggtttcagctgactataaatatccacctaacatatatatcaggagtattttacaaaacccagggccaggtaggacataggttacccatgaacgaaatacaaaacctggctaagcccgctagggtctcggcctcttgggtcggacatacccatgaacaaaagatttaacccacagtaccgggcatggcgcccacccacagggccacagggccacagggccgggccagaaagcggaatcgtcccaccaacaagagactacgtaagcggtgcaccgaaggcgtatttccgggcgacgtcgaaggcggaaagacgtcagcgcgggcggcgtgaaaaggggtagaccaagtgggcgcaggccgcaagtcgactgaccccgccgggcccaacctaaccaaactcgagacggggacgccacgccttccttccacgcggtcgcgacccatggaggaggagatcgcccgcgacgacctctttc

SEQ ID NO: 25913 - DNA, 58754 bp, Oryza sativa
  unsure (1)..(58754): unsure at all n locations
ggggttgcgctgtgtgcaaggacgggatcgcgcagggggagctcgccacgcagctgccgtgcgcgcacttgtaccacggggcgtgcatcgaaccgtggctcgccatccggaactcgtgtccggtgtgccgttacgagctgcccaccgatgaccccgagtacgagaagcggcgggtgaagcggcgttcttctggtgactccgtggcgcaattgggtactcctatgcaaatttgagctaggattgcttggtgatatgtgttggttgcaattccgtggaattgagaaacttcactctctaactgctcattgggatgcttcgagagtgtcatacctctttgatctcaaaactttttagtgcgtagctgtcatgattggtaattgaacggtaagaacaattgctagaatttagaactgctgtaaatacgttgtgctgctccaataatacagaaaattgtttcaatgtttccccagaattgttagccttttttttaacttactgcatgagtaacagccatcataatttgataaaccaaactggaaagtagtcttccttctgtaccagaatactcaaccaagtgttgcttatttgcgttaattaaaaaaaacaattcggaagtgattttaggttcttaagtttcctcttcattaggcttaggctgctatagtgctatttatgataaataccatttataagaagttaccctctctgtccattttaagctaagaatctggataactatctgtccagattcgtagccaaaagttgctatattttgggacaaaagtagtatctacttgttattgtgaataccgtggttttgagattatcacacaacagtgtagcattttaggttcctcaaagcatgccattgctagtaagcagtagctaatagatgactgtgttgcatggtcctccaaaaatggtaaacttcatagttttgttttatcttatatatggtcagtactaactactcacaaataagccatacggtccataaacacatgggaagcaaagtacagctcatatccatttgcagggaacatgctggcaaaacaggtgtttattagctagcatgcaggatgaagaatactataattggcttattggaaacgtggaaaaatggtataaatgccatagtttcggttgtctcgctattaatgttcattgagttaaagattattccatattgtatttgcttatatattagtgtccccttcagtagactgcatagtatgtcttacaaacattcataaccatttatttgccgatacttctgcgtattcacgcagggcaggtctaggaaaacaagacactggagtcactatttactaatgtcacttatggtgcgtttggtttgagggcgaggttggataggacgggatgatacatggttctgttgctggggtgatctgcgttgagtgtttagttgggtggatgggaaaacacagaaaaatgttactcactccatgcttgttttatttgcattgtttcaatgtttggcacagaattgttagccttttcttgttttcgcttactgcatgagtaaaagccatcgtaatttaagaaactacactgaattattgtcttcttctgtactagaatactcaacccagtggtgcttatttgtgttaattaaaaaacaattaggaagtgattatagatgctaaagttttctgtaggttgctatttatgaccaacaccatttataagcagttatttacttgtgactataaatactgtggttttgagattatcacacaacagtatagctttttatttttcttcatacattcagtgttcattagcatgtgtttcttcatacattcaaaaatgttaataatttggaaccatgccattataattttgcaaagtttgagatatgcagtcggtatctcaatgacatgtaggacccacaggagtcaatgacatgtgggtcaggatgacatatctcaaattttgcaaaattataatggcatgtttccaattttccccaataaatatgtgttcattagtatgcgggatgaagttcactgtagcttgcttattgaaaacttggaacattagcatagatgccatagtttccatttctagtcacagttaatgttcattaagcaaaatattctcccatcttttatttgctaatatgttaccccttcggcagactgcatagtattgcttagaaactttcataaccgtttatgtgccataattcgacatattcacatacaacagatctaggagaacaagccactgtagtcaccatttagtaacaacacttaactcatacatatagttgtggacatggatttgggccgaaggtagttggagtcacagggacccccttggaactgtggaatgtggatctaacctgcatatgttatagcacacttgagctagtgtatcatggtgcggtccgtgggtatataattaaagaaaacagatttgtcaggccatggagaacttatctgcaaaatctggttattgatgattgtttctaaaattctgtacgtgctcacatcctttccttggccttgttttgaaattctgtttgagctagatctgaagctgtatcctattttgctggtgatattgcacaagatgagtgaagtttctggcacaagctcattttgcatcgctgtttcagaaatactccttttttttttgcatacctttgatcagattcgcatatattgaaactttgtcctgctatttttcagtgtatgtcaagatttcaaccatttaccctattttatggtcagggtacagaaatcaccacgattgcactgaaatttcaagtcttattaccatataatttctttcactgtagtagcaatacgtcaggggtgtgagcaacagcagtaggcagtggttcatgtctgacagactggcagtagccagtgatttttttactcaatgatcagcttaaatctcttgtttttaatgtctcacagaatggtttccttccttgagtgctccagtcagcaaggattatatttgggatactcttgtagaaatttgctagcgtgtatcttgcattcttgctgtttagaactaggagaacagatgaatcctgatggctgaacaggagaagatgatacaacacctgtttgacacaggttttactgtgcctgttgacttgactctagatgaggctgctgctacctacctgttctgttgttccagacctctcatttttgccttttacacagacatgaagatgatctctgtggtcagaattgcagagaaagagagcttaacagaaggtggtgatcttattttcctggttgagaagaacaggaatgtggtatgctgctatcatcttcatagtagtatatgatagtagaaaagaaggtggtgattttatttttgagaaagacaaaaaaaagaaaaagaaaagaagaggtggccatgactgataaagaagcatctatatacatttatccttgttgggccttcagttcaattgcagctcatgggctcgtggttgtcttgcaaaagcccaaactccaaaggccctgtgataatttgctggtcgccggtgttggtggtgctcggggactcgccgccggtgacactggatcactcactgatgctgctgctgctgcctttcatttctggcaacccaatacaagtagttagctcaagtctttcacaagtaacaaccctgaatcatcaaccactgttcgaccaatttgctggatatttgaggtatttggaacatgttctgttaaatttctatcattgtttttttttggaatttcaattatgatccgatgattttttttcctagcttcatagagattagtggacgaccaaataacaatcctaattaatctcgattaaggcacagtagctatgcacaataaatcaatcacttcctcctaatttaatcacctaatgctaaacacagatactggttttaatcttaatccattggcgccaaaattgcctccgcgccgcagcctcctcccgcttcctcctccgcctcgccgtcgccgccgccgcccgcggcggcgcggaggggcagcctctcccggagcgcgcgtgcctcctcggcgagccgcgcgttctcccgcgccatctgcgcgtgcctcgccggcgcgcgggtcagctccacggcgagccggtggttggcggcgcggagctcggcgacgtgcgacgacagctcgtncagctgncgncgncggcggacccgcgaccggcgcgccgactcgaggttcgacgccagccgcctcttctttctctcgtcgcgcctcgtnacccttccgctccgccgcccttcatcgnccgcgncgtcgtagctggttcccgcgtcgncgacggttgccgcgacgccggccaagaaccgatcgccatggacaccgaccaatccaggctgcggcgaggaggaggaggaggagaagaagaagctcgccgccaagtccaccgcgccgaacgattggtacgccatggctgcgatgtcttgttgcatgatttgattggatgccacaccgctgctgcaattttttttttttggcaatgtggaggagatgattagcaagaactagctaagctctttatataaaactggagggaaaaagattgagacgagtttaattagctcctttaacagcagaaaaaggaggagccctaaaagctgaagccactggcccggttatgctgtaagcaaacttgccttttgcagctcattgcgtctgcatcctatcgagattatcctgttgattctggggatttgccactgtcctcttggttttagttttgtatatatatgcacatgtcatcatcaccagggagaacttatatatgtcgcctgtttcattttcagaaatgttcttgtcttgtggagaattcttctgtcaggaagtaacaacactttcttgttttgttcaggggaatttcaaatctgtaagcatgggttggaccatgtagaaaccatggaagcaaagtctgaaaatgcatttgcttgtggaagttgatttgaaactttgtcaagatctcacctcatcttgctggatttttacaggtatcagcatagcagactgagcacagagaattgtgtattaggtcatttggctaaaccttttcggttcgtttcaaaaaaaaaaaaaccttttcggttgttgtggcaattggcaaagtaatggcagtgctttttaggcctttttgtgtcaagatatgacagctatatgcatatattgtatagcggcgccacaaaggattataagcacaagggcaaatgccagtagtagcccaactgtttggtccactttgaggttttcaggtactgtttggtcaatccctatataagaggtctttgtttgatttgatgtcttttgttcagattcacaaagaactagttcttcctacaaactcaatgcaattatgcaaatgcagtgagtggtgacatttctgaataccctgacatcaccatgcatcttcagatggatacatgatagatgcaatactgcattagtctgaacattggtttctttcaatattgtgtgccattctctggattatggcaaaaaaattatcttcgatttcagacatgagaaacagttcaatggccatcaggattcaaatcctatcgactgactcaggtgcgcacctccttcttcagtgaatgcataataagatattagcttctgtccaatttgttttatatataaatagaactctggacatgacatgacctcttatgcataataagatattatatctaggtctttaggtctactacataggattaattttgatactatataacaagtttttatttgcttacctaccaatgccattagcagcaataattgttccaatttggtttatgctagtacttctaggagacactcaaggcagttgtagtgtccaaagcagaaagtaatcgagtgatgaagaagtttaggacagtttagacatgtttaaagcggaacataccaatcagatggcaataattgcttatggtgactcttgttgaccatcaacttttggaaacatgcaacatgcatgcatatttcttaggcaaactttgcttaatttgctgccgtatgaaacaaatggctcttgcttttgtgctttctggtagaaatgcttcttagcaccagatgttcatgagatgtgctaaattgctctacgcatcaatcacaatgaaagcaacacttacccaagtaaaacttaatttcttgtgatcctgaattcctggtttagttttctattagttgggcacaagatcataactgcagtattgtatttaagattcaacacaggttcaatttgtcacaccctgtaatttggcatctacaatctgaaaatgaatggctaatcaaaaggctctgaggacacaaatggctaatttcttccatctagttgagaaacctttcaattatacaaatggaaaagatatggatgtgatttgtgggctgaaaaccctttatcatcaacaattgttagtgccttcaactttcaatgcacccatgttttcttgttacgtttgcaagatcaaaacaatgttggaaacgtcatctcgccaggtaaagcaatgaatgacgacaattaagaagatttttgctcctgaagactactaatgatggatattaagggtataataacctatccaggattgtgatgtgcaatccccttgtagcatacctgataagtgtggtgagttaaagcagtccatttacaaaaagaaaaaggaaggccatatctagcaaaaaaaaatagactgcatacgtatagtggtttgtgaaaaagttcaagatgcatacaagccgcagttttcttcagatagtgtggcatcttcttacttcaaggaaaaaaacattatgctagtttggaaataacttcaaatttgtccctgtgatggaaattaaaccattggtaagtagtctagcaatatcaaacttaaggtgtgtattgcatatgaattaggaaaaaccatgtcaaaccaactgaaaccaaggaaaatcaaccatactaacatacttaaataccttgaggtgagaaacatataaagcatacagagaacatgattagtaagaatgacgaagataaaatacactaaggtaattagggaaaacagcaaagttcatttggacatttgatatcatggaaagctatagaaaaatgtgtaccttacagaccgaaatggaaagagtccacgataaaaagtcatttttgcaccattttccattgtaatacttatcgagacaaatttatgcgcgcaccttttttcccccatccatccaaataaatttttattggtaaaacttgttgctttatgacagcaggaagtatcttttacaatctaatgtacccatcagtacaatattctagtagtatatctacaacaaaaataaagaccaagggcatgcttggcacatagaattttgtatggaattagttcaagtcatttgttaagcacataaatttggcaaaactctcatcttccaaattaaccttgcaaaatttaaccaagaaaaactatatactatcatccgttccatgtccttcctagagaaactttttatgcaaccatttttttttctcgacagggattattcgtggttactgtgtgcattaatagcattaataacagctagcatgtgagcctgttattaggggtaggcagaaagatctgaaccgaaaagaccgacaccgagaaattcagtcatcaattcggtcctatatagtgaaagaccgaactttgttcggtcaattcggttagtctcctcggttaaccgaatagaccgaaagaccaaattaaaaaaaaaatctaaatgcaacctacaatccaccaagttcaatataattaaactctaattttcacagccctacttcttctaggcatgcaacgtaataagagtctttagtcatacgtgcttatggatttgttttgtgatttttgtgtaaaaatttccattatttctttgcatatatgaaaatgttgctgaatttcggtcagaccgagaccgagaccgaatttgtcggtcatgatattttttgcgttgaaatttggtcttcacttttcgaagatcgagaccgaaaatttcggtcagaccgaatgcccacccctacttgttctctctatacccatatgtcaatgataattattattattatactccctccgttctaaactatgaggcacttcctttttaatgaaaaatcgaactcgataacttttaattaaaaataatactaatatatactaaatattatgcatgttatatcactatatttatattttaaagtactttcatgtaatgctaatttcatattcgttaaaatatagatattataattcaagatggaggagtacaaccaaacagtagaggatccacttcctctttatttatgccaagttattttagaaccatgctccacacaagacacgcacacatgcattgacatgtgctaattttgtttcgtgtggaaaggcatggaggccggttccccacaatgtccaatcgctgccaactctgcgagagagaagggggaggaatggaagcttgtgcatggcctaaacacacactttgacacttgactttgtgttggaatccattgattagccgctcaatgcagcatccccaatgcagaggtctcccctctactcctagctctttgcaaaacccaatgtccaccatttacttcaatttctcagtcttccttgctcatgtctcccttgcccttctctcaacttgggtcaacttcattaaatttctcctttggtatgtgcaaaggctttgaaggtgtaggcctggtgcaaacattgcaaagtcaaaatgtacggtacgatgcatcgagttactgacatggtaaatcttcccgattcccgtgtaaataaactactatttcattcgtttcatttataagatgttttaattttgttatgggtcaaacttgcttaactttgacatagtttattgaaaaaaataggttagaaaacttaaattcaggaaaaaaaaataggtgagatatcctagtataaccatcttggtttggttaagacatgccttagaatagacgagtcggtcgaaacggtcagaatcggtagcatctctttagaaacgacgctcaatcgacctgtaattgaccgtatttatcatttaaactattcattgtcaacattaatacaatgcaaaaagaaattagatttttttttataaatagtcaaaaatggtacgccagtctatcgggaatttatgtgaccgttttcacccctattcaagtgcatgggcacttgagttgtaaaattgacttgatcgagataccaacgtatatacaatttacacatcgaattgccgggaaattggactttgagatcattttagctccccaaggcgatccacacgtactctaccacaaaactttggttgtttttgctatcatctcaaggccactgcagcatgcgcattgcgcacgtacgagatgctactctttccaaggaaccgatgtctctctctctctccagcctccattgcttataaatatgttcctccttcctatactggtaatggcagcaaagcaaagaaacaaagaagaagaagaaagaagaagcagcagcaaaaaagttgatcagttaattagcaagtgtgttcttctttcttttggtgagagagagagagagagagagagagagagagagagagagagagagagagagagagatctcagaatggtgaatccaggaagaacagctagggcactctgcctcctatgccttgctctcctcctgctaggtcaagatacccattccaggaagctcctgttgcaggagaagcacagccatggcgtcggcaacggcacaaccaccacccaggtcagcagattagttcagtatcgtttcttcagcttattaaccgtggccaaatttgaattctataacttaattttagagttgatgtggatgtgttattaatcatagattatttctcaacattgggttttatgccgctaataacacatatgtaaaacctttacaaacaaattatttttcggtcgctaataagcgttacggcttataattttcctagtgaacagtgcatgcattttgcaaacttcttgttggctctggttgcaacttgcaagcacgcatatgcattgagagaagagttcatacacacactgtattatatatatgtacatttgggctataagatactaaaatgaaacaggagcatcgtgttctgaaatggcgtggcgttcttgtttattttcagcttgtgtaattgctggagggcaatagcatgggaaaacactctaatctgaatctgtgacacctggaacagtagcaccattcttgatggcataatacatgtacttaaccacatgtttatcgttggaatcctggtacaatgctccgagctgcatcgatccatccatgcgtgttacctccatgtgttcgaagatgctatatatttgcatacgacaggcacagcttcatgaatgttacttcgcactgtcttaacaaactccctcagtttcatattataagtcatttgattttttttcctagtcaagtatgaccaagcttatagaaaaaattagaaacatctaaaataacaaactagtttcagaaaatctaacattgaatatattttgataatatgtttgttttgggttgaaaatactaatatatttttcaataaacttggtccaacttaactagaaaaaaaatcaaacgacttataatatgaaacggagggagaactttccaaagaacgacattatcttaattttaagacatcgttattgtttttaaaataataataggatcactagtttctattacaatatatttgtaaaacacaataatatgacaatattatagaggtagtactactttttgagatttccatacatccaatctataaattgatcaaagtttctgcttccactctgtttcgttcgttcttgaaagttttcttctaacagtatgatgatcttgatcaatcaggaaccaagcagagagaatggaggaagtacaggttccaataacaatgggcagctgcagtttgattcagccaaatgggaagaattccacacggattatatctacacccaagatgtcaaaaagccataatggctgttcatttatgatttgaactagtactagtagcttataccttctgcgcgtcttttgttcgtttggagaggggattttcttgggatttagcatatgaactaattaaattaaatcccaggcaaatcccactcagcccattttgtgcagaagttgtcagtgttgcactgtataattatttagtcatacacaactactcctggtaactactcctatcttcgatgaattttctggttttgccagacgtgacaatagtccagtagcatgcagtaccctctcagaatccctgtaatttagcaaaaaaaaaaggaagaaaagaaaagaagcttccctactactttctccgtttcacaatgtaagtcattctagcatttcctacattcatattgatgttaatgaatctggatagatatatactccctccgtcccaaaaaaaaaggcaaactgtgggttcccgtgccaacgtttaactgtccgtcttatataaaatttttttataattagtattttcattgttgttagatgataaaacatgattaatactttatgcgtgacttatctttttaatttttttcataattttttcaaataagacggacggtcaaacgttgggtacggaaaccagggtttgtctttttttgggacggagggagtatgtctagattcattaacaacaactagggaggaagcccgcgcagatgcgcggacaatttagttattatttattaaaagaatgctaaaacatgttatcttaccatattttatttaaaatccatagattatcttatctctaccctaaaattgaccatagactttgatgatacactaaatttaattataagaatgtctctcatattaaaaaaaaaacctagctggttatatataaagtcccctatcacaactacttatttttgttctcttgaaagagttgggtgcctttttaataagatagaattgattattaaaaaaacaaacttaatatatcattaatacaataaaaaaatcatctccatttcataccgaagtgcacatgtctcacttgtgtctaaatgtataaatatttttaaataccacttctatcaattaataagagaaaaccattaaaattagatataaatacccatctaacgtgctaagttggccatcgctgctaaggatttattctataatgcctttaaatatgggtgccgcattgatgtagccatacccttcaagactatcgtcgatcacaaattttaatacctagctcacggtctatacacttataaaaaagtgtattagtaagtaggctagtgagttctcctaccaagagtgaaaggagtcatagaggactcgatggactgatcgtatgtaggtaggtacaaacataataaagttttagttttaaatttgaggattaggagggaaagattaatatttttaatcatacatgcgtaggtatgtttttctaggtttttttcgatgaatagtacatatttttctgtggtatggatacgggagattaatatggagagattactttgatacatctaaactaatgtttaaaaataataggtcacatgacggcttaggagcatttgtatgatgttcaatggtattttagtatataataatattcttgcctcaatgattggtggatagtagtacatacacagaattgatacaagggtttaagtgtaatatagaattgacacgtaaggcaagacatgtatgagtcaagtacactggaccttatatactatatactcagattaacttaaacttatactccgaagactaaagaggaaaagatcaacatatacacctcctattagtcttaattaagacatatcggtctagttcatttaattattttttatagtcgttgaaatgctaaagatataattatatcaaaatatttatctggatatatctagatttacattaatgtgataattcatattttaaaacagaaataacattttttagtgctaatcacaattagagtattctagtttgggatattgtatattcctttaaatattaaatttatgataacgtcaatttttctgaaatatttaactaacattactttgttttgtgaaaataatattattttaacatatcaatattttagaacagtggattttttagagtgctaatcagaactaattattatattttattttttgatattatagagctaatctaattatgcatgattgtgaagtgatatatgatgatatgatctacattatctatgttctacacaatatttttttattgttggatggcatgtgaaaggttcggatatgatttgaaataatggaggaacttttttttaatgttactcatgctttaagtgtttttattttttgtcatatctattatatttaatttatttatgaaagttttataaagtgatacattgttgttttttcttcttttttttgacagcttcaatagcatcctaaggttaggatataataaaaaataaatatttcttatgagttaaagaatgtagtacattttattggtatttatttggttaattaagcaccatgaatacgataatgaagaatgataaaatagacttatgtgcaaggttatgattattcctctatacggaaatgatttaaaaatattttttttaattgtaacaaatttaaaagaaagaaagagatgagaagattgcataggagggggagagatacgtacgtacgtacataccatagggaggagggtgggttggtggggaaaggggaggaaggtggattatggtttttttttctaaaaataaatctcgtaaatgaaaatagtgggtattctaaaaataaatctaatagatgaaaatagtgggcctagcgatttattagagagccacgtagtagcttaggagcgtttgtaggagtcccacgtgggggcttgagagtgtttgtacgaagtttaatggacttttactatataataatagatatgaatgtgagaaatgctagaatgacttacattatgaaacggaggaagtacaatatgcacaatgcatgatggtgaagctgaatttttcttcgcagcttgcagcttctgttgtatcccaatcggaaactctgtaagaaatgcagtaacgcagtgttatgcgcagggtttcagtgtgaatttgggataaaacaccgccagatcgaaagatagtttagttgggatgagaagagattatagattgagaagaacttgaagggaaactaattttgattattcattgcttaatctcaatgcccataacacgcagagagattgatcctattctcgagatcataaattgggccctcaccatctcagcccaccatggaaaagaaaaaaaaaaacaagaagaataatagcataacagagtgtgagttttcagagagagaacttggaagtatacctgggctgggctcgcaccaatttgggcacgaaccgtttcagcccacaaacccattatttcggttacttgcacattatttctgcaggattctttgagaaataaatttattcagcacttggctgagcatttttctcccccatgataataggccacaaccgattgggtagcttagctttgctgtctacaaaaatatcatacatgtggctttattttctctcgaacattcctcctacatgtggctcatagtccaaaccaaaaggaaaaagaaaagaaaaagaaataacggatctgccaaggatggcctcaattcccagtaatatttttgtagcgttttaaaaatatctcggcccctagatatttcaattaagaagaagcatacaaaaccggggtaaaaaaatatcacgaaagtctatcctccctacactaggaatatcgttctctacggatcaggtcttaactcgtgctttgaggccctagctatccatacatacatatatgtcgacttttagcccatgtttttgtttttttttttggtggaacaaaggaccgaaatttcttggtgggatgaggatttaaaccctggtcgatagcttcccaccggaagacatccaccaccattccacaagcacgtttgcaatttccagcattcttcctagctagctttgattccatcgtccatacatatgtatggtcctttcaccttttgtagtcctgttcctagctccattttttgacctggcaacagctcgcacacgtacgtccactcgcccttccactactcgatccatccatacctatatctgcttgcgattggtcgatcgatcgacgacgaaacactgaaaaaagtcgatctgaaccggccatattcagaaatcacagcaacgatgcagaattattgcagatcaacgtacacaagatgctggtgcagtgtgcgtgatagtgtcgacatcatgagccagcatcaccacacctctatccatctcttcgtctggtctcgatctcaaaaacctttacacttcatgcaatattatcactgattattagttacatatatatgtgttcatcgctttttagagaactgagacagatgcagtcaggggcggatccaggaaaaaaaattggagaggctcagttacacagtttcttcaatctccaaccatttagggatctttagtttaccattcattgtgaaaaaaaaaatcaaagggggtgttccagaggtatccataggtcttgtggatgtagggggacttgcacccatgttggatccgcccctggatgcagtgaaggatgatggatgcacgtaaaaaaatatagaaaagatgtgacgatcaaattcgatggatatacatatatacatctatatcttctttctccccagctaaaccaccaagctgaaagaaaaaggtgtgacagacaaggaaaaagatagagctgacgatggcgaagaaacgatcgaacgatcgatcaatctctctcctttcccccccccctgaaaacctacggcgaagtagaaaactttgtcttcgctttaactgcttgctgattctctcgcccatagttctcccatcactggtggagaaactatctttcgtcggtcggccgaattccacaatagacccggatgtaataaaaactggggctaaagatgatctttagtcccggttaaaaagggtaacggacatatttgatctttagtcccggttggtgaagatcatctttagtcccggttcaaatgctgtcagggcctgtcaagcccccccccgggatctttagtcctggttggtataccaaccgggactaaagattccactgggtgcattcccgtacgaacatgctaagtgtttcatatgtaatgcatccaacgcacattgcagattccactgggtgcttttactcttcgacctggaggcctgcaccgtcaacgtacatgactcaatggataaaaaagagtctacgtttgataaggttttcgaacttatagacaggtactgtcataagttcctatgttaattaagaatcttgttatagttaattgctactacgaatcatagctttaaactccatgtagggcttggtatcggttccgtcatttggtccgcggcaaatggagagaaagacttaggcggaagttcaaatttcctgtgagtacacatgctctacatttatatttctccgattcaaatacatacaagtgtatattaattagatctctcgtcgtttgtcatttatttatagtgcgcaaagcaaaagtagggaactaacttgtgaggctactacgtgtgcgagtattgccactaccttgtagaccaaatcatcaccacaagagagctcgatgtacgtacaaataaattcaaaatttcattttgtatcgatttgttgtttaattactaatcaatttcatacattcatatagtttattcgcatgagggataacctgatcacacacaaggaatttatcgtggcggttcaagaacaactcatgggatttatcaacgaacaaatccttgatcccaagggtgaattctactacgacggaaacacaattcataggtccttagcttctgagatagcgactactactacgtcaaaattgtagctagctaggacatataatggattgtaattaatacatgactatgtttctatatgcatctgtacacattttctataatgtaaatatatattttggtcatatatatatatatatacatatgcatttgcataacatatatatgtataaatacatatatattatgcatgtacatatgtattggaacatatataaatataatattttatatatatatatatatatatatatatatatatatatatatatatatgtattgaaacatatatatgcatgtatataaaccatgtagcaatagggccatgaaaaaaaaataggtcagctcgatctttagttccggttatttcacccgatactaaaggggattatgaaccgggactgcaaacgctttctccaccagtgcattttccgttaatttagcactgtagatagcatacgtggtgatctgatctgaatatatatctgaatctgacgcagatcacgctcagcatgcgagtatataggcttgtagtggcatatcatgggttgctgctgccattggcggtagctcatcgaaaagatcaccaactagctataagctggagtagcttgtagcttgcactgtggtatgcctgcttctgcggctgctgctgctggtagctgcatgcagatgtgtttgctagagagaaagcaaaggcgtggcgagaatattcgtgaggataatgcctcttccgagtcgttccaatctctgcaattctgcacacgctcctcttcttttatctgcacgtactgttcttgcagtagttggcatccaagaggcggacttactccatccgtcctaaaaaaaagactaacttttatctacgaatcaagatatagatatagacataacctatgttcagattcgtatattttttaggtgaatggtgtatttacgatgtgcactaaccaatataataagggtgtatttagttcacgtcaaattagaagtttggttgaaattgaaacgatgtgacggaaaagttaaaagtttgtatgcgtaagaaagttttgatgtgacagaaaagttgaaagttaatttgaagaaaaattttggaactaaactcagcctaaactgtcaatgtaggatggagcgcttttgatcatgttatttcatctttggttgtaccgcagtttggattgcagggagaaattttggatggatcacgtgtgtttattccttgaaattattttttgattttgtatatgttttaactaaggataacagggatgaacatggtggcaaaaatttccgaccgaccgagtatgattgctctaaactgttttcaattctaaacatataacaaatttgattagaatattttttgtaagtatcgtattggtatcgtcgctaaactgttatactaataaatatgataaattctcaagtgagtgcgaaaaacgtttctatagacatgatatcatttttgaccattttcattcaacaagatgtatcatagccaaaacattacgatgacaaatcgttgttagtaaataggaagggcttatttggaacacaagaatttagtatgattctcgcgttaaaagagatcgcatagttttcatgtgctatttctatattgcaatggtaaccatttaaaggaaaattttgcgacggtaacctacactacacagctacatctagagtagcatctctaactaggagagatttgatgatgagctaattagagcctaagctttttttctcagtgatcaagaaagtgcattcaagcttttttttttcctctgttatgctatcggcttgtttttcaagctgggtaatgaaagttacctgttgtcaaaaaaaaaaaagtgcattcatgacgatattatgatcgatcgatggcaagtgagaaaggggtccagatccccaccgagtggatttggcctaatctcaaccgtccttttgacttatacggctgagattttctctaatctctgtaaccgtgtttctttcttttcctaattaaattacaagtaccaaagcagcagaccatcgttttccctccagagccacaacagcttcatctttgtcatcgaactttagttcagctatggtgttaatattggcatattgttattcattgcctcaaacagtcaaactgaagattcaagggtatctacctccaaccatggtgaagaacataatgctaatgtttatttagatggttttgtgatggacaacgttgttttattgatattattggccggagaataatcatggttatggtgggaagtactaaaaaactaaatattttcctctaaatctatatgattaagatagttgattagaagaagagtaggggccatgatcccagccatagaagtcagaagaacggttaagattgagccaaatccaccggtggagttagccccaactctaggggatttggacccgtgagaaagagtcatatgctccaggatattcggcaggctaggcaagagaaatttttaaaagagattgaaattctgagccctggtggtggagacaatgatggcagggtacaaactgtgttgttcactagctacctctgtctttgattatctatgatgcagcggattacagtgagaattttggatgcatcatgtttgttttccaaagaatttctatttgatcatacatgcattctaaatatcataagtatacccttcgacaaacttattttaaaacgtaggaattgtcccaagtacttcccacctcttcatattttatttgtagcttagcccataacactagttcacattattaatatattatttagtccatgattggtggtatttatctctaatagcacttttgggtatttcaatatgtatttaaatatatttgctagttgctaccgtatctaagttattcgtatgtttttgcatcctgctaaaaattcatactaaggtatgtggtgtttaaatctcctgaagataaaaatgaagataaatattaagtgttttacgcaaaacaatgtggtaataacgtgtgattaatttagttttaactattacaaacttgaaaaatggattaatataatattttagaataactttcatatagaaagttttcacacgaaatataccgtttagcagtttgaaaaacgtgctacttttattaaaaatttattcaacttttgttggagaaaagaacagggttcctccgatataatccatatcccataacacattcacaccgacaagtcgtcggtcgtaaatactaagggcttattcgggcacaaagaatttcatatgattattgtgttgaagatcacctagtttccctgtgccatttctaaattgcagcggtaaccgtccctacactacatagctagctctacacgcccagagaagcagcatctctgactccgagagagatttgggctaatcagagccagagcttttcctaattctccatggcaacaaaaacccaacaaattaacgagcatatatatgaaaaattaagtgcatccatgcatccatgacggcatagatatgatcgatggcaacaaagttgcgacttggcgacatgaaacagagtaatatgctccaggatattcggcaattgaaattgaaaaaaaagttaaagatggaaattggtgagctcctggtggtggagacaatcatggcagaggggtacaagctgtgtgtgttccctgcctctgcctttggttttctgactaggcccccactcccaaaagctccttttcccaaaaacttctcaagaaatgaaggcgttgcacacggacgatccgccgcttccactagctagcaaatagtactactagtactagggtactttcgtttatgtatctcaccaaaattagaacaatattaaaaagaaataaaaaaaattagagcaacattactcagttcatggatgcttctgcgaatgacaggtagtggaaactaccagtacctgcatacaatgaatggagaccgaaattttgacaaagggacccttttgcaaaacttgtttttaagaatgaaccgtgaattcagcgccaattaaccctaatagcgtggagatatgactctcgctagttgcattagagattttattactcccttcaaccacaaaacatgttattttgaaatgttttactccctccactagtatgtaacttaaaacgtttaacactaatatctcgtcaactatgcagattagatgtagggaaatcaaatgtgtatatttgcctcataaagtaatttagtccggtttcctagtttttcaaatacaaattaatgatcaaaaatttattttaggtaatgtgtcaatgtctaaaacatatttttcgcgggagtggatacttcgatcttttttcccgaatgtaaaagtttctctagtattgttcggtcttgtccacaatatctagtgagagtgaggacgagagcgaagaggaatctaggcggcagtaacctcgacaaccacatcggcaaactaaggatatttgctgaattatgattttcaaagtttatggatggagtaatatttgatacaagtttaagaaattaaatagcaccgacgaattttacttttagatatatagagccgtttcatgcattttgccactcgaaaaaatgtctttaattatttttcatcctagtctatatgccatttgaattagatggttatatgaaatggcagcataatcaaaacgacaatatttattgtgtcaattcatattcctcaaaatttaaatactggtctagactcgaaataagatgatttaggaggacggaagagcacaaagcttccccattaccctctacacgctcgaggcgccgcttccaggctagccgcaacaaaaacacagaacgccctccttttggaaagtagcgtagggccccgaagtgacatgacttggatatcatattagcatcgctattggatttggacccctctactctacacacacctctctctcttttccccttttattttctcttccattttcttttctatgagagcaaaaaagaaggaattcttggatgatgatcactttggaagaaaaagattttgggggtgaaatgaaacctatgggaaggaattgagaactggagggaggaatcgatcagtcaatcagtcagtctgtcactcacccaagtcactttaattgccaatctagttagttatgctaaggaatattacttgccatcaaacaagtaataataatgatgatgataaagcacctttggcaaaagatggaggtatgtcagccattgataatggattagataagcaaaaacgtatggttgatctcaacttaatggcaaaagaggtatatatacaatgcatagttattcgcgcattggccctgttcctgataccagcttgtaggtaaaaggctaacaattaatgccaattaactaagaggctacaataccaattaattaagagatgttttattggcaactctgccactggtaaactattttgtttacttcttccgtttcactataagttaatttagtaccacaggtgacacattctaatactacaaatttagacattatactgtccagattcttagtattaggttgtgttatatccagtactagataaacttattctggacggagatagcactttagaaagaaaaacgaggaaaaccattagctagcatatgattaattaagtattaactattattaaatcagagtaatagattaatttgatttttaaaagaatttctatatatatttttcataaaacatattgtttagcaattttaaaaatatattcactgtaaacgagtgattaacccaacccaaactcactttctagaacgctccctaactgcagtttaaatgcagtaagtagccctgcaagccagtttacagatgtttgtgataaggtgtcattataattcataacatcgatcatgaattcggtacggtcgttgacaaattaaagtgaacaaagcacatcaatttggtaagaatttgccccttttgttcagtttctaattgctcaggaatatatcctaattgttcaataattaatagcagagatatctttttgttgaaaagaacaatgccaatttttttttgaggcaaatggacatacaaacaaatggatcatggatgcacctgatcgtacaaagtggcaacagaacatacgaccttatttctcctttgattaaagttatcttatttaatttttttgggggagagaagtcaatactcaaatgtctcaataataatatatatcagatgtggtcttgtatgcagggcccatagttttggtaaagtttatacatcttgaatgatcgccgctgttgtatgaattccacgcaacgtgtcgcgacacactttaattgcacttatttttaagtacctgagtattttcatttgctaagaaattaaactaactaaagtggtttgatcgatctaaaaaaaaagccgctagaagggatatccaaaccggttttatgatttgagattttatacttcagagcttaaatggactttattgatgtttaaaataaactgtaaaattaactaatgttaatttatgattagtttacttcacaggaacgcattgatgcatacccatatatggcttgtatagcatgtttggcatcaccatgagggggtgggtggtaaggttataggatgcgaagagagattttaactctagcatctccataccaaagcatatgacaattttgttgatgaactttacctctttttctttttttaaaaaaagaaaatacattaggcaatcgtaatatatggaaggtctcccttttttttttacctctcgatgtgatgggaggtaacctaaaagttatcttatccatgtactttcggaaataattggagtgataatcgaggtcatttatcttaggggtgtaaagttttggcgtgtcacatcgggtattaaatagggtgtcacatgaggtgttcggacactaataaaaaactaattatagaatccgtcagtaaaccgcgagacgaacttattaagcctaattaatcgggtattatatagcatgtcacataaggtgttcggcactaataaaaaactaattatagaatccgtcagtaaaccgtgagacgaatttattaagcctaattaatccgtcattagcaaatgtttactgtagcaccatattgtcaaatcatgaagcaattaggcttaaaagatttatctcgtaaattagtcgcaatctgttcaattagttattttttagcctatatttaatacttcatgcaagtgttaaacgtttgattgcaagtgttaaacgttcgatgtgacagggcgaaaaattttaaggtgggatgccttattgaagttgatttgttgggaactgtggatatctacctcagtgaattgatttgttctgagaaatcgctcgataaaccggtcaaatttagaaggaaaacaaactagatttttagcttttggcaatttttgctcttaattcgttttcaagatgatcgacccggcttttcagaaagcctaaaacataacaaagtcttttagagaacacaatttttttaaaaaaaacacacacgagcttacccaaattttaccattaaaattttcagccaaacataaccaaattttgcccattttcacggtaaccacactaaaatcaacaaaagtgaccggtcccccactatgcaagagccccaaacaccactgtgtatgtgtgcatcatctggccatctgcactactcgtcctatctgttgtgctctgcagcttcttccttccttgcgacccccttgtactgtagcagttgaagaagcaaaaaaacacaagttccaaccaatcgtgcatgcggccaagctactactgtaccagtgctagcacagtagtaccggtcagggtgcgcctctgctctgtcgctccacacgaattttgcatccatcacctcaccaaacacacgattactctgccctgccccccacaaaaaggttgtggtgtgagttgtgaccaatctgaattccgcaaatgagtgcttggtgactcattgccatggaggaggttgtccatgaactcatctcactgatcaatcagaacaatgatgaacagaaatcatcggaaaaggaagaaaggaagagatgagatgagtggaaaaggaagaattttttggagttggaaggggaagaaaagccttgatgcatttattggaagcacaaagctttgccttttgtcagttgcaacaacaaaccaaaagacttgaatttacagattccaaagccgaagctggccaagaattcgacccaaatttgacctctcgtctcctctccatgtgtgctagagctagcagccgatgattacaggggtggaaaaaattaattcctagtagcaaatctcacgaacaaaattggtcccacgcgcaacttgcagcacgggcggtttcccctacggctcgccggcggcggccggtggcggcggcggggggaggacgaaggaggagagcggcttggcgctggcgaggaaggacggcgcggtgtcgccggccatgatgacgaccaccttgggctcccggtcgagcggcaccagcaccttgaccgacgccgccgccgacgccgacgaccccgcgtcgccgtggttcttgcggcgcgtgcagaccagcacgagcagcgccaccgcgatgaggcccatcatcaccgcgaaccccaggaaaaggtacggcgtcggcgtcctccacatccccgggtgcccaccaccaccacccgccgccgccgacgacgacgtcgccgccaccccgcctccgcctccgcccaccagcttcactcctcccctcattctcgagctctgcgtgtgtttgcctctctcgctcgctctctgctgcggcggtgaggagggagaggggagaggagggggtatatataggtgggcgaggagggcgcgcgcggttgcggctagccgctgctgggttttgtgggcgcgacgcgacgcgacacgagcgcgggcgcgtcgcgcgcgcgcgcgcgcggcgctgctgggtttgaggcggagtctgcctggcttttgcttggtttgggtgacaggtggccgacacagtggccagtggagagtggagatactactactgttgttgtatccagtgtgaatgtgtgatatggactgtaagtacaaagttgcatgtattgatttaattgatttatatgtggtgtattttggagtgtcattaaatgtgaatctggaagtttcttgtggagacaattgaagggagtgcaaatttaagggggtgattaaatgagtctcttctgcttttaagcatgaagagagaaacattaaaaggtttttggaagatatgaattaaatcctggaacttcttcaattggtctaattatattatgccttatatcataggttctctgttacgtggtaaaagatatctaaagcaatagtctagttacttttccttcgttccaaaaatatatagcaaactaagataagattggaaattttctagtattaagaatttggacatgagaaaatatctaatttaatcctaagatgctatattttacaatggagggagtgccctttttttcgcaaaacggtattatactatgttcgaatatgtagttaccagcctgatactcatagatactaatcctggttagcaggcatatatcagacgtggcactcgtgcggtaataggatgggtacttataagtacatcctataatgtgctattcttggagtactctctcacatggccgcgcctcctttcccatcaacaatagtcggagttgaaggtgacgaccctcgctagattgttgtggtagtaattgttgtacaagaactccacctccccttagctttagcaagaatgagggaaacaacggggccactcctagttgtgcaagttatcggcgaggaggttaattatatttgttctagtggtgcagtgagccagtgaggtgagtgtggagggggattgttggccgacatcaatggtgcatgccagaaaaggatgacgagctcctcaatggtgaatttcttgcggcggaagtcgtagatgagccaaaggtgggatttagaaggtcgcgctgggcatccaaggtgcaggagaagatgttgtcaatgtaactagagatagccttgaagtggacgtgttaggatagcactcctccatcgccgccttgatctcatcaatcagctagaacgataccggtcgaccaagcagcagtggtggcacaccgcacacacctttctcaaccgtgcgcatgggcggaggtgcggcactgtatcatcctgcgcgtccatatgggatgatgtcccataccccttttttttcccaatatttttagagatttttatgtaactgtgcggtggagcacacctagtagttaaatggaaaaccgaaactcgagtgtacatgtgtgcaggggagaagtcacgtctaataatggtctaaagcagttaggacttaccctagattagcttatactccctccatactcataaaggaagtcgtttaggataatgtttaagtcaaaccttgggaatataaatcatgaataactttcaagttattgagtttgaaaatataaaaattatatgtatagatttattttgaaaaatactttcataaaagtatacatatatcacttttcaataaatatttttatagaaataagaagtcaaagttgtgttttgaagaccgtgtcgttgtcttaaacgattttctttatgagtatggagggagtattttctaatttattatactcagatcctcttaaatccaatgaaaattttggagaataaccctgcccagcggtcgatagttaaatgcgtgcatggattcagtgaacctggccgtagtgggaaaacgtcggaaggacgaacctacccgggttgcttggaatgatccattccagagggtcatatataatagtactcgcgtccttttgtacatttgtactgcaaatggctcgccgtcgtacgttgctatccacaaccactgtgagcagtagacagtagtagtgcactagtgcgcgttacgtaatactactagtagctaaaccgcgtcttttggctctaattggccctctctccccgtgccttttcttcatccattttcgctgtgctccactgaggacagacaggcgatcgaccaactactcctctaacccttttcactggaaatcgacatgcattttgtacaattgtactgctagtgttagctcgctcgcgtatgaaacggtgacagaaaaagattaattaggcatataaccatgacgagataaatatattaactgtgatcgaatcacgtagtagctggcggcgaatgcggccggctgggcggcgacccggcgtgcgtcacacacgggagaaaatttagttggctgcgtgctcgatcgatcggttgctctgcgtcggtcgtctcgcgtttccgagtcgccgcgcgcgggcgccggcgcggcgtttacgcacacgccacgcgagctgtcgtgcgtgtgtgtatcagcaggaggtgggcgcggcaggtggcgtatgtactgcgtctcgaggcaagcaaagagaagcaagcgcgttatgtcgtaggagtacgtacgtatacgtgtgagcgtcgtgtgccgctagcctttggctattcactccgccgtctcacagataagattttttttaaaataataattatttgtatcgaagtttataaaattggaaataaatatattaaccgtagataaagaaatagataattgtattgtgatttgctaaaatgaggatattttgatttttggttttatattgatatgagtaaaaggtaaatttattttaaattgggacagatgaagtgtacttcagaatcagatatggggatcaaattcgatcgctagctgctgcacacatgcgattttccaagtgctcgatcgcgtccgtccaacgatcgcatgggctactagcggctgtttgttgttcgaagtgtctctttgctactactccattctcgttcggatcgagtagcttctggagtgatcgtatatatcatcgtacacaaattgcgtagaagtagcactgtactgcatcctcacgtctgcgcgcagaggtctctgatcaaccgatgcatcgcctcgtgtgcacgaaaacggccgggaaaaaggcaaacttcgctactcagtagcacagtacggcgtacctacgcacagtacactgatctactctgctcttctttgaataacacaagacagaacacgatagagagaaaggaaggagaataaaatcacaagcgaaacgagaggccatccgtcaattttgcgcgacctgcgtgcgtgcgtacgtggaccggccggccggccgcgcgccggcgcgttcgcgacattccttgcacacccgaagacaacgagtcgacgacgacgctgacgaagacgatcgacgacgtacgacgaaggcggcgtcagagacaatggtggagcggttagttttgacatcacgcgggccgggtcgccgcgtgcgtatcatcatcatcgacaacagcaacatccggatcagcagctggctcgcgtcgcggcattggtttaacttttacttttgaggcagattttcctctcttctttctgggataaaggaagattcgagcgcactactacttcgttagtggcggtaattaattaagggtacccattaattaattcagtagtgcgctaatggcgtaattaatgggccagggcgaaaggcggtttgttgggggggggggggggggaatttggtaaagtttagtactgcttgaccaggctttaggtaaaaagctattcttaaaccaggtgctgaagttaaagttagttgtgagtacgttcatccggaagtacaacgaatgttgttgcgagatccgtctctcgggtcagtacgaaaagtgatgtgatttcctggattactatttctctcgtcacactctagaagaaattaactttaactttgccatgatatatagccaccaattgttaaaaggtttgacttgcacatgccaaagtacggtttaactagttgttactagctacgatcggtatgcatgactcatggattaaagcgctaattaacaaattaagtactggattgctacacagttataaaaacgagatcaacacaccagctaaacctaacaaacgttgcatggaatatcataacactcatcaaggggttattatattgtctccaacaagaagagattttctgctccagaaaaaccggtttaatcatatgatctgaactcaaatctgtataggtggtgaacatttcaccaggaggaacagatgcaaatgcaacatgaattgcacatatttccatggccaagactagcttagcaactgctagtaaggagtaaactagctagtacatgggcggatccaacacccacaaaacccatggatacccccctaagccccccttcaattttttcatcatagttgataagataagaagtgctaaaggtcttataatagtattttagcatagtttaatactgagattatgtgtttatatcggtgtactcggtatgttgagtcccctcaactttttttttctggatccgccctgctagtactccctccgtttcaaaatgtttgacaccgttgactttttagtacgtgtttgaccattcgtcttattcaaaaaatttaattaattatttattcttttcatatcatttgattcattgttaaatatactttcatgtcacatatagttttacatatttcacaatattttttgaataagacgaatggtcaaacatgtgctaaaaagtcaacggtgacaaatattttgaaacggagggagtacttaaaataacagacaatcgctagtgcccagatctttgacaaacagaaaagcagcgtcgctctcagctcgatccggcccctctccctgcgatgcggtggctcgaccggcactacattaattacacgcgccaataatcaatcacgccacaaattcttgtcatcttggaccgacagccataatcatcatatccactcgatccatcgatacgatcgatggcgaggtcaacattacacagctacccacagtacgacgacggcttcatcaacacctacgtggctgcacgtgccatgcattttcagccgattcatcggcgccgccttgcgattccggcgtgataaacgcccgctccgctccggttggagcactcgatcgatcggtggatggtggtgatgcgacgatggcgaaggtttcagattggagatcgcgatgtggcagaagcataccagcgctctctgtcagctgtctctgttaatttgtgtttctgcccatcattttcgggtggagaaaatggcttctgctgaaaagttgtttcttgtctggcctcttgcttgatgggccgcgtcaaagcccagaaactagttggcccagctactgtataattgaggaattttttatatttatatttattttctaaaagattgaaaaataaaatattgttctaaagtttttaaaaatatacctctcccgacataccgtagggtggggcatataaaataccctatggtagggcgggctctgtacgtgtcacaagatgaaagaggtgccgtaccatgataaaatttgcatattgccctttctcgtcctctcctaggatgatttacttcggtgatgtagtagatgtgctatggcaattttgtaggtgccccgctccccagcgataaatcgcccacccaagaataatttatcgccgagagggggctgcctgccaaattatcacggtgtaccctctcgcgggatgccacatcatatagattaccctttcgtaggacgatttatacgtatcgtgctacaataggacaggaggagtatatttctgtaaaaatttgaaatgagaattcatttttaaatcttttgaaaaagaaataaaaaaataaaattctataattgagctctccttggagccacaaatcagagggatggtaaaaaacagaaagcccacgagctaaggagatgcttagattctcttaaaccatcacaaaagttttggagaaaacccttaacttgttaaattagttgagccctagtcttaagtgctccttgctaccagttaagggcttgtttggcacagctccagctccagctccaactccactcctcctagagctagagctcagccaaccagttttaactccatcaaaaccgggagtggagctgggtggagctctcttacaaaataaactagagttgtggagctgggtttgggtagctctacaactttactccagacccaacttctgaagctaaatttagcagttggagccgtaccaaacatgccctaagtaatggtgagtttaagcctcgttctaaacaacttttatgctgaattgatttgtaaaagaaaaagaaaaaaatattagtatataattaattttctaagtattaattattacaagattataatttacatttataattattattaaaagaaaccttcatatgattttttatgtgaagtgccctgtctagcagtctaggcagtctagctgtacatttagctgttgtgaacgtggccgagagttaaatgcatggacttaggcctgctttagttacaactttttcttcaaacttttaactttttcatcacattaaaattttctacacacacgaactttcaatttttctgtcacatcattccaatttcaattaaacttctaattttaacatgaactaaacacacccttagtgaacttagacgcgtgaaaacgtcggcaaagaacgtactggttgcttgggatgatcccgaggcgcctacaaatcagactcaaatcaggcgctgttttaccaaatagatcgaacatgtttcacataatagatcgaaaatgtttcactcttttagaaaactaaaacacaaccaaatcacctcatgaaacattttgctacaatgtatgaaacaactgtcagggttatagataaggtatacctcctatcctgcgacttatgaaatataccgataaggtttatcttcacgtatacggattgttcctatgaatgtcatgaggaaaccgactcatgttatggaaagtatctctacgagtcaagtgatttccaaagttctactcggaatagatagagtttctgttataccgtatcagatccgatatcctcaaacctttcttggggatcaagatgatacacggtatgaaagggaccccctggcaggggttcaagacatccaattcaatcgccaacacacccaacaaagtttatgaagccggagtacgcggagtcaactcgccgggagatctcgtcgaatccctcgactacgatctcgtcggtaccatttgtttcgactactctctttgtaatctgttctcatcatcatcaatctcatataaactggattagggcaattacctgacaaggggcttgaaccaatataatccttgtcttttgtctgcttgatgccgtactacgtagaccctcgttccgacataccctaatactctactcatcaggtccgtaagtatcactcgtcgacaacaacggtttctaaaaaatcagatgttgtttcaccctatataaaaacaatgtttcagtaaatagcgaaagaatgtttcaattcttaaaaaatgtgaaacacagtcagatcgctagatgaaacaatttggttcaacgtatgcaacaaacgatttgaagccatttgcaacacttaaaccccgtgtacatcaacaaaccacgtgtccatcagatggaaaatattaaacaatacaaaaaatccactgcaacatttcattcatatatagtaaaacatcacaagtacacttgctgaaacattgttggtggaacaaattaaaaataaaacggattcccttaataggacgtttccgtttatatccgggcggttgttgcaatggggacgctgttaattgacgtatgaagtaattagaaaaatgtgttagaaaaatgtaattccttaataaatacatacgtaccccacttttgtgtctcccgaacggcactgacaaagtatggattatcggcatttctacctggaatgccggcggtaaagaagaaccttgcccatgactcaccaatggcctgcctagcttgcttccccttctttgtgaagaatcctatgtcaatgcgtgtctgcacagggaacttggcagatgctagattgtaatctcttacagcaggtgactccctatgagatgtagcccttcgtagcatactggtaattgggttacttctacctttccgtgcctcgagctgagcggatccactcccaccaccatgctcataagtgccaccacgctcctccacgtggctcctgaagttttcctcttgtcatgaggctgccatggctgcttccatttgttcctcctcgtcggcatcacctgttaggtcataatagttgacccctgccgcttcaacccttctattgctatcattctgacgcttgtcacctgtttgttttatcctctccaattcacgcttgaagaaatcacggacatccggaggcactgaattgcaatatgtaacccccttccctttgtgtcccaagtgcatttttagtcgtgtggccccaccacctttcttcctctgatggcaatacttacaacgccatccaggtgcaaaatcctccccgtgctcccacacaaggtccctactttctgccatctccaccctgtatgaaatgcatgaaaaattatcactaggaattataaacatacctctcataacgcaataatatgtatacagctaagcttgcacccaaattcgggcatgtatacaacaaaacaatcaaatgtactcacatgcatggttttaggcaagtacgggcaaccaaattcgctaataaactcatattcccaacgtacttcacataatccccaaatataattcatattcacaatgttttcacctaatatgttcatatgacagtataaaaaaacatataccacggtttcacgcacggtaaccacggtatcaaccacggttaccgcggtttaaacaacgattaccgtgctcaacaatagcagcgaacgtaaataacaggctacgggttctcttccaaaccgcacggttaccggacaaatctcgcggtaaccgccccctttcatgcgcatacctgttggtgggcgagccagtcggtaacccgcttctaccacgcggttaccgctgcataccgcgcggaaatcagccacgccggcacggaggcggcggatctggcgcggcagtcctcgtcgccccttcgaagcaatgcgcagctgtgagagagagaggaaagaaatagaagaacgcgacagaaaccaggaagagatgcggtagatattttccccccactgttgggccttattgggcctcctgaacagtgcatatttggcccattacattaattattttttctattttctaatcgacattagtttttgcgctcaaatttgaatttctattactatttttcaagaaatttttacaccataacaacatacaaatcaagctatacatccatgattttttttggttatttttgaaaattttgaatttgagcaaaatttgctcaaaccctaccgtcggtaagggttaccgaccccccgcggtacggccggtaaccgcggtaaccggcggtagggtgaaccctgcaaatgacatataatatgaaacggatagggaagaacttaaaaagcaaaattaacggacaatcgatcgctagtagtgccaggtcttttgacacaacaggagcacctagcgtggctctcagctctatcgatccggcccctccctgcgtctgcgatgcggtggctcgaccaataaattaattaatttaatcacgccacaaattcctgtcaccttcgaccgacagccccatcatcattatctccatgatgaggcggtaaaaaggatgtaaaaatggcaacggtttcagattggagatctctgtctgtctatctgttaatatgtgtttttacacatcattttcgcgtggagaaaatggcttctgctgtgaaaagttgtttgttgtctagcctcttgatgggctgcatcaaagcccaggaatcagttggcccagctactgtcgttgggcccacgatccagggagatggtggcggcccggcctactgagttggttcttggtgggccggcccagcacgtgagacgttttctgacaagtaggcccggcgcgcaaaccctagatccgtggccgcagacttacacgacgacgcgccttatctcccccggtcgccgtgcccgcccgtcgccgtcgccgtcgccgtcgccgtcgacgccgcagcagccgggagggaggcctcgtcgtagctcctctcctctcccgcctcagggtcggggagcccccgcccccccgccgcgggttccgttgacgtggagccctagcgcgcgccaccgccgggcgtcgccctcccgtagcgacaccgccgccggcgtcgccgccggtggaccgctgatccatcgtaggtaacccccgaagtgcgtctgctacggttcgtgaatttatcgattcgattcgtccggcaaaacttgattgttcgacacagcactataaagagaggcggttatattacttcttagctttgtaaaatttcgaaagattagtgtattattggcctcctccgatgaataaattttagtgcttccgctccgcggctgcttgcgggtttgggattctggcaggagtggtactactacttgttttactctgaattcagctaatttctgccatcttagttatgcaattggccattatggattcttggtaaatcttgtttacatgatttggaaaagtagcgtgaatgcgtagttattattatgcctgaatactgggctgggcaaggtacacaattcctgtgttgtcgaatttgaaattagaagggcagctagccttaaaaccttctttaaagccctgaattcctgggtccaggtcacccaccaattcgatcataattggacacgtgggaccagctaaaccaatgtttaagttctaccgttcatcattacttgaccaggcagagtttgtgcttcacaaccacactgttttacacccctgtagtttcacatggttgcccttgtttgaatttacaaaagagaaactacaaggtctgcaggtctgattatgaaatccttgaggtaaattgttctgttggaaaatccatataatcttcaggattctcgaatcttgcttattaatcgctaagcaaatagttgctttcctactaaggctaactcatgtgactcatttccctgaaagtcacaactttttacataagcctaattgttggattgatcgcttgtattttaggacataagcgctcatggggaagggagaaattgtggctgttcttcaagtaggtggagaattcagcacagatgctgatggactaatgtcttactctggtggagaagcacacgcaatgcttgtcaaaagtgactggacgttcagtgcattcaagcatgaaatatcttcaacgctgaataatatcagagtcgatcagtttgtgttcaagtatttccttccaaaaaataagaaaaccttgatttctatttccaatgacaaggatctacaccgcatggttgagttccatgcagaatctgagactacatacatctatgtcatgaaaaagaaggttgacaacaggtacctatctagttttgtcgtaaatttcttgtcaatttctttgccaaattgacacaagacatctttgcagggcatcgattgttgttgctgactctggtactcctgtagataccactgcagttgtgccaacgactcaggatgggtctaagaggcagaagatctgtgcaacatggaagaatgtgattactggagttggtcaagtgtttgatggtcctaaagatttccgtgatgccttacataagtatgccattgcccataaattccattacagatttatcaagaatgattcatctcgtgtgactgcggaatgtactggtgaagattgcccttggcgaatacatgcttccaaatcccctgccaagaagcaattcatgatcaagaaaatatctgaaagccacacctgtgaatcagagacagtcaaaagtcatcgtctggcttctcagcgatgggttgctagtgttataaaagaaaagttacgcgatagtccaaactacaggccaagagatattgcaagtgatcttcagcgtgagtatggactatgcctaaattactctcaggcttggcgtggaagatcaattgctcaaaaggaacttcatagcacacacgatgaggtaaccagtcagctaccttggttttgtggacggatcatgcagacaaaccctcaaagtgtggccactgtagtacctatggaagattcaaaatttcgtttgtttgttgcattccatgcatcgcttcatggttttgagcatgggtgcagaccattactttttcttgatgtaatatctgcaaaaccaaataagcagtggaagctacttactgccacttctgttgatagtgaaggtgatgtgttcccagttgcatttgctgtagtggatgatgagagcagtgaacactggcattggtttcttgagcaacttaaatcttctgtgtcagcttcccgtgccataacattcatatcgaatggagaaaatggactatgggatgaagtgcctttggttttccctgacagtcaccacggatactgtgtggactatcttattgaagaatttaagacacaattggatgatgcatggaccgaagaagcaagagatgtcatggttgagcatcttaagaaggccatatatgcatgcacagttgacgagttcaatcagtatattgaactaatcaaaggtgaatctgacaagcttgctgaatggcttctggagattaaacccgagcgatggtcagatgcctttttcaaagggtcaaggcatgggcagtattcatgcaattttcctagcactattgttgagtggatccccaccagatacgagctttcaattgtccagttagttgacatgataagatgcaagctcatggagatgatgtacacacgcagggagtcttctaatgcgtgggctgagttattaacacctgcagctaatcagaaattgcaggaagaagtgagcaaagcccacaccctgaacgtcatcccttctgaaagtaatgaaaatggcaatgtgttcaaggtgtgtgatgattctgttaatgttgtcaatattgatgcatgggagtgtacctgccgaaagtggcatatttctgggttgccatgcatgcatgcaattgcagtaatagagcggattggacactgcccttacgattactgtgtgaagtatttcagaacagaatgctaccgcttgacctactccatgtcgataaatccaatacccgatgttatgctgcctcctgctatattaagtgatcaatctcaaagtccagtaacacatgcaaccccaataagaacccgacgacgggttggcaggccaaaggagaagccggcagacccacgcatcgcaattaaaagggcagtgcggtgcagcaggtgccagggttatggccacaataaagcaacctgcaaagttcctctgagcacatagtctacccatgggttcagttctcctatgtacatttaggtggagagttgctcttgtttgctgtaatacgagtgatgctatttctttataactcggtacatgcatcagtcattgattctagctctaaattgctttgtatttgcttgctttgttaggctaacatatttggtcgtaaaatcgcacattgtaatggacgcaatagagagacttgggaggtttgctgttatgtaatgctgtccaatttgatctggtttcccgttctagctattgtgtgccaatctgatcatctcaactctcaggcaaggaaaggaatatatatagactgtagttacttgaaaaacctttgtcagagtatttgaactttgcattattagtttgtttggtttttgcagtagcatacattttatctgttatgtacaaagtaatttcttattcctagagcactggtgaatataattatattttaacacagtcaactgattctctttgaaattccgttgctgtgatatacttgtattgactatataatctacagaacctgggggcacaatgaggatgaggatgatgagctattttgcagcagcgttgagccaggtaatgttggtgctgcttttccatgttcgaaatttctgcttcgcttgctttgttttttgcttcaagatgaatttgttctttttttatgctcaattttttatgctcaagatctatcacctgcatctgaacttaggtgtgtgatcttttggggaagatcttgtcagggaagggtattttgttgtaacgaagccttgtatctgtgaactaatgctgtaaactcaaaatatcatttcatggtgttgttcagcgagtgcttctatgctctcgccgtccagctagagctgtacgtacattgcaaagtaatgttcataagtacatataaagttgtccctcacgataatagtactccctccgctttttttaacgtagtttaaaattgaactaatcaaccttaaatattaaaggatgagggtagtatttctcttctagtaacagaatgctacttatcaattattttttatttttagtcctccgattaacatatgctcaaaattgtttctattctccctcttcccttgtgaagcaccatagcttaagtttctagtctttctggatgattgatcacttgcatactgtgtccaaaaattcaaggacaattagaatttgaaattctttcaagaatacaacgacatccttggatttcccatctcaactaatcataactcatttaattttctcatctactactttatctcaaccaatccagggataatctgatacaaatacgccgggttttaagtctcccgctatagctgcgctatctcccgctatagctgtttgagaaaggttttagctatttgctctcatatacaatttagtcgctatagctccatttggccctctatagtttgagaagctaaccgctaaatgtcttattccgctatttaaaacattgaaatacgtggtacggcgatattgtgatatgtcatattttcaaaaatatatgaggatagacaaatatatataataataagtaaaatttaaaaattatataacatgaagaaataaaaggttaatgttttaaagagagctattcaatttgatcaataggataatcacatattccctctgtctcaaaatatgaagtgtatttagtttttgcccgatctactttggggattccgtcccctgtgcggcgtgaggggatggcgacttggagccacgcactccacagcgtaggcgggatgcgttttctccgccacgcatagactcgcgggacgaaaaggctaacaggtgatcgcggcgatcgacactcaccctcctccacgtgttttcctttttttggcattgcattactttcctattttagtaaatttatgcacctaaagtttttgtacacctcaagtttacacatctaaagtttagagacccaaagtttataagtcaaaagtttatatatccgattcaaaagtttacgcatagactcgcgggacgaaaaggctaacaggtgatcgcggcgatcgacactcaccctcctccacgtgttttcctttttttggcattgcattactttcctattttagtaaatttatgcacctaaagtttttgtacacctcaagtttacacatctaaagtttagagacccaaagtttataagtcaaaagtttatatatccgattcaaatttgaatttgaattcaaatattttttatatatagtatttctatacatctaaagtttatacacctaaagtttatagacccaaagtttataagtcaaaagtttacatacccgattcaaatttgaatttaaattcaaatattagtttatagacccaaagtttatatgcccttttcaaatttgaatttgaattcaaatattagtttatagacccaaagtttacatacccgttttaaatttgaatttgaatttgaattcaaatattttttatatatagtatttctatacataaatttttccaactttgtatttttattttttaaaaaaatttatggtgtagtaggaagagaagaatgggatgaggaagggggagaggagcgtatagggggggatgggggtgatcgctgtgcgatcacccgcccattagccacgcccctcgcgggagggttagaatcgcgtctcccgaagcgagaggcccatcaagagcgtgctctggctgacacttactacctccatcccaaaatgtttgacgccgttgactttttaaaaatatttgaccgttcgtcttattaaaaaaatttaagtaattgttaattctttttctatcatttaatttattgttaaatatacttttatgtatacatatagttttacacatatcacacaaaagtttttgaataaaacgaacggtcaaaaatgtttaaaaaagtcaacggtatcaaatatttagggaaggagggagtactatgttaattttctagttggcgatactaacaggcccgttgacgaggccgtgcgaacggagtgtcagcgcaggccccccaaatcagagagaccagtacaaccagccagccttaggattacaactgacgtcctatgtgtgttcatgtgcatgcatgtgaaaccagctttgatcaacaatgacgctgcccagagcagctagccaactacctcgtctaccatattaggttcctttgaatcaaagtaaaaaccatttgaattttagaggattttatcctatagaaaataatactatagagtcctttgaaacaaagaattgtttcctatcaatttctttgaaattcctatggaatgaaccttattagagcaattttggaggaaaataagtatgagatatcacctcatgttttcctcttcatgtgtctaagattcctgcgtttttcctgtgcgctaatcaatattgtttggagactttcctgtgtttcaaaatcctataggaattcaataagtgtggcattctattcctacgtttttctattactctgttttctcaatcctgcgatttaaagggaccataaagagttagactggacaactggtaattaagtcaaatactgaattgttcatactcaattattgaattgcatgcatgtatccatgcatgatcaattgaatgtttcagtactcttcttttaaatcaaattaccatgaatataatttactaatttaaatgatctattgaatcaaaagtaaaatgtaggatctcaaattatatttcgttccggggtccccgattccgggagacggccctaggtccgaagtaactcgccacgtctactctctatgaggagtgcgggtagcacacttgaggagcttaagcctccagctagaccaggaaccgagtaaagaaccacacttcacgatgcatgtgtcttaaacaatacatgttagtaggtcccacccgtgttagtaggtcccacccatctctcttttcacatccatgtctccccccctctctctcttccctttgccttccccatcgcagcggtggcccaggcggtgatgcgccgggcgagaaacggaccggcggcgcgccgagtcgggaacggatcgacggttgggtggcacatctccagacgatgacgccattgagctcccttttcatctccctctctctatcctctctcctcatgttccaaggggcaagaaggcatgtacgccggcgcctccctccccctacgaccctccgcagcgacgaactctcggcggggtcttcctcgcggaggtcaccacgcgaccttgtcttcctcgcgaaaccgggtggagcaacagcccgagcggcgacattgggctgagtggtcagatgtgtcctaggctcactggatcaaggtgacagcgagctcgggcgtggcctcgacctcgagctcctttccttctccgtgctttcctcatcgagcccgcgagcttctccgacaaggacggtggcggtggcggcggcgcagagctcccaagcagtgtggcgacgaactccccggtgacaccgaggtcggtgatgcggagcagagcgcagggacgaggacgagatcgacgacgcagagcgggagagacgctgtggagggcacgaggggatggtgagtcggaggcacaccctccacagcgcgggcttcaggcgttccctccaccgcgcgtggtctcacgcgagcaaggaatcgcgttgccttgtgtgggagcgagcagctcaagaaggacgcggtccggcgcgacacgtctgcgatattcctagctggtgcaaggaggtaacgctccacgtaggagcatgtgagaggcctgaaaggcgtaggtgattcttcataggttagcgatacgaagtaactcgccacgtccactcgatgaaaaggttcatctttcgctttttcgtgttcagctggagatgtcagagcctcatagtttggcctaaacagccaaagaataagtcaaaatttgaatttttgaacttaattttgaagttgattttgagatgcttttaacgtaagttttgttaatgttagcttttaagtcgctatgaacaaatctataaaagttttacttataaattaatttgtaaaatgggcaaccgatgggagccttagatggaagacagtacttcatctgtaaaaaaaaaaaaccaatctagaaggagatgtgatccttattagcacaataaatatggacaaatatttatctagatttgctatagtacaacgaaatccatctcatgataggttggttttttccggaccagacatacactccatctgaccgttgtctgaccggcaatgaattctgagagggagagaagccggcctgaccaaccgacctccgccgtctcgtcccatccaacaccatctccgaggagccaccactccactccaaccaccacgcccaggcaggcagccttctcgccgcgttcacactcactcacacggctagctcagctacctgcgacatcgtggctgtcgcgcgcttctcccactctccaccgagcatgccactctccgccggctcactgcggcggcggcccaagttcgccgcgccgctgctctcgccggcctgcctccaccggctggttcgtactactccgagtccgatcgaccggagcccggacgtgacgagctgcgtctcggtctcaccagtaacgtgatgtgatcatcgttggtttgcagagcgtcccgggcgagttcgcggcgaggctggacgacgacgacgccgccggggtcggggaggaggaggaggaggagagtggccgacgggcggcggcggtgctcgtggtgggcccgctcggcaaggtctggcgcgtggagctgcgccgctcgccggccggcgacggcgaggcgtggctgggcggcggatggtcggagctcgcggcggcgcacgggctcggcgaggggtggggcgtggtgctgaggctggagcggcgcggggtggcctcgctcagggtgttcgacccgggcttctgcctcgcgcgcttctgcactcctcacgcaggtacaccaaatctcagcaatggcgtatgtgtaactgtttatccatttctatatgtttttctataatgattcatgagccaaagttgagttaaattatttttgcttgaaatatgactaatttggttttactttgtaaagatttgtagcttttttttttaaacattcggattatggttgcatttacaggtatgagaaccaaggacaggcctcgcttcatcaagctgctccaacaggaagacctggaaaagatggtgagcattcaccaagccatcatctttaccttttttttttttttggaatacgcaaggagcgtatctttgtattaagaaggaataaatgtatgtacaaagtgggccgaaaagacaaagcgaaggggacagggtacaggaggagaaccaagaaacaaaagcttaatctccaactaaattttgcgacccttctccactaacatgagctaccaaaacagggattgcagctctagctagccgccacagctccgcttcacccgtcataacccttgcaacttccgcccaagttctgctcttctggttgattacctgcttctcttcttcttatgataatgcactctggccttgtttgatttagattgttaagcggattatcgatcgattggattatggggataagttaaatgctttaagaaataaacttaaacaaataacttaaaacaagtggtaacgtatttttcgaagagtggagcaaataaccccgtttcaatagttcgatgaatgagatgaaaagaacagggccgccttcagctaataagctagtgctagtagtactatgtatttgtggaattgataggctattagctctgaaggtgatgcagttatatgtattatgtgctcacagcatgctctttcttttgctgtcaacattctttcagaaaatccctgagaagtttgtgcagcaacacctgactgaaacctacacaaacaaccaccagaatgccattattgtttgccctcttggcaagttctggcgagtcgaactacaacgggagcaaccggacgtgctactgcgagacggctgggcgccatttctggctgctcatgatctctccgaaggcaacatcctgctgttccggtatgaaggtaacatggtgttcacggttgaggtgttcctacagaacggctgcctgaaggagtacaaaacggcagcgctgtacttaactgatggtaccgaaggaccgagcaatgcgcctcaacaaagtaagccagtagcattccagctccgttgtagtttcaactatggattttccgtgtttcttttcaaaatgtaattatgcaggtgcagcaaaagttggagtttcacctgtcaagcggaaaaggacgcgaagaattgagggtacatgcttagagggaccaaacaggaaatctagggcttccccaatttccgtgaaggttgaaccacataagaaacatgtcagcattgtgtcacagaattcattcacaaaggaaatgacggcctatagtattcatagcctacttgtgagcgcttcagcttctgctgtttttatctagcttaactgcttatgagcttaagaacaaaaaaatgaaattaatcaacatgaaagatcactgacattttgtttcttctatttctgaaaactatctgttcaggtctaaatatggatgatttttttggtttaatacgagcttaaggaaaaaaatatagaaattatcaacatggaaaatcactgacttttgtttcttcaatttctgaaactatctgttaggtctaaatatggatgattttttttgctttaaagaaccaaatctgtaattgtaaaattgtcatacacatagagaaaaaggacactacaacatgatatcaactaaaaatgtagtttatcatgagaattttggttaaataccatcagttaaatgtcgagaatttcctgacaagaagtccttggctgtttattttgaccattttgtagtacttgttattgattctgatatgaaaatgaaaatttcttttgtgtttctcaatatattttttttgttagggaaggcaatacagaaatgccatacatattcttaatctacagtgtgttgacaataacaatccttctgatttttgtgaacgtttattttttcaaaaataatgaaacatctcactactattttatttctttatattgctttaacattgcagtctgtgagaggcaccttttgctctcaaattggtctgctagaagcctgtgcgatcacactgaagatatccatgaagaaaaaaggatcttggcgagtggctttcaaaacagcgaacacctatggctacataaatggaccaggttggagaaaattttgcctggaaaatgaggtaaaagaaggtgatcgcctcaccttcaacgccattgaaacaacggtctggcatgttgttattgtgcattgctagcacaaaaaatgaagaacgcgaaaaaatagtcccactactttgcctagcaatgccaatcccagttgtaggtttgaaaatatgtggtagaacatatcactgaaaaccagctgtatatatcggtagcccagttagataagtctgaacaatggttttgttgaatgttggtacgccagtagacgtatcatgtactgaaatacgtagtactgatctctttacttgtcccgtaccaaccttctgcagttctgcttctgccaacatatcagtgtgtatgatactaaaatctgttcataattcagctagaggttcagagaagataagagagctacgcacatgctacatgcgcttgttgcatagcagagaatcgatgctttgggcagccttttctcctgattgaaagcaaaattatcaggtgtggcttcaaagtgcaacttgttctcatcatcgaacgcaagctcgatctgcgatctatatttgtcatggtggaatgaattttgcggcactttatagatgagaacaatctctgaattctgacatatgcatactgagcaatctgctggtaattgccccaaagaagaactccctcttttctttttcagattccatgggatacagcttggcaaaaaaggaccaatgcaaatcttggctatagccaggttcttgtcacttgtctaatgatagtgtatttatgtaagatttaatgcatattgccccatcaaggagctatctgaattagaatctcatgtttggttcactgaaccaatacatataataccaatacctatgatgtcaaaatcaagaatccataatttattagcttcaggatgcttaaaggatcatttgaaaacataaaagggaaacctttattaggtacaaaggttcaatctcattgtaaaaaatagtttataactagaaagtcctaacaagttaggctagcattcatttatcaaaatttgtttttttttcttccagaaacctggtgtactatggatgtactttttccatagtaactggtacttccaaagtactgaaaaaaaaggccttctttgatagccttttcacacatcatgtgctcacagctgtgcaacaccatgtgaagattgctctcctccgtccaatgctgcccaaagaaatgacataattttgcacgtttttgttcctatcaacaaggggaaaaatgagaaaaagaataaaagactgtttctgagcctatttgacgctatgtcctgaaaaaaatgtcccttgccaagtttgaaatttggtgataatttgaaatccaggaagtgtcatagatacttctacaagcaaccattcagcttctgaaaatccatgaacaagggtgacacaaataggcaattttgtggcacatatggcggtgtctattgatttgatcatgatgtccaaatcatgcaacagtggcaagcacatacacaggctattatttgcagatgaacatgaacaggaaatctcgcggacaatctcagagtttggtacagtagaaaagcgaaagcgcggtatatgccaaaggaatttccgctttctcaaaacgatatctccaccatttcttgagaatattcagattcaccagccctgtcctctcaaacatgcagagattgacaggtcaaagatatagtaattgggtaattgcaactccactgaagaatgtaatgtaaccggtatatgtaaagcgcaattccgaggacgatgatccggtgccattggtacaaagcaacgatcttttctgataattttccaacacacaaggtccagtgacttgtcacaaatcattggctccttcttcttatctacctaaagcaacacttgccatgggaggatttgataccccagccctaaagtattgatgatggcttgagaaggggaattttcggacgttaagggaaagaaaggatgagagttcagagacaaattcaagtgatccctctaagttggatcgaatcttaattttgccggggaaagtgtgtatcacaggttcttgggagcttaagttgctgatgatccttgtcgaatgcgtttttttttactgcaattaataacattccgtatgaaaaacagcttactagtactaacctgaattttgaagttttcggtgaaatatattcatatggaagagatgtgttgcaagtgaaaaaaattgactgaacagatatatgtaaaagttaattaacagattgacaggcaacacatcacactgatttttaaaaatagaattagaatgctgatcagtgatggtttggaggaaatgtcatgaatgaaagcatcaagtgacagttgattaatgatttagtgtgacagcagattgctaggcaggaacatggttacattgctaggctggaacatggttctggcctatgagatcccaccgtacatgaaacggggacaagtaatgcgacaaatatgtttatgataaaagcttttgtcgggaaagattgtcgcgcctttcatgttttgtttttaaatgtttttattttttggttaggtccttaaaatggttggtgatatgtagctgtagaatatgttcattgcactgaaaagaccatacggcaaaaatatatttggtactatctgttggtacaaaatcctggtaatttttatggcaccaaaactccattgtactgacgaaatagtaggcaattgattttttgttttactatgcaatatttgcatccaagagactgtttagataagtatcgtccagcgagccgagcatttgatcatcttttcccaagataagcttgaatcttttgtatccatatgtcaaaccttttcaacttacataaatataacaattttcagtaatatcatgtcttttaaaacaaattaacttcataaatgttgtaagaaaattagttgcagcagaaattcagttagaggcaagaaattaagtactgaaacaacataaatgttttttttttattttttgaaaatgagatgcgatcgaatatcatcacaattcttgcaagggttaatattactcaatcatggatgtataattggaagtaaacatatatcagctactaaatagtgctaagtgttcaatcaaaactgttactccaataataatgtgattcctcaattatttcgcattaactttattaacgttcaccatcacattttactgtcaatctatagcagatctccttctaaatatctgaagaagatgaactaatcaaggcatcaatagtaatgcttggatgcaaaggctgaggtttgcataacttttaatcagtaagtccttaaattgtcatctctttgacaagtatttagccaaagaaaacatccatcgtttttctgtaaatgttggaaactctacctcgacttggtaaagtgctatgagtgaaaatagcagaagggtaaaattgaggagatccactgtggaatttcctttttctctgactttaattaagctgaacataatgttgtaatccgttacagataagctagtcttgatgatgagcttaccgatcgaggcttcaagtatatcattatatattgttaatttgctagttttcaaaggaattaatcgaatcagctagctagtaaaactaccggaattgcattgttaatttagtcgtgaagggtagccaggtaagtgggtaacatagtctataagcatttgtatgaagggcaaggctagttacataaatattttcttggtcaaaattggaaaattggaaagcaaaaaatcagcattcctgatatggctagcgagaggatgccagtctgaatcagcacttaattcacatataaactgcgtgccaaataagttttgtgttaattacctgaccagccacaacatctttgtagagttcactacttagtactgataaataattaatccttactggaacttctgttctcctaatgcaagtaattattaattcactgcatcctctcaaatcccatcaagcaataaacattgcatttcacttcagatttcagagaccaactcgttgcaagaaacatgtacttacatacaacagcagcttgtgcagcattgctcttatttagcagaataataataatacagatttacacgtccttaattacaccgattaagtacatacattgatatacacatacatatatctatatatgcataggactagctaattaacacagttaattatacaagaagagaagtaaactaaacgaaccaagcagatcaccagcatgagcagcagctagctagagagagtgacccaggtatagatccaagaaccaagatatctgaagatgtcatcaaattaggctcaattcaagcctccacgaacctagccgaggcatggaacttggcgatgaactccgccgccttcctgtcgacgtcccgctcgccgacgtaccacagcctgtcctcgtcgctcggccgcaccttcctcgacgaccgtcgcagctcgtacgccgccgccgccgccggctggtcgtcggcgatgtccccgtaacctgaaccagccgccgccgacccgaagcaagacaggtttcctcccattgtgtactcagtacagctgcttgcttaattagctacttaaatacacttgtcaagtagctggtagtgatcacttggaacacacttgtcaggtagaggaagctagctctgcttaattttggagggtaaatggcttggccctctccaatttataggggagggatggcaaccccccaaggagatcacggacggccgggattcgctcgaaccgcggccgcgccgtgatctgacggtggagattgctgcagagaacgtgcgtaccgcgtgttgtgcacgttgcgcgccgcgcgcaggggtggtggtggtggtggtggtgatgctggggttcaggtagattcttcggaagacaacggcgcgtgtgaaactcgatcagcaaagttcctagcttcttcagacttctgggtggaaggaatttcagaggaaattaatttgaaacgatttcattaatccttaggaaaattttcttatatattaactcctttggaacgaaggaatatactccatccattctaaaatgcttgacgccgttgatttttttaaaaatgtttgaccattcatcttattcaaaaaatttaagtaattattaattcttttcctatcatttgatttattgttaaatatacttttatgtatacatatagttttagacatttcacaagaatttttgaataagacgaacggtcaaacatatttaaaaaagtcaatggcgtcaaacatttaaggaatgagggagtatatgattaagaaaaataacttgcttcctacgtatgtcccaattctaaatgaaaacaaacatgaggtcttatctcatgttttgagaagtcgcatgcactctctcttcccctttctctctctagtatctctcgtccattaaattattttcaccaaccttctgtcgtttaatttgtttcgtacaaaccatccaaatgcccaaagtccaaagttcctatacagcatattttttttattgccatattgtaaagtgtgcttagcgatatatattttttcctttcaaaatccctcctccctgatatagtgatatgctaaaaaaatatttttagtaattgtctaaagggagtgcctagatccactaaaaaaactaatttgtttggaagtgtcttatattggttaatttggcattatcgcaatgatatactattcaatgataaaaaattttctaaccattacaggttatcttcatgtcttccttccagttgactccatttttgttctggatgctttcacagaaggagcatgatactgtgtgcagtgtagctacacactcttgaagtcgatagctagatgtctgttgttccactttggatgttgtagtttttatagaatatcgttatagattttatatgttctattttcggtttttcagctagatataattaggagagagatgtgggtttgtctcataacctcaagtatttatttatcttttctgagtcattggccgcatgcaacttgttggcagaggtcggggatataaatcattttccttatctaaaaaaaatcatgaaacaatagatttagtagtaaacttattatgaaaaaatggaattaagattgagtatcgcaaaaatatagatatactggtaaaattattacaaaactacatgtttagcgccaatttaatcacaaaactataatatatataactccaacataatagtagtgctaaagattaaactctaaatgtgtagttatgtgataacttcactattatatctgtaattttgctttatctcaccttaaatctatagttttatgataaatttaatgttcaatttgtaattttgtgatataacaccttaaatctgtagttttgtgaaaaatatctatatgcagttttttaaattcacttaaacttttatatttctattgctacaggtttgatgatagaaaatagaatttgatgaaaagatcttaaaatcaactctaaattatgtatataattattattttttttgctgtggccaacaagtacacaatgagagagttagaatttagaaataggatttttcttaaaattttatatctgtacttatttcattcttcctgctatcatgattgaatgtttaatatatttcctgataaatataaacttatatgaaaagtttccatggtttttctttcgaaatgtaacaatgagagttctattggtcaccaaagctgtctgcactcagctctgaatcctgcaagcctgatctgaatgaacagggcgctagtacagacaatgacagtagtgatgtagtataggcatagcgtgatgcacgcattggatatcttggatatgaaatgtcatgaatatattaaggtaataatggtggcgaaatggtattttggtttcgtttcacatgaagctgtctataagcattttaacttgaggaaataatttccttttctgaattcagatacggagcaactgttcagataagaaaagtttatggcgataagccggcatctcagagtcactaatacgttcggtcatttcaaggccaattttttttatatataattaacattcatcaagatttggtctagctatatatgcaggcgatcactcactacttgcaaaaaaaaaccagctgcttgatttgcaaacatgcaggcgtactgtatatggcctctagctagtaagtctcttaatggngtaanttncagcgtttttcacgttgcatatgtctagttgtgtctacaactaataaaagcaatgtgtacaacttgtttatacagttgtaataaacaaatagaaatatgttcacctttacaacttaaatccactcgttaactacagtttagcttatattaacacaataatatgcaaatcttttgtatatatatataattttataaaagacataaatgtacagtctagtcgtctaaatgtaaagcaatgcataccaatccgaagaaaatttccccgtttttacctatcagcttaaacctctgctcgatgaaacgatgactatagcttaattacattgaagaaacgaaatgttcaagcttttgagagagagagagagagaaatatctttcatatagctctcttcatctttaccatattcggtgcctagctaaccaccctaactagcccaaagtttcacagttcaaatggtaccttcctccttttaacatgcattatttcgccaaggtcaatgcaactaacataaaagattaattagtactaactaatcaggtaggaccagtcaaaaaggtggcattaaattgccatttcaaagtgcaaattggatgcataatatcgatcctagctagctagtagaactttcactgtctttttgagaaagctagagttgcagtgtttggtttgttctggacgccaaactgcatatataatctctctctctctctctcgatcgtgtagtgccatcatatcgtgcatgtaatgcttgcatgctgtaaccacaatgcttatatataataactagcttttaggcagaatcttatgatgataatgatcacttgttcagaggtctagctagagccgttgttaggcgagagcaaatgcctgtggacgacggatcgatgtagtgttagctatatattcctcattggtttgtgtgcacgttgtgcagagaccagaagtgtaaaacacttcttttttttatacggagaaaagccatatattctctaaattacgcggctgataaagttacaccaattgtgatatcgttgcgggctgaaatatatctctatctacaataaagaagaagaattagttgatagagataatgaaactctcatacatggatcttatccattttctcaacaaatgtgaaggataaaaggatataggagatattttcctccatcagcaaaaacaaccaccccatcttacactcagccggcctagcactagtagagaccaatcctggccaaaataattttcctcttgcagatagaacattttcctagattttttatgatatttaccaaaacacttccctcctcttctctgctagccacctgtgtcaccgcctgttgaaatatatctccatcaacagttagaaaaagattagttgatagatagcataattaatgaaaatcacatggatggacatggttatccgttttctctacaaacttatggatgcctacacgctgcaacgggaatttagaaacacttttaacaacacttgaaaaaccacattaactaaattagtataatctctttaattaaagaattaagttaaacatgagtcgaataaggtggaaacaaatggacatgaattgagatatattaaaaatataaatatttggatatatattgattataaacttaaaactgtaagaaaaataaataaagaacaacaaattgtttgatacatcaatcaattaaatgttaagagtaacacgcaagagccaccctataggaacattagtgctaggaaaatatatgaatcgagtcaataatcctaagtaagacgcatgctccaaaatcctggtttagaaaaactgaactaaaatttaaacggtttcataggcaaaaggaatggtaattttacttgacaaactaatggttgtgatcaagtacttcagtgataatttattacctccgtcccaaaataagtccattcatgagttttcgtgtccaactttgatcgtccgtcttaattgaattttttttatgattagttatgcatgacttatgtttttagcttttttttaaaaaaattaaataagacggatgatcaaagttggacacagaaactcatggctgcgcttattttgggacggagggagtatcatttaatattattacagattaatttcaacattggaagagaaatgttgccatgacaaccaaattaataaattaatatcaataatgtgcattcttccttatcaacccagagagctagccaacgtatgcatgcatgtgcattgcaaattgccttgtaattgggaataaagtacacctatatatgttttcaaaagaaaatttttaataaagcagcaccgggacaagagagtgtttaggctatgagcatttttttccaggttcttctaataaacctgaggagtttctcttctacttgcatagttgcatgccctaaaagatgcttgcctttacattaatttctttaattataccctttctttgtccttgacatctttgttaattactctgatcgaggggtttaatgtttaaacccaagacgatgatagggcctaacatattccaggttcccactcaagcgtagctagagtttgaaccttttatttttcttatcacttttgtttatcttctcgatctcttctgctttctgtagtaaaggctatgaacttattgctgtctagtcatttgatccaagctaggtcatgcatttagattcaggtgcgttcttagccactggaactcaaatcagtttccttcaccatcaagctcaaaacatttctcaactcaaattattgaggctctaaatgaggccttaccaaatgtttggtgggctgaatatatttatgctacataaattaaaggaataaattcaccgaaggcccctcaattttccttaatggtgagatgttttgaggttctttaaccacaaaaccaccaaaggccttaccagatgttttgaggggtggacagaaagcttgtcgctcgttacctagctcggctcgtgataggctcgacttggctcatttgaatttcctaacgagccgagctggcatttcagctcgttagagagcttgagctggctcgcgagccttaatgagccagagcaaatgaggctcaggcgcccagcccagcccaacagcccatccccttctcaaaaccctagtgagtgaatccccttctggcttgtccccatccccaatccccacccaagccgccgccaggcgccagccctcaacgctgccgctcctccccggtgccgatgccaccgcccgtgcctctcctccccggcgccgacacggccagccgtggacgccgccgcccgcgccgctcctcccggcgccgacaccgccgccggcgcctctcctccccagcgccgacgcggctggccatggatgccgccgcccgcgccgctcctccccggcgctgacgccgccgtggatgccgtcgcctgtgccgctcctcccggcgctgacgcggccggtcgtggacgccgccgcccgcgccgctcctctcggcgcccctctcggctcctcccggtgcccctcctcggcttctccccttgttcgctttctctcgtccccaaagctcacgagctaaacgagctagctcgagcttgctgacgagccgagccgagcttggtttctagctcgt

SEQ ID NO: 25914 - DNA, 12237 bp, Oryza sativa
  unsure (1)..(12237): unsure at all n locations
ccacatgtcagctgcacattttttttcttcttttttcttctccttctcttctctttcctctattctcttcttcaggcccaccacgctctgctcgcccaccgctactcctgcttctcgacgaactccacctcgtcgccggcgacctccttctacttgaactccctcaccatgttggccacgaagtactccaggtggtgcatggcgaagttgagccccacgcagatcctccgcttgacgccgaacggcatcatgcggatccccttgctgcccgtcacgtccactccctcgctgtcgccatcagggaggaaccgcttcgggatgaactccattggcttcgcccactcctgctcatccctgctgatctcggccaccatgaagttcaccgttgcgcccttggggatgaggtagccgccaacctccatgtcctccattgccttctgcggcagcacgaagtgccccggtgggtgcttccggagaccctccaggaccactgccctcaggtacggcataccgtggacgttctcctcggagacctcgaccttttcgtcaccggtcttcgccgtgatcttgtcgtggatatttgactggatggacgggttcttgaccagcttggccatgatccaccacaacgtggtggacgtcgtgtcggtgtcagcgttgaggaactcggagcagagcttgatgatctcaacgggcgagtgcagcggcagcgggcgagcggcggctctggcactccttttccactcgcccgccgcgtcccctgcccctctgctcttcccgcgcccggagccgccgcttcgcctgcctccggctcgcccgccgacgtcgccactccccttttttggcaaagacaaaaaaagcaaaagagaagaagagaaaaaaaggaaaaaataagatatgtgggcccgatattttttcatctcacttacatgtgtgacggagcgtggggctcctcaccgggagaccgcacaggcccccctttgccggttcggccgggggcgctaagtgaggttcttcgccctcgatctgaggaacgtccgcgagagaggaagcgcacaagacacgggcgacgtagacaggttcgggccgctgagaagcgtaacaccctactcctgtgttctggtggatctgtgtgtgaaggaatacagagtgccggagagccagacagagtttccgctctagcccccccccgtcctccccccttctcccttaggcctgggcctcctttttatctggtcaggggtcaccacatgggcctctagctgcctaagaaaggaaacatgctttttacaatgagggctagtctacagccggaagtgatctttgacaagcagagcgcacgtctcctgccccgctcgtcagcttttccggaggacgcccatttcaaacttcatttaatggccggcgacttccttgccatacttgcgctgaaccctggaatgaatctgaccgggactgacataccaactccaggagttagcacgccggctccggctagggacgagagccaggaagctctcatcattccgacgggacggggcgaggcgtgtgacaggcccgcctgtgccacctaacccgcgatctgaccggtctgtgaccggtcacacaccgcgactggtcacggaccggataaacgtgcgctgcgccgcattaaatgcggcgtgacgcgctcattcaatccgctataaatgcggttaggtgagcgccgctgtgctcacctaacccacacacgtggcgccaataccacggggagtcggggcgccccagccctcggggccgaaacgggagcggcccgacccctcggggagacagagtgtggggtggccacgtcacccttgggcccgacccccccaagggggtcaggccacgtgggtgaccgcggctgcccaagcctctagtcatgatacccccggtcccatgtcaccgacagtagcccccggcgttacgccagggcgatcgcccccctcgagggaagcgctcgggcgtgacgccactccttaggcctggtgacaggtggggccggtctctacaggcgggcagaaacccagcggtcgcaaatcgcgtgcatcggcaagggaaaaccgaccgacaataatgagcggtctcttcaagaccgctacattactcgagcagcgcgcgaatcgggacgagccggttcgtttcgcctggagacatgatgatggcgctcttctcggttggcaaacgtagttaatgcgcgcacgatctgtcccatctcaaccgccacggccgcacatctgccgcgtgcgccgcaaacgggcgagtgggattagtggaggcgtgggcgcgagaaacgagggggcgagatagtgggcgcgggaagcgaggagccgggcatagcgttggcaagggaataaagacgccgaggaagggattcgtttccttcctctcgccactcttccccttgccttcgccacctgtgctctaactcttcgtttcctgtgccctacccttgccgcactcgctcgctctcaagctcctcctccgccggcgtcatggcacggggctccgcaccgctcgatggtagcgtgctgccgccttcccgcatcgtgagcgagaggcaggccgggctgccgcgccgattcatgccggaatctgccaccggccgggaggtggtcgcgctgggcgagggacgcctggcgccagactacccggggcggtccgtcttcttcctctctttcgcaatggccgggctggtcccgccattctctaatttcttcatggatgttctggagttttatgatctccagatggcgcatctcacccccaacgcaataatgacgttggccatcttcgcgcacctgtgcgagatgtttatcggggtgcgcccatctctccggctgttccggtggttcttcaccgtacagccggtgtcgccgccgacggtagtcggtggctgctacttccagccgcgggggcaggtgctgcaccgctacattccctgcgtcctccgcaagaagtgggacgactggaagagcgattggttctacacccccctcgccgacgaagcgcgcctccgacttccgagccagcccccggcgcaggcctccagctggcgggagacggtagatctgggagacggctacgacgccgttcttgaccgcctggcgggtctgcgatcccaggggcttacgggagccatggtgttcggcgactaccttcgtcgccggatcgcgccgctccagcggcgcgcccggggcgcctgggagtacaccgggcccgaggactacatgaggacccaccaggggcgcaaatgggactgggtccctgaggacttcaggatggtggtccaacgggtgctgaatctcagctccgtggaggcatcccttatcccccaaggtgtcctccccctctgcagcgatccagatcgcgccaacatcctgatcatcatgcaggcggtcggggcgtcgggggagcgggccccccgaggccacgatggcgcgggcgggagccgcaggaggaaacaatctaccccgggagggggtcatgcttctgggccccgcgacgggggcccggggggcagccgccctgccgacgcccgggggaagaggaagcaggagggcacgcccccccatctcctccccgagggggcggggcggtgcgtgccagcagcaggcgcccggagggtgccgtgccgacgccgcagcccgagggggagcgaaagaagaaacggctccgcaagatgggggggaccgagccatgccgggggaacctcatctcgcctccgaggtggtcgtttagccgacctccccgcaggttcgtccccgcgcccaccgcgccgtgttcattctcccatctcccaaggcgagttttcactcgcccgtttctttttgtcttctggtttttcttctgcctcagcgagatcccgtcgcgcccccccgccattccaagtccggccggtttgaggccgaggagacggcgaccgcggaggcccggaggcgggaagctgaccggcgagaagccgcagaccgcctccgggaagccgaggaggctgcctaggaggccgtccgggttcgccaggctgaggaggccgctcgggaggaggccagactccgccgggccggggagtccgtccgggaggaggaggcggcgcgcgcacgccaggcggcctgccaagcccccgacccgactccgcccgaggcgacgacgacttccgaggccacccacgacgaggccgcggacgcgccgctctggcccgacccctcgggcgatgcttgggacgagccagcttcgggggacgcccccgggtccggcacgtcgatcggcgggccgagctgcgcggcacccacaccgaggcggctctcccctctgccttccgctgctccactgagcgcggagcccctcctgcaggccttagccgccgcgaacaccacggtgctggacgggttaagtgcccagatggaggtcctgcaggcagagcgggcggagctcgacgcggcgtgggcgcgcgtcgaggaggggcggtgctcggtggaggccatggtggaggcgggccgcaaggcacaccgccggcacgcctccgagctcgaggcccgtcgtagggacctggcggagatcgctagggaggtggaggaggagcgggagactgccctcatcgccaccgccgtgctcgacgaggtgcgggacgacctccgcctccaatacaggagccgggcggcggagctagagaagaagctctacgccgcccggggagtccttgacgccgccgctgcccgagaacggcgggcggcggagatcgaggcggcgtctcggcagcgcgaagaggcccttgaggctcgcgccacggcgctggaggagcgcgcccgcgccctggacacgaaggagaaggacctggcgggccgcgaggccgccgtcgccacccgggaggcaacactggcggcgcacgaggccgcctgcgccgaagaggagtccgcactccgcctccgcgaggacgtgctcaccgagcgggggcgagctctcgaggaggccgaggccgcggcgcagcggctggcggacagcctgttcctccgcgaggcagcgcgggaggagcaggcgcgccacaatctggaaggcgcccacgccgagagggccgcactggatcagcgggccgctgagctcgaggcgcgggcgaaggaactggacgcgagagcgcacagcggcggggcggccgcgggcgacggcgacctagccgcccgcctcgcagccgccgaacacaccatcgccgagctgcagggcgcgctggactcgtccgccggggaggttgaggccctccgcttggcgaacgaggtagggcccggcatgcttcgggacgccgtctcccgtctagactgcgccgggcggcaggcgggcctctggggcgggcggtacgcgaagtacgccgccaaccaggggggcctcgcctagcgcctctcagagatggccgggaccctcaagcggctccccgaggagctcgaggagacgatcaagtcatcctcgagggacctcgcccggggggcggtggagctcgtactggcaagctaccaggccagggaccctgacttctccccgtgggcagcgctggaagagttccctcccggaaccgaggacggcgcgcgcgcgcaggtccgggatgccgccgatcacatcgtccacagcttcgagggtacggcccctcggctcgcgttcgccctcgactccgacgaggagggtggcgacgacggtgcggacaacagcgacgatgaggccggcgacccgggcgcgtcggagtgagcccccaggcccccgccaatcttaataacttttccttcttcttccgaggccttcgggcccccttcttgtatagactgatttaatctgcaatcaagtaaagaggaaatttctgcgtcagttctgtttgttgtttgtatgagacgaggatggtctgtgccgtggtacttctatgtcttggcttgaacaagggctcgtgcccaggtcccatcctcaaacggcgcgggtcggggctagtgcctggggagatccacgtgtcgagactggccaggccgggagcgcggtgaccgagggttatggatgacccgattgtgggcctttgccgattcccccccggagttcaccacgccccggggcacggctcggttctgggccccgtttggcgattttagccgacccgggccaccgagggcagggtcgagcacgagcgtgctaattcaagccaagattcttcaaaaggaaaacgatggcacagacacagtccttaggaaatcgaaaatgcttttattgaaatacggaagagaaaaaagatgagtatatgcatgtggtagcccccggccaaccctgcacgcccggggggggggggtgcggggttggcccgagcccgagacatgacacccgacccccgctaggggtagaagcgacgaaggtgttcgatgttccacgggttaggcagctctgtgccgtcgcccgtggccagccgaacggagcccggccgggggacgccgatcactcgatacggaccctcccacattggtgagagcttgctcagtccagcacgcgtttggacgcggcgtaggacgaggtcgtcgacgcagagtgatcgggcccggacgtggcgctgatggtagcgccgcaggctctgctggtagcgcgcagctcggagggccgcgcgccgccttcgctcctccaaatagtcgaggtcgtctcggcgaagctgatcttgatctgcctcgcaatacatggtgacccgaggggacctcagggtgagctcagatgggaggaccgcctccgcgccgtagatgaggaagaaaggcgtttccccggttgctcggcttggcgtgattcggttcgcccagagcaccgctggcagctcctcgacccacgagtcgccgtgcttcttgaggatgttgaaggtcttggttttgaggcccttgaggatttccgcgttggcgcgctccacttggccatttcttctggggtgggcgggggaggcgaagcagagcttgatgcctatgtcttcgcagtagtcaccgaagagctcactagtgaactgggtgccgttatccgtaatgatacggttaggcaccccgaaccgagcagtgatgcccctgatgaatttaagcgcggagtgcctatcgatcttgatgaccggataagcctcgggccacttagtgaacttatcgacagcgacatacagatactcgaacccgcccggggcccgcctgaacggacccaggatatcgagcccccagacagcaaacggccatgaaagaggtatggtctgcagggcctgggccggctgatgggtttgcctggcgtggaactggcacgccctgcaccgccggaccaggtcgaccgcattgttgagagccgtcggccaatagaaaccctggcgaaaggccttgccaaccaaggtgcgtgaggcggagtgggctccgcactcgccttcatggacatcggcgagaagctcgacgccttgttcccgaggaatgcacttcaggaggactccgttagccgcgcgccgatagagggtcccttccaccagcacgtagcgcttggagatgcgccggacgcgttcactcccttcgcggtcctcgggtagagtcttatctgcgaggtacgcctggatctcagtgatccaagcaatcaatctaggggagctgggagcgctcccctcgggtcccgaggcctggactccgacgggcctcgggggccgttcaggcgcgtccgtctcccctagggggtcgggtcgcgccgatggctgggcaagcctttcttcaaaggcgcccggtggggtctgggctcgcgaggaagcgagccttgagagttcgtcggcgaccgcgttatcccgtctgggcacgtgccgaagctctatcccgtcgaaatggcgctccatacgccgcacatggcgcacgtaagcgtccatctgcgggtcagagcaccggtactccttacagacctggttaacgaccaactgggagtcgcctaacactaggaggcagcggatccccagtcctgctgccactctgagtcccgcaaggagtccctcgtactccgccatattgttggtcgcccgaaagtcgaggcggaccaggtatctgaggacgtctccgctcggcgaggtcaacgtgacccccgcaccggcgccctaaagagacagggagccgtcgaactgtatcacccagtaggcggtgtgaggcagctgcgaggggcccgaggtggcctcgggggcgaagacgggctcgggagctggggtccactccgccacaaagtcggcgagggcctgactcttgatcgcgtggcgtggttcaaagcgcaaatcgaattcagagagttcgattgcccatttcaccacccgtccggtaccctctcggttatgcaagatttggccgagggggtaagacgtaaccaccgtgacccgatgcgcctggaaataatggcgcaacttcctcgaagccatcagaatagcgtaaagcatcttctgggcctgagggtatcgggtcttggtatctcggagggcctcgctaacgaagtagacgggccgctgcacctttcggcggggccgatcctcttcgccaggggccgcatctccagggcgctcttcgtccgagaggccgcgcggggcgcactcggcttctgtgccgacgacctcggggtcagagggcgacaggcgtggccttcccgcagtggccccgaggccatcctgggggtcgggagcacctggcaccgtcggacaagcaggcggagggccagctccggccgtcgggggccttgggccgccgttcggctcgggggcctctcctccctgctctctcccgggtcgagtcgacacagggtggggatgcgcggagtgagggttgtcctcgtcgcgctccacgaccaacgccgcgctgaccacctgcggggttgccgctaggtagagtagcaacggctcatctggctccgggacgaccaggactgggggagaactgaggtacgccttcaactgagcgaaggccctctcagcctcctccgtccaggtaaacggcccggagcgtttgaggagcttaaataggggtagcgccttctctcccagcctcgatatgaaccgacttaaggcggccatgcagccggtgacgcactgcacatcctttaacccgaaaggcattgtcgtataacaataagttcctatgggggtaatgaatgcagttttttcctcatcctccctagccatgcgaatctgatgataaccagagtatgcatctagaaaacacaaaaggtcgcaccccgcggtggagtcgacaatctgatctatgcgtggcagggggtaagggtccttaggacatgccttgttaaggtcggtgtagtcaatgcacatccgaagcttgccgttcgccttgggaacgacgaccggattcgccagccactccggatggatgacctcacggatgaatccggcctccagaagtcgcgccacctcctcgcggatgaaggtttgacgttccggggcctgtcgccgcactttctgccggaccggccttgcgcctggccgcacggcgagacggtgctcaatcacctccccaacttcacattgcaaacggtgggggaaaccacaatcgcgatctgtcctccccgggcaacgcacggcgggtggtcggtctggtcgaaggtgagggtaacctccgaccaccgcgcccgccgcgtagcctcatgggtaggggccgcggccagaagctcgcgcttcatggccttgaggctccggcaagaaacgtgagcgcacgctcccccatcgacggtggcgacggtggcctcaggctcctgaaaccccaggtcatcgtcgccatcgtcgatgtcctcggcggtggccttctgcttggcctcacctcgccggttgccggcgggagccgccggggccttgccctcacggcgctcctgcctcttctcctcctcccacttcctcgtccgctcagccaaacttttgaccgcgcggcagtctgcgaggtcgtggagggaggtgttgtgcacggtacaccacttgccggtcgggcgctccctgctgggagcgccggcctccttctttttgtcgctcgcaggcctcccctttcggggggcccgcgaagcgccctcgacggcgaggacatgaccctcgtcgtcggaacgggtcgaccccttcttcctcctcctgtcccgccgccctgaccgagcggcggacccgggggcggccggagctgccacaccagaaccggaggagttctaggtccaggcctcctccttgcgagccacacggtccgcgagctcaaaaagctgcgcggtggtctggggctccttggaggcgatcttctcgagcatgcggttgtgccgcacgccccccctgaacgcgtagatcaccgcgtgtgcggggatgcacggtatggtgttgcggacttgacagaaccgctggatgtacgagcgaagagactcatcgtcccttcgctgtactgcatgcaagtccgcttcttcacctgggcgtggatatgtgccctggaagttcgtggtgaactgctggcacaaatcctcccaggagtggaccgacgcgggtggcaagttcattagccaaccccgcgcctgacctttcagggccatggggaagaaattcgccatgaccctgtcgtcacccccggcggcctcgatcccggtcgtgtagatctggagaaactcgacggggttgacgcttccgtcgtatttttcggtgacggtgggccggaaccttgggggccaacggacgttccgaaggctcgccacaaaggctcgacagccggcaccaccaaccggggacacggggggccggcccccgtgcccggaccgaagtggcgctccggacgaggaaacgccctccgttgcgtgggtggcgcgacgagcgtcgtgccggcgctcgatatcgaggcgggcatccgacccccacgcacatcttcttgggtcggaggcgttgacgagggaatggcggacgaacggcgggtaacggncgccgttcgccgcgcccttncgcttgacgacgtggagccggcggcggcagcgccagaggcctcggtgcggaggaccgcccgccggcgcctaggcgctgctgcgccgtcatgaccaagtcggccacgtcatccagccaacgccggctggagtctctggatcggggacgatgggcgggtgacgcaggagcgcgcccgcagcctggagcgcgccctggggcatgccgccatcgccgtagacgaggcggcgacgcgccccgtctcgccgtcctcctccgtcgctcgcgggcggcgaagtcgcagatccttcgaccccctcgagcgccttcccccgcccaagatttcggcgagagggggacggtggggtgcgagcccgacggcgcgggttctgctccccgtcgtcaccgctagcgctcggagagaggttgtgcgccactgcccgttcggccattgggctgagcgggagaagcttggcgcacacgaaaggaggacgagggctcagaaagacacgcgccccctacctggcgcgccagatgacggagcgtggggctcctcacagggagaccgcacaggcccccctttgccggttcggccaggggcgctaagtgaggttcttcgccctcgatctgaggaacgtccgcgagagaggaagcgcacaagacacgggcgacgtagacaggttcgggccgctgagaagcgtaacaccctactcctgtgttctggtggatctgtgtgtgaaggaatacagagtgccggagagccagacagagtttccgctttagccccccccccccgtcctccccccttctcccttaggcctaggcctcctttttatctggtctggggtcaccacatgggcctctagctgcctaagaaaggaaacatgctttttacaatgagggctagtctacagccggaagtgatctttgacaagcagagcgcacgtctcctgccccgctcgtcagcttttccggaggacgcccatttcaaacttcatttaatggccggcgacttccttgccatacttgcgctgaagcctggaatgaatctgaccgggactgacataccaactccaggagttagcacgccggctccggctagggacgagagccaggaagctctcatcattccgacgggacggggcgaggcgtgtgacaggccgcctgttgccacctaacccgcgatctgaccggtctgtgaccggtcacacaccgcgactggtcacggaccggataaacgtgcgctgcgccgcattaaatgcggcgtgacgcgctcgttcaatccgctataaatg

SEQ ID NO: 25915 - DNA, 1662 bp, Oryza sativa
tatatatatatatatagatatttctgtgtatgtatatatatatatatatatatatatatatatatatatatatatatatatatatatatatatatatatatatatatatatatatatatatatatgaccaaaatatatatttacattaaagaaaatgtgtacatgcatatagaaaaatagacatgtattaattacaattcattatgatgtcctagctagctacgatttcgacgtagtagtagtcgttatctcagaagctaaggacctatgaattgtatttccgtcgtagtagaattcacccttgggatcaaggatttgttcgttgatgaatcccatgagttgttcttgaaccgccgcgataaattccttgtgtgtgatcaggttatccctcatgcgaataaactatatgaatgtatgaaattaattagtaattaaacaacaaatcgatacgtacgcaatgaaattttcatattatttgtacgtacatcgagctctcttgtggtgatgatttggtctgcaaggtagtggcaatactcgcacacgtagtagccgcacaagttagttccctgcttttgctttgcgcactataaataaatgacaaacggcgagagatctaattaatatacacttttatgtatttgaattggagattgaatataaatgtagagcatgtgtactcacaggaaaattgaacttccgcctaagtctttctctccatttgccgcggaccaaatgacggaaccgataccaagccctacatggagtttaaagctatgattcgtagtagtaattaaatataacaagattcttaattaacataggaacttatgacagtacctgtctataagttcaaaaaccttgtcaaacatcgactcttctttatcgattgagtcatatacgttgacggtgcaggcctccaggtcgaagagtaaaaagacccagtggaatctgcaatgtgcgtgggatgcattatgtcgcgtcccaaaacgactctaaaatacatcctcgaaattatgcctagaataattaaaatccgtgtgaaagcctccaacaattaaaatgtgcaaagttaaaagtcaaataaggcttggaggattttttatatttcctaaaagcctaaaaggcgtaaataaattttagtggaattttcagagcacaaataataattaagaagaaataaacaaagttaaaaaggttttataaaaagaaaaaccctaaaaagttccctttccctccctctctccctcttgggccggtccggccagctccctccccctccctctcctctccccgcggcccattcggcctcctgcccgtggcgtgccgctgacgggcgggcccgcccgcctccctcgctgacaggtggggcccacccgtcatccccttcctcccgtcgctcccgccgccccgcccgcgccctagcgccgccgccgccgccgcgaatcccgccgcccccgtccgccccgcgtgcaatcaagaggggggaaatattccccgtgattccctccctctttccccccatttttccctctctctctccctcggattcgtttggaaacccctcccctaacctcgccggcgccatcaatggcggccggatcttccgcgcccgtttccccctcgtccggccgctctcttcccctcccaaccctatataaacct

SEQ ID NO: 25916 - DNA, 4404 bp, Oryza sativa
acgcgtgggacccacggcgccggcaggtgcgagcccgggtgcgcccggtccaccgtggcccgtggggctgccgcgtgggccccaccccagtggacccggtccgcgcgcccctcccctcggctgacgcaataaatccattttaaattaaaatttaaatgaagaaattcgcaaatattcatttaaagagcatataaacttcaaatggccataacttggccatttgaactcggaattggaccgttcaagtctctaatttttccttaagaagtcaagaacccatttttgtgctttgtttctgcttgttatatggagtttcttagtgtaaaagccttttcttttccgttggtcgtgtagacgctgcagcttcggaagatccgctcttcgtggaagttgaagccggcgtttgggaaagtgagcaaggcaagtcacatcatccttgaacatattgaatcccagtttataaaattatgttgctttaaaattattgcattatcgctttatttaaattcccgcgttatcactgttttatctagccatgcctatttacctttgttatgaccttattattgttatggttattattaccttgttcaccctaggataaacaaaaccccaactagtgggtactctattcatggtcccactagtatgaatttaggtagatgcttcgctgattaattaggcaacattaggtggttttataactctagactttgggatattcatatcacctggacactttggaattgttggagtattgtggaattggattcacaccgccccctctattcaaaatccccaaaaatggttttaggctgggctcggggtgcatggttttgatagtagcacctcggccatataaggaccggtcttcgggcctctgttgcaaagcactaccgtacttccacatgtctagtgggtaaggcttagtttgtagctcagactggttataaacaaaagtacacggatggagatggacgaagtcgggggtcgatggacatctctaggacaaatgaaggctacacgagctgcggcccggtagtcgagatatcatggcacagggccggtgtcctgctgctgggggctcagtcctgcctacctgtcccgggggttccggccgtaggtggggttgggtcggtactcttgtttatggctaggatgggttgggaactatgtcacgtcttccatccgtataccgtggtggtatgtggcacgtggttgcacgtgaggaagatgtgtcttgtgggtaaagatgtacacctctgatcagagtataatctattcgaatagccgcgccctcggttatggcaagccgagcaatgtacccaagttagtgttttaattcttaaaacctgcttaacaactaaaatgtggaatggttggcctgggttggcttgggacgaggtgggacccagggtcgggttgccggttcggtctgaatcatcgtaggccttgggttaaggcaggttcgtgtgggttcacggccttgataaataatattgtatagttctagaatcgtgtttacaaaatagctttgagcaactaagtatctttaaatgctgtttactgcaaccctaaccctttatgttataactcccttgtactcccttgcatttattatgcacttgtgggtgtgtcttgttgagtacggtggttgtactcagtcttgctcaattttttcccaaacccagaagaggagtctctggaagatgaaggttttggtgtctagctcgtgcctgccgtcaagcgcctgtggtcgtcgccctagtcttccgctgtttctcgtttgtctttgtgtgtgccgggccttcgctgcccatgtaataattaactatttacgcttccgcttgttgaactctgaattgtatcaacttttggtgtaccttgcctcctgggacaaggaataatgcacgcacgtaaggaacgcccgttgggttatttccggtcgtgacacattacatatgaaacacttagcatgttcgtactgacaggcacgttatcccgcacaacccaaccgctgtgtcgtacgtagttcttggctgcttccgccggggcactaggttagccgtctttgtccactttcgttatgatgtgccgaccctctagcttcttcgcggcacctcgttgcccacgtgccctcttctgtccagcggagggttgacttccactagcctcctctacctggttccattccacatccctctccacgttcccctcctggttcccctccgcatccctctccacattcccttcctcgttcaagtactggtttggatcctcgttcccctcttcttcgttctagtactggttgcttccatccgcgattgtatcgtacattatctgttcctcatcgcgatcaaccatctgttcatacaagaaatagttgctaagtctataggtcatttttgatttaacaatcttatatgctaacaatcatatatgctaagtcaaatatgctaagtctaactgtcgtctattagaaccctacacaatcttatatgctaagtcttattacaaatctaataatcttatgttaaactttaataattttatattaaaactcaaataatattgtattaaaactctaatagtcaactatgctaagtctaagtgtcgtatattaggaccctagacaataattatatactaagtctaattacaaatctaataatcttatattaaaactcaaataatcttgtattaaaactctaataatcttatattaaaactcaaatattcatatatgctaagtctaactgtcgtatattagaaccctacacaatcttatatgctaagtcttattacaaatctaataatcttatactatgctaagtctaagtgtcgtatattaggaccctaggtaatcatatatgctaagttgtctaagtgtcatacattacaaccctagataatcatatatgctaagtttaagtgtcgtatattaactctagtagtcttaattgcattaaaaatctaacaatcatatatttacatcacttgcatgcgcgaattcctttgagggctagctaccactccggcttgagggatggtgacgacaacgtcttttctgcaacatacaaaaagatgtattaggataaacgcaaagtaacatatattgtatttcatgttcgcgttctcgttaagttcatgtttcgttcacgatcgttcacgttcgcgttctcatgaagttcacgtttcgttcacctacgttcgttcgtttacgtgcgttcacgttaacgtacgttaagttcatgttcgtgttcttgttaagttcacttttcgttcacgcacgttcgttcgtttacgtacattcacgtacaacgttaagttcacgttcgttcacgttcacgttaggttcacgttcacgtacgtttgttcgttcacgttctcattcatgtatgtttccttcgttaacgtacgttcgttcgttcacgttcacgttaacgtacgttcgttcgttcacgttcacgttcacgtacgttcgttcgttcgttcacattcacgtacgtttcgttcgttcacgatcgttcgttcgttcacgtggcagcaacggagcggcggagtggcggcagtggagcggcggcgtggcggcgcggctgcggcatggcgcggcggcggcggcgggcatcggcggtgcgcgacggtggcgtgccgcggcggcgtcgtggtgtctcggcgtcgtggcgcggcgggcgtggcatggcccggctttgtcggcactgccggcgcgacgtcgtcgccggtgacggccgcatcgaggtcggggtcggcatcgtcggcgcggcggagtcgtgttcggccgcgatgacgtcggcggcggcgtcggcaacgaggcggctggcggtggtttggggagagagagagagatcgaggtcagagagagagagagggggaggcggtggcggctctcaccccagagatgcggcggcggcggagacgacggcgagatacgacggcggcgtcggcgcggggatgccctaggtagtggcggcgaaggagaagccaagggagatcgatcggggaaaaaacttctaagtgttggtggagaagatgagggcgcgcatcgggaatatatatagccctatatctttactcccggttgttctcatcaaccgggactaaagatattttcccgctatttccaaattctttttaaacccggttagggttaagaaccgggactactgataaacgcattgaatattgatttccattacatatgtgtttctaaaatagaaaataatgcattaaaattatttaaagtcgaaaaattaatgacaattacttcgaaaaattattgttgtttgtagtaaattaagtggataaaacgtaataagcaaatatatgatttaaaattaataaaagttctaataatcatataacttagcatatgaatgatattaa

SEQ ID NO: 25917 - DNA, 1677 bp, Oryza sativa
ctagacatgtccttcatgtaaaagacttgcgttacatcattggcaaggacaaaaggttcgtccgagtatccacccttgttaaggtcaacggttgtcatcccactgtcatcaatcattacgcctccaccagtcaacctaacccattggcaccggaacagaggggccttggggggaccatagtcaagttcccatatatcctcgatggcgccgtaatacgtgccagttgttccatcgtgtcccatggcatcgatacgaacagcactgttttggttcgtgctcttcatgtcttgggctctcgtgtagaatgtgtacccattgatctcacatccctggaatgtcgcgatcgacccagatggtcccctcgccaggaaggccagttgttggttgatcgtctcgttacccatgagatgttgttgtagccacgcggggaaagtatcaatgtgatgccgtgtaatccatgcatcggacttaccgatgtttctggcgcgaactagagccaagtgctccttgatgtaaggagctaccaatgaagattgttgcaaaaccgtgaaatgggccttacggaataaattgttgtctaccgtcattattgctttcctcccgagagttccctttccccgtagtctcccttcatggcgtgattcaggtaccccgattgggcgaaggtcttcaataaattctacgcaaaattcgatgacctcctctgttccataccccttggcgatgcttgcctctagacgagcacggttacgaacatacttcttcagaacgcccatgtacctctcaaaaggaaacatgttgtgtaggtacacaggcccgagaatactgatctctttgacaaggtgacaaagcagatgcgtcattatattgaaaaatgaaggtggaaatatcaactcaaaactgacaagacattacaccacatcattctgaagggcttctaatatatccggatcgatgaccttctgcgaaattgcgttcatgaatgcacatagctttgttattgtttcccggacattgtctagaaggataccccttattacaactggtagcagttgtgtcattaacacgtgacagtcatgagactttagatttgtgaacttcttctccttcgtgcttattattcgcttgatattcgtggagtatccagatggtacctttatgctctctaagcattcaaacatactttccttctctgccttgctaagagtgtagctggctggactcaagtaatggcttcctttctcctttggttccgggtgaaggtcgccgcgttgttccatatgcttcagatcattatgtgcttccagtgtatctttcgactttccatatacacctaggaagccaagaaggtttacgcaaaggttcttagtgaggtgcatcacatcgattgcgtggcggacgttcaagaattcccaatagggtaactcccaaaatatagagttctttttccacatcgccgcgtgaccatcttcgctctctataggctggcttctaggcccctttccaaacactactttaagatctttaaccatagcaaacactgttttcccgctgcgatgtttaggcttcgtacggtggtccgccttatgttcaaagtgcttgcctttcttccgtacagggtggtttgcagcaaggaatcgacgatgacacatgtacacaaccttcctacagtgctta

SEQ ID NO: 25918 - DNA, 17752 bp, Oryza sativa
  unsure (1)..(17752): unsure at all n locations
agccttctagttcaatatataatccctttccagtctttctatctcaaacatcacaaagataaaaaccgagaaataccaagacgataataacaatcttcaaggctgtgtagtctacacgctgtgctgaaaaatcaggtaggagagcgtcttgtacgtgcgtgcggccgcgcgagtgtgcgtgcgacacgcgcgcgtcgcgcttttggacttcgatgaggaccacgcgacgcgacgggtccgtggcggtggcgaggccgtcgcgctgcggttcccgatttcgggggggacccagcgagctctcgctctctctcgcgcatgggacggggcgctgggcgaacgtgcgcagcggcctcgggctccggcgaccgcatcatttggtaggccggggagcacgagggccgcccccgcaccccggcgtgccatccaaccccgcgagcgcgacacattttctgccttgaatcaccttccaaagcactactactcctagtaacgaccctctcgcatatcgcactaccagtaccacatgtgttccctacacacgccaaagatgcaagtgacattgggcccttggaacatacaagttcacgactattctactgggaacaagactattttgtatttcgaatcgcatccctagctcaactgcaaaaccggatataacgcctctcctaacttcaaaaattggtgcaaatatactacaaaggcaggattgggcccggttatggctcacaagacatccgacgcggcgtattgattgggtcttcatcccatgtcagtgaaaagaataaaaaacggtaggccccacatgtcagggactatctccttcctctggcctctcccctctccttgttatctcaaggcggcaaccagcaaggagatgggcgacgacgtctcctctctatgagcagtgcaggcgggggtgcctcgtcgggaggcaacgacccgatctggagtagttcctgactgctcctacccccgttcccccgtgagctcgatgaggcccacaccgtctgctgcgcctgcaacctcaagctcgagatccatagtcgtcgtcgcatcttcgagctcaatgacaccgtcgatgcttgcgccgctcgagagggaggacacggcacaccacccacgccactcccttccatctttgttgcgggagcccaagctccatctacaccaccgcaaagctcgaaggccacgaggttgttgcagtcaccgctcgggtaagaggacaccacggccagcgtgaccccaagctctcctattctcttgctctagctcccctccatctctgttgcaggaacctgagctccgtctgtgccaccacgagctcgtcggccactgggctgctacggccaccgctcgggagagaggagaccacggccggcgggaccccgagctctctcgtcgcgaaagaggccaagcctagcggcgacagtcctcttgctccagttcctcgtcatctttgtcgtgggagcctgagcattgtctgtgccacgacaagctcatcagccactgggctgttatggccaccgctcgggagagagaagaccatgaccgacaggaccccaagctctcccgtcacgaaggagggccaagcctagcggcagtagtcctcttgctccagctccttgccatctccatcgcaggagcccaagctctgtctgcgtcaccgcgagctcgccgaccattaggctactgtggccactacaccaaccctcgacgtcgcctcaacgacctgtcgtctctctgtctcagtttctcttctagatctaatgccgtcgttgcctagggtttgttcggttgaccaaccggattcacctcctagcctcgcctccgaccttcgactccttccacatcatcgttgacttctgcatcccatcgttggccaccgggtccccgccactcctgatagcggcccagactcgtgccaattcaccacaactggtcatgtcctatggcctcttgcctccatggttgcatatgaggagagaggaagaggtggaggaaggataaaagaaatgtaactcgcatatgggcccactatatatattttgccatatttcactgacatttaaggtcatgcgctaactcagcgagtctaaccgcagtcaacctaccacgtcagcaggaactgctttccaaaccatcgaaggagcatatttgcaccggtttttgaaattgggagaggtgttaatatatagttttgtggttgagggatgcgattcgatcaagggttagagatgcaaaatagacttattccattctactgaatgcatacagccggccgtggcgagaggccttggtttgaacctgggctatcactataaatcacattcaggcctcaatcctcagctttgcccttttcccttcctagtttcctagtctaggcctcaatcatacggaacccggtctagcagtcctggaccctggtcagatttgggccgaaaaacagttataacagcaccacgagtgtatgaaaatgtattaaccgattaccatccattacccataactcacgagtgctaatggttactcacaaataagtactaatatttgcatatcctttcttactataaaattataacccactaattctaaaactcaacatgcaaacatgccacctcatcatccactaacaataattacatgcaaaactaatacaagcatgcaacatcatctataattcattgaatttacatatcaacatctaatcatcctccttcacattatttttcacagtatttttaacatgtatatatccaatatttttataatccttaacatatattcatgcatataatcaaagtgcgggatatcatgtatatttcatctacaatctcatacatagtctattaaatgtatttatctcagaacatagtctgtcaaactaattttatttgttgttaataactaatataatttttatttttatctcgattattaaaaatttttaaaagttacttaggaatttccgcagcaaagcgtggggaatcacatagttcaccagattgtaagtacttaacacggctacgcagaaactgaatagtattaaaagggcttcactgaagaaaggtgatgcataaactcacacaatagagccatttcaaggcttcaagctcagtccccagaattatgacgaagtactgtaactagcttattttcttcagaattagtacatgatcagacaataaaactcgcgagagggacaaaaaaattcccagttttgttagatcacatctttgaaatgttcccgtgtgaaagaaaaactggacagtataatgatacaacaatatgtacatgacatctatgtaagaacggtgctccttagtgctccacggcagtgtcgttcttgaactcaacaaaagaatgtactccaaaaactcaaaagggttgggaaagaatggctatttcttttcaagaaacaactcaaggagaagacaaggccttacccaaatcaatataccttccacagcgtatttccgaaaaaaaaatacacattccacagccagccacaaacgaacaaagaatgcaaacggggtaaatacagatgactcacaaacactaacctttcagtattctcagctcccagaagcataggttactttgaaacagtcaatattgcacaacttgacggatgtcaccgacctcatcatccctccaaaactgtcacagcaatgggttgcaacagtcaaatctcatctggtaacaggaatccacaaagaaccgtgaaaacaaaacgagagcatataagaatacacaccgatcgatgcttctccgtggtctatcaggttgatccacactagcccttggcttatcaggatgatctatactctttctgcttttatctctcctatctatgcttcctcttggtttttcccgcctatcaacgctatgcctgtgatcaatgcttgacctagatttatcctttacatccgtgctttttcttgagctctgcatactttctgatcctatttcacaaggatctgaaggacctgagctccctgaggattcatcttttgtaggtggtaatttctcaatggccatgacaaacttttttaggtgcttgatgtattctggatatagttccagattacaatgatttccacctttgacccacagaggctcatactttattttagagagttcccacagtgccctcccatgagaacagtcgacaacttcatcagctgtaccctgcagatgacataattttttgttcttttagaaaaatatttgtgtacactatacacgtagctactcaatagtcattcttcatccaaaacatcataatcagaatatcaaaatagaaacagccatcaggcaacaattacaagtgtgacaatggatgaaagattataactgatcagtaaatacttttgttgttaacatacaaagttgaacaagaaaagggtaaaagaaggtcaggaaaagacaaaaaaaaaaaagaggttcatttcgaagtgcatattgaagtactccaggaaaatgatatagttgtcagatttaaaggcttcatgctaaaaatgatatgagaagaatactcacatggattactaaaacaggacatttgaccaatggaactttatcaatattctgcaaataaaaaagtgcatattagatctagcaaagttaagattgacataaacaaagaaatgttatcaccttgtatatgtcaaaccagtatgtatgctttacaggatacatcactcttaagccagataaaatagggctgtgtaaaacaacagccctcagatgaggcaaacgggatgccaaatctaaagtaggaccgctgccaactgattgaccatacagaatgatgttttcctctgtggctccataagtttctactagacacctatatgcagcctctatatcagaataagtgttctgctcacttggctgcaacaccaaagagaaataaatccatcagttatgcaaacttaggagggaaagaattcactaaaaggaaaacgaaatgggtaaaaaaggaaggaaaaacactttcctaagaaaggatgattttataccttccctgatgattgcccataaccggaataatcgtaactgtaaaaatataaatatgaagttactttatgttaagatatcagtgaggcttatcacattgaaacaatcatgactagagaaatatcaaatgaagcttatatcataatcatgattcagtgatttaagcaagctatgcggatactgaatgatcatcaaaatcaacaaactgtaattgccatcatgtcaaagtaaaagcataatagaccacaaccaggtccctaccaggataacaaaaaaacttggtgataaacttttcatattactaaaaacaaatgaccaatatgagtagttgaatgggaatgcagaacacagcaatcgatcaacatgataagatcagaaattggctataacgtatctgtgttagatccaggtaaccacccaatgactatccaacaaacagatcatctgccagcctatccattgaacgtagtcatgggatcaatgcctacttccttcactaaaaacctagtactgtattaaaatgtaagtatggaagggagctatagacaatatttccagtattttttattcactactacacctaaaccagaaataaaaacccagactttaattgagaagagccaaagggcaacagatttaatggaagcaggccaacagaacgttcatcaaagaaccctctcatagaacatgtatttctatcgaaaaactggtaaatagaagagttaagaatcaaactatgttctaccctccctctaaatgggtgcaaatagtcttaaaatgtcctgatttatgaccaacgttggcacacaacttgcaatacgataagatccataatttaaacttaatttatttaggcgattaacttctgtataaaaaaaacagaatggtatacagtatcggtgtccaataaaaatcatatacaaatatgcacatcaccaaatacaccacaaggcacatacatcaataaacaattctcaaaaaatatcagaatataaaaacaactcgtcatcttaccaatcctttgatataagccaatgaggtgttatttttatcaaatgtggcaactacattgggttccactatatctaaatatctaatctaccagttccataacacccattgccatttaacaccagatcacagggtactaacagcctagtactagtgatatgacgcaaacatccccacctattgctaggacagcacagtaacctccaaactttccagtcagctctaaagcttagtacataaactaatcatcaacttcaatcaaatctatcaattattcaccacaatagcctcacttttcttgagccacacagccggataacaactgccgtgtcagacattcccactgatgcaacaacacatgaatcttccaccacacttcataacccaatacacttcgagacaactatgaatagcaacagtagcaatcgccaccttctgcgaatacaaaaccaatcgcaatcacggccttgaacattatgaaatcttccatgattccatcaaattcgccaggcactcaaatcaaattagtaaaaagtaaagagcaccgcataacacatttttccctcgaactaaaataaggccaatggcactatacctgaaatataactcctaaactgaaatgcaaaactgagaacagtagtggagaccaaaacattgctacccatccatcacaagatcctaaacacgcacaatcaaatgatcatgaacttcctacaaactatacttcagagatccacactttcgcctgaattaagcaactagtatgcatcataacgcaaatgataaagaagagggtcacgttccaaagcaatccaatccgagagagagagagagagagagagagagagagagagagagagagagagagtgacgtggcgtaataccccatgaggttgacgttgaggtgggagctgagctcgacgaagagctcgtacatctggccgaggtcggcggcgttgccgtgggagtagagcagcgtgaggcgcgccccgggctggcgcacgtacatggccaccacctccgtgccccgccccgtcggcagccgccgcgcctccaccccggcccgccgcggcaccccgctgagctccaccaccgccccgtcctccgccgcggccgccggcgacggcgacggcggcggctccacgccgtacgacggcggggccggcgggaagaaggcgaagcgcgccgacaccgtagacgccaccgccccatccctccctccccccctccctcctcgccgccgggcacgggcagtgcagggaggaagagcgcgctgctgctgctgctcgctggagatggtgctgcgttcgccggggcgaggagagctcgggtttttttttttaatggcggattcttcgcggaagctgcggcgatcggagaagaaaagggagacggcgagaacggcagcagaggggtggcatagtataattagtcattaaaaggttaatgatgttgattaaaagagggattaagcttcaaaagaaaaaattactgtaactctttcctatcataaataagtggcattctcagataagtgtagttaggattagaatataagggttactgtgccactgacatatggatcatatcgaagtggaatatatatatacagagagagaggatataaccataagttgcacgacgttagaggattcactttcatgtattgtagttaatatgcttctaactttgaccatcagaaattctctctgaatattttgattcaacttttcaaaataatatggttagatttatcagcttcaaaatattgtgacattgatatattcttcatactaggttttactacttagtaattattaaataaattattggtgataatgttggtttccaaaatatcacttatttatgactggtgggagaatgagcaaacatgaggattagcgaaggcctacaaagcgtgttacaaaaaatgtatagaattctcatgtaaaattaatacgaaccactccctcaaacgttcacaaaaatcctttaaaattcacacgttcagagcaaaacctcaggctatttgtttgctatagaaagttggtcattctagttggatgattctctattgtgcaatcaacatacaccttttgaactttgaaggaaaaaaatgcccatacataagacttgggaattatttccaacaccgacaaaaaaaggaaaacaaatttgaactttgaaggcgagttgtaaaacaagagcaagttgggggcgccaatcttggcgacagccatgataaagatgcggaaagccagcatgtgaagcaactaagcttagcttagcttaagcctaatcttaggcttaggctgcggccggtgggggcgttacgccattgctttctgaaaaggacactgtcccctttggctaactgcaagctactactgcagcttaacatctctcactatcaggtggggcccacctttgacagatggctctgctgttcagtatagtagggtcccaatttggaagggttaaagagcttttgttgtttttttttaattattgaagcagattatttgcttcacatttaaagaaaaattcaagaaaactttatttggttgtattgtacggttataccctttatgttttgagctacttgtatttgttaagattatttttaaaatattaaatttatccatataattaagtaaaaaatttgtaacaacaacccacttaattatctattttaaactcagccttaaagctaaaccaagtaattgttcttcccttgtaaactctcagacagggtgtcattttcagctaagatatataaagaattcagttaagaaacagtcaggttttaaggagacttgtttacgctttaactggcaacgagatccggtaacgagattcgcatgttacgtaggcatctcatcctggaactgaaagcgtcgatctggaagctaatgcagtaattaagctttaggtttaggtataaacaaatgtgtaatgtgaagcataagccacggggatgcatgttactgccacgcgtctctcgttggagatatattcaggagcatttttaatggcaaacaacttcacatctcaacaaccagctcatcacccaaagcatcatcctgctagatgaaagggtttacaggtctattagttcttaatgtgatcttaaagacagtgtacactaacactacactatactcctactaaacttcaatcggaagccttgattagagcagtgaaacctggcctaatgtgtgaagctaaagaaaccggtaaataactaagcataaaacaaatatcccgtttcaaccatccagtaaataatctaaaaagaatttaggggctgtttagttggttgccacactttgccacgccacactttagtcatgccacagtttttttaggcatgtgtttggttcgctgccgcaattgtgttatgccatactttcttaactttgggacccacatgtcatgctctcaaatttagagctaagcatgccacacttgtgaccaactatttctaagtcacatttgtaccaccatgctacaactagtctaaacttaggtatggcaaggttaggcatcaaccaaacatccccttagacttcaacttctgttccttggaatgagacttcaaattcacatgttagtgacagcgcaaacgagggatgattgcacttgaaaatgtgtactccctttcaaccccatcgtttggttgtttggtggaataagccaaacaacatatttgcaaataaaaaataatttgtgaataaaatatttataaacatattctaaatgatctaaaaacaaaggctgaaaaataaattacaatgaaaaacccctaaaatcaactccaaatttagagttgaaaatttaaattttggttgataagcataagaaaaaagataaggttctttgttttataaaaaaatacaatcctgttctaggtttattttttttaagtacgaagggagtagtacagtccaattccagttgatctattgatgtaaatttatggaagtacaatgatggttcttgtcaacacataaatgtatagagtaattaggatcagtttacatctggtactactagacagaaattccctatcagtcaaggtaacagtagtacagacaagttggagatgtcacttgtttctccaaagtgaatgtaaggggttgtttagttcacgaaaagaaaatttttggatgtcacatcgaatgtttgaccggatgtcggaagggttttttggacacgaataaaaaaactaatttcataaatcacctggaaacagcgagacgaatcttttgagcctaattaacccgtcattagcacatgtgggttactgtagcacttatggctaatcatggactaattagactcaaaagattcgtctcgtgatttccttcctaactgtgcaattagttttttcatttatctatatttaatgctttatgcatatatccaaagattcgatataatgtttttaagaaaaaaatttggggaactaagttacttcttaactgaagtagtacacctcaactggcagcaacactgctaagcagtgacccactttctcaagaggcaataattgtgtcttaatccatgaaacgaaaggatacatgggcaaaaatcttgtcccggtaaacaagccttgtttgtttagataaaaaaaaattagccaaaaacatcacatcaaatgtttggacacatttatggagcattaaatgtgaggaaaaaaaccaattgcacagtttgcatgtaaattgcgagacggatcttttgagcctaattacgccatgatttgacaatgtgatgctacagtaaacatttgctaatgacggattaattaggcttaatgaattcgtcaagcagtttacaggcggaatctgtaatttgttttgttattagtctatgtttaatacttcaaatgttcgtccatatacttcaaaaactttacacccaaagaactaaacaaacttataattgattattgtcttgctgaatgcagatgagtgtatcattcggttgaatcatctgcatctgcatgtccaattaagcagaaactgcctattaccacattcagtgcactgatactagtctgttcagtgaggtcccatttctaatctgtcaactgttctgtacagtacttcttttttactaagtttgcttcttatgaaggacacagctcatactaactacagaatgatttaggtccaagcttttgccaaactatatagaagttacatctgcttcacccggttgttaatctgcattcagatgttagttgtgagttatggtagaatcaacttactaaatgccttacacagtcacattctaattgctcaaacaccctaaagtttttcttttactttctgacaagaccttcaacattgacaaggtgggcaactgggagcataattgtttttccaagtgacgtaatgaaaacaagatgattgttttcgccaactaagtgttttccaattctcagctagcttgcaaatcagagtaaattatttttcaacaaaatatcatttggggccctctatgaattgatctctgaatgattcctgaccaacatctaaacttgtggctctaaaccctccatctgcaatctgtctatcataatcatacataaattaattgccttcatgtcaagaatttcctctgattcaaactcatcaatcatatattatagtgtcaacataagaatgcaattttgctagtgccagaagtactttgccagtgactgaaaagataagcctatcacaactaggaggattctgtcattgtgcccaattggctggatgtgataccaagtatcctaacaagagaatattagcgaaaaatacgtcagacaaacttcaatgttcctttcaagggtccctcatatttggtagtgctcttatgcataatttgctctgttgattgcttggagccttgacctttcaagatgcaaagagtatcagctgagcttggtacctcctgttcaccagaaggcaaataagtagtgttatggatctttctttctgaactctatgtgcaattctaagattggcccagggtagacactctgatgcagtgtgatgaaaatttagcattgtacttttcaacatcattggaaaccagagtttttcaaaagtaaattaaattctcatattgccttaattcaaacatgcagagacttgacacacaagtgaaagtccgaaagatggcaacaacagccattccaattttaaatcgacactgagtccaggttcacatagacatttaactcatctgaagtatttttgaaactgtacattattgtaaaccaggcattttaaagccatacattgcttgtggatacaagaacactaacaatacagatatcgcgagcagctcaattcgaatttgagccggttcgcacagaagccacgcagattcaaccatccaattcattcgagtgactggaacctcgaccgctgaccaagaaatcttcgttcgctggattccaggaaataatttcccttcacagcatctgtgtctcataacatgaagccacgcttccttcatcactgatatttgatgacattcctttggagtctgacattcatgcctcctcttccttacggaagatattcattgcatcgctgtataaagcaacagaattggagaggacagcaagcacgatcatggttacagccaagatcttgtcacgcttggatgcgattccataaggatccctagaaaaaagaaagccaaaatgttatatgtcaatatgaaaatgcatgaacacagagggaatatataacacatcgagacataatttagttacctaagtataaccatggcagggaagatgaaaccaatcaggacagcagcagttgcaccagtaaactggaatgcatcccaaatgctcggtatgaaaatggcagcaagataaattactgtgaggagtgagatagtgattatggcaaatctcttgttgtcacgagaaatgtgccttgatgtggggaagagcagtccatccaagttgagcctaagggcaaagaagactatgggaaagacaagcataacgtgagcagcatagctcactcgcactatatcatcaaagacggaactaaatggaatcccaagatttgcatcgaagttagcgagaacatcatctagggtaccctcgccgaagaggagatatgcaaagaaacttgtagcaatgtaaacactggagcagaggaacagggatgttcgcacaataggtttaatttgtgttctgtcttcaagctcattgtcaatgctgtgaactgtgaatcatgagagcgtgcatttagacatcagattattgaacacttgaaaaaaaaaggtctgagcactgagagtgcataccattgtaatggcagatgtaggcagtgacaagaacagggacagctgtgaagagcttccagatggaactaagaccatctagttctggaaaaagtttgggcatcgctacagttccattgaagagtttgatgatagcaattccagcagtaatgacgacaaaaaccacagcaagagcaaccgatagggcagaggtgtatctcaatgaatctacaaggcatgacaattgacaaaatctataagtaacatcatgctgccaataacatcaaatacaatgaaggatattttttctttaccaatatgaaaacactaagacgtacccagacgcttaaagctcaccaatggagcaaacacgaaaagagtcgtcgcaagaagaacaatggcacgtgaattccagagatgagctccaaaccagccctcaagtataccacgatggtgaacaccggttgatgatgttccagataatacatcacctattttacaaatttaagaattaatatcgacttcagttaggaaaaacaaagttatctgtcaagacaggtgttgttaggaggaattatcctatgactccacatagcttagaatggataggtcattgtttcttttcagagaagcaaagattccagttggtagtaaaaacctgatcaaactagctgacagcgatgacaaattgtattggttttgcttgagaatgaagtgctaagaaatccaagcctacagctaagctctaaacctctaaataaaaatcacccaaaataatggggtttttttcacaacaaaatgtttggccctaagttaactacactagaataaaagatgttctacccaatctgtagattatttgcacaaagtccagctcagcaatttttggttgcacatctaaaaaagtcaaatgttcaaatgtaacagcagagcatagaagggataccaatgataatcatgtaacaatcatcacgccaatgttgtttatgacgacagaggcctgcagtgcaattcttccccactgtccgtaagcctcacccattagccaaccataagatgtaatcttgccctggtggctgcacctgacaagcatgtcaattgatgcctctgtgagcaacgccacaacgatgatcatcagaatccctgggatgatgcccaacatcttgatactggctggcaaggccataattccagccccaacaatagtggtcgataaattgaaaaccgccccggaaaatgaagctccattgaactcatgaaacccctcctcctccaccttgaccggcagaagtggtgttgtctcatctcgtgtttccttttgtacaatctgctggctcccattcggcgattcgctgctgatccccattatgtctttcactctcctggatagcaaggattcagtcagatttttatctggaaaaccaagtatgcttattatcatgcatctaactttctttgaatcagacagttttaacttggtttccatttcttatgctgttcagctttaatattccccaaaatgaatgtatcacatttttaattaatgcaagtatggacttatggagagaagaaatttctgatactaggtactcccttgaagcaagaagttcattctctcttctaccaaaagactttaagaatttagaaacgcaactctctaagtcaaaacataaagtaaataaaattatatccagaatatgagacaaaacgcacaaagaaacaagctgcaagatcatgttagaccaactaaagctcagcccaaaaaatccaacctttccaccacaattcacaaccacgggcataagcctacgaggctacgacacggttgtacgaatgatacttcaagtccatcctaatcagcatacatatccaaaatttatccccaaaatcactgcgacccacgaaccagctactcagaaccagtcttctcctagaattgatcaggaatcccaccaccgacacaaagccccccaagaaaagcaacgatcttcccaatccaagcaagaatcctcaccaagaactcaaaactgaagcaaaagaaaaggggatacctgataacttcggaggctcagtcccctcccggatctgaaaccagcaagagcaggcagaaccagacaaatcgccaagaaatctgtggagggcggcctcgccgcagcccggctgcggccccgctcgttttatagccaggggagacgaagagcaatcaatcaaccagcttggatccaaaaccactcgctttcacaagctacagtacttctccttgcccccacctccacactgtgatttccgtcgacatcaacggcaagagagggaacaaaaaaaatatttccgaatcgagaacgcgcgatccctcccctcccgtcgctgtctttgctgtcgtcggaatcttgtggggggcgcagggcagcgagaggtggtatccgatgattgattgatggggtcttgcttgctctggtcctgttgctgctttcttgccgtcttgatgttcctctctcttggctgtttttcctcgcttgctgcttcgatcgatggcggcgcctaaccgcgcccgccgtgacaaatgtaaaaacgggggagcatttaactatttgcaaacgtgacaataaaaaatttaccacggtctataacaacacgtgacccttacatgtgtatatatggtttcatttatagatccttaattatcgcttataagattgacaaatagttaaatatctcatagaatggtaaggtctaaaagctcacgctcacataaaaatagcgaggtataacagttgcaccatccgttccaaaaacaatcgaacttctgaagataaatttggatatatagattcatcctagagattggttctttttaagaactaacccctcattaaaaaaaagcccaatcttaatgagaatgggacatcactgcaacaatgaatttaggcaacccgctgtccaaattcgttgtcatagatagtgtgatatctcatcctcattaaggttgggatttttaaaacggagagagtaagctaatataaccaagacaagtagaaagtttttttcggcatgtacttccttcgttttatattataagccttgctagtatttcccaaattcatataaaatgttaatgaatctagacatatatgtgtatagatttagatgaatgtgacaaagaaagtattataatatgaagtgnatgaggtacgtcccacttgtgtcaaagctactttaaaaaaaatgnggatgttatttttttttcttccaaaattaccactacaaaaattggcaaggtaataaaataaaatattaccaaattttgtcttcactgtgtttggtaacaaaccaaatacaacctacatttcttaaccataccaaatattaataccaaaatttgacaggtagcaggatggtcgtaaaatgagttggtcaaccaaacaaccagcagcagcagtagcaggatggtcgtaaaaagtaacacatctcaccgaagtctttacccacggtgaaccactatttagggcttattcactttgctaccattttcaaacttaccaagttttagtattgccaaattttggtaaggttgccaaaatttggcaagatttcatacgtactcactaaaatttggcaacaaaataaacgtagccaaaattttggtaactttaccaaaaaatggtatggttgaaaatgtaatcaaagtgaacagacccttggatgcgtatgatattaaaatggcggacaattgtcatctatcgaaaaagttaaactatttcataaccaattttctttgattaaaaatcaactatcgaccaaaaacataaaacaataatgatttttaaaaaagggggcaattgcttatttaaccctgttttgaactgtaagtgccaatttgtccctactttttgaactttgcttatttgaccctcctttttgagtacgaaggtccggtctgaccctattccgtttggatgaggtgacggtgttaattttgtggtaaatagtccattttgcccttgcttatttgaccctattttatcttgtttgcttgcttgtttgatcctattttgttttaccgtgtatatattcaagaatgttgaaatatttgtaataatttttgctcaagaacagatttggcattaatttggcaaatttgaatcattttgtcaaatttgacttaaatttgacagaattttgtgaaaataaattaaataaaatatgtcacaattatgacagatttgccataaatttgaaaattttgattcattttgacagatttgactaaaaagttgtcagaattttgacaaaatgaattaaacaaaattttgacagcataacttctcattttgtggattccaaagtgtattcaatatagcataaacatatagccaaatccaacaagttcatatccaagcatgtgacaacatacatcagt

SEQ ID NO: 25919 - DNA, 1479 bp, Oryza sativa
atgttgatctagagcttaaataatgaaagattttaataaagctccatgtcaactttgtattagagtaactggaaagtagatcagtgtaggttcttggtcagtgctagatacatcaaaaataaattggctagtagatgagaggataacaaaagtgtccagcttgggctatagatagcaaaagtaggctgtcttgattggagaagttatcaggtagaacgcttctttttgccctttgtctgaatgaagccatagtcagtgctttcttcttcatcattttcctaaaaaagaaaaacagaatccttatcaaagtatattactaaggaaccagcaattctttctcatgcaatacttagcacaatgcaggcagtaggtttggcaagtatgagacccctagtgtcagccatatatgtgaatagtacatgtaaatagagaatagttgttgaccacagggtatacacttgcttgaatatttcattccattatctaaaaaaatacacttgattgaaatggtgccaagcttgtgcacagtacagttagtaggttaattgtatgattgaagaatgaaaaacaaatgaatttaaatatgatcagttgtttacctgatctgtactgtttggatcttcataagctctttttcctgacaaagtgcttgtttctaaattatatggttcaacttccatgctttgaatatcttggggtggttctatctgggatgatgagcagtaaataagaaagaaaagaaaggaaatagtaagagattatgtagcaccgacaaaaatgaataaaagaaagagtactactcttttacctcatgttgtattttcttggatagtataggcaccagtggaggtaaattatgtagttgttgagatgaacttgaactgatgggaagattcttagttgccttaaagccttggctggaatgttgccttccaaatctttctttaattgtcagcacctcaaatgaaggttcatcagcgttgatagttatgttcggcaaaaccttcactatgaatgtgaatttatgtcctatccatgcttttatttctggaggtgtttgattgatatcatattgccttttcatagtttcagcagtcctaccaataagttctgtacctttcttttcaaatagcacaagttcaaggctagctgtgccatcatttgcaatgaatggtattttgtacctgttcaagtgcagagttatttgaaaattatagttatatatattcacacttaatagtatgattggaaaaagaaatactcacttgtactcatactgcctacatgggcagttctctttcttgcattttaatatagaaccatcccatatcatcttgcaattgcacaatttacaggcttgataacaccaagtttttctttcctgaattccaatgatagtagcagtgcactggtatttttcatcctatgtaaatgtataaatgaaaggtttaagttgtagttcaatgaaagaatttaata

SEQ ID NO: 25920 - DNA, 602 bp, Oryza sativa
  unsure (1)..(602): unsure at all n locations
gggaagaggttcggcgtgctgacggaggagaaggcgcggcagctgcgcgcacggatgatggagacggagagcttccacgnctgcatgtaccactccgccatggcctccngcntngcntcgcccgcccccccccgacgacggcaagcactgagccgccgccgccatccatggctccccgcctctgcccataccgcgccgccatccaacgccgatgatgatgatgatgttgttgtgtcgttttggtatcaataacgtcgccgccgccgacgccgtcaatggccggagaagtattagtatgaggcctcgacggcggcgtgcttgtcggattgattccatggagatgggatgatttcatcctaatatctccatttctgtaactcatagtatagcagctaatgcatctaaacgttgttgtaacaagaaatttaatctggtttcttcaaccatggcttcttctgtactatacatcacaatcactctgaaattttcagaaatttcagtgttcattttttatctctgaaagtttcgagaattcaatgtttttttattcctttttcttctccaagatatgtgcagcatctaagatcgaagaacttgatcat

SEQ ID NO: 25921 - DNA, 1403 bp, Oryza sativa
tcactacaaattcaaaattaacatttctaacaaacactagcattccagtttcttgtgtgatttgcatcagctcaaaagatttgtagtagctaaagaattcattaaaatgaaatgaaattaataatggcagcactgcaagcaatactaacttacaaagtgcatatgctttttgcaagaatttgaaatggtaagccaaaaaaaacaagagttaaggtttattagacaatattattgtaggacattaagattgttatttacatcaagatctctaaaatcaatgtaggacatcagtaaagggaaaaaaaactcctagctagcagcacacacaatgcttcatctgcttcacgaatgtgcttacctacatatttaacttctagaactcataattgtatggaactcttaagccacaaggagaaagacggaagctacaatcagtataaaatttgcaaatatttggaatgttcattgattcttatggataagattaaatatgacctaataattgataagctcacgaatttttttccttaataggaacataaactgtagcataactgccaaagatgtgtttttaaaatattttgaagtatccgatagttcttaaaagaagtaagttctcgctggttcatgaggaatggatgtactcataaggagtggctgtggaacaagacacgtacatgaaaaaggatagaaaacgccatacatcatattatgtatttatatgtacaaagggcttatacatatgatacaacgatatgcacatactctatcaagtacatgatggcagaggcgggcattctagaatacagctgctaactagtgttgagctaacaagagggaaaccagtaaaaaaaaaaacagaacagtagcataaaaagaagaaagctgacagcaactgcaactatatgacttactacttacatctatacatgatggacctgactacaaagccacaaagaaaaaagaaactgatagctctgcacagatagttgagaagagcacaaaaggctagaaccttcttggtttagatggctctgaaagtaccggcttcctaaaaattccacagaagatgcatccgggaaccttgggtgaaggaggatcctgtgctgggggcacacggcgagtatggaacgcctggctgttgttgcacctggtgtgccctgcaccatcgccatgcctacgctgcagcccaatcaacccaacactacgggagtgtctcagctctaaggctccatcttcttgatctctctcgctatgaccatctaacataagcctctcatcccagaccaagccagatgaaccggaccttctaaatgtctgcgaagatctttgtagcgcggccatgttcctcacggtggttctctatctaggaatgttctatggtatgcaatgaggactaaggg

SEQ ID NO: 25922 - DNA, 870 bp, Oryza sativa
aaaaattgtgatggcaacagacctgagtgttgtcatcagggttttttaggatagccctgacaacctgcagcattggtgttatgccagtcccaccagcgatctgaaagcatatacatacattttgttaaaattttttaaaaaaaaagaccagcttgataacttcagaatttttctagctttgggcttgctaaattgaattggcaaacatagacacttggctaaggttgaagtcatgtcttaccatgccaatttgtttcttcatatttgggctatatctgagcttttcaatgggcctggaaaaaaaaaagagaaagacatcaattacagatagccaataacatgcatagaaaactcaacggattttcatttcacattaccctttgacctcaacaacatctcctggtttcagacttgcgaaatactgactcattttcccatcaggataaacctgcaacatacatatagcacaaaaataactctcctttcagtactaccttacactggactacaagaactgctgatctaaaagcaactagcatgttctgaacttcagacattaaactttgtgttaccttgattagcaggtcaaaatatcctttagaatctggatcagagataggtgtgtacctgcagaaaacatgttagattccaataaaaatctaatcgaacagtcgtactaacatatgttatgtatgcaataatggataactgtttttgtctctgcttacgggcgaatgacaaattttcttcctccctccacttcctctcctattggagccctgagatgaattaatggttttagagtctccaaggtaagaaataaatataaaaaatactagctcatactatcagaaaagtagatgcaaaatg

SEQ ID NO: 25923 - DNA, 13174 bp, Oryza sativa
gggagagcgcgcgcgagagagagagagagagagagagagagagcgcccggggagagagggggccggggaagaggggaagatgggccgagcgagattcggcccatcgacctcgggggaggcaaaatagacttttgcggaggaatttgattggaaggatttggattcggaattgaactcgacgatagatcgggtattgagatcttgagatggcacggacactagacaacaagcaaagaaacaaatttcgcaattagggtttttaagagatgattttcccgctaggcgccatgacggaacgggcgctacagaccaacccccctaacaagaatctcgaccccgagattcagcacctaagggagcaggtccgggaactcggcgcggagaagatcttctcgctcccaggttgcctcgtcttcggaatgattgctccattggactttgtagaacttgatggtcttccttcgagtctgacgttctgcctcttcaagaaccttgatcggtctttccttgtaggtcagattcttttctagctcgatattacccaggggaacttgctcttctggaactcgaagacatttctttaactgggatacgtggaacacgttgtgcacgtctgcgagaccttcaggtagctcaagctgataagccacttcgccacgtctggcggttatgaggtaggggccgatgtagcggggtgctaacttgccggacatcccaaaccttctcataccacggaggggtgatacccgcaggtacacatgatctcctttttcgaactcaaggtcacgcctccgattgtcagcgtaattcttctgacggttctgtgctgtcttcaaacgttctcgtatcagcttaacttgttcttctgctgacttgagtatgtcaggaccgaataccagtgctttgcccacctcattccagcacaagggggtgcggcactttcttccgaacattgcctcattcggcgacatctgaatgctggcctgataactgttgttgtatgagaactcggcatacggcaaacaacgatcccaagtgccttcgaaatccaaggcatacgcacgtagcatgtcttctaggatttggtttaccctttcggtctgaccatcggtctgcggatggtaggctgtactaaaattcagatcagttccgagggcttcatgcaactgcttccagaaccttgaggtgaactgagtgcctcggtctgacacaattttcttgggacagccaaatctacatacgacatgggtcatgtagagttctgctagtttctttccatcataggtggttttcactggcacgaaatgagctgatttcgtgagtcggtccacgattacccaaatggagtcgtacccgttgggggttcttggcaaaccggtgatgaaatccattccgatctcttcccatttccactcgggaatcggtaggggttgcagcagaccagctggcctctgatgttccgccttgactctttggcaaatgtcagacagggctacgtattctgcgacgtctcgcttcattccagcccaccagaagtatgccttgatatcttggtacatcttcgtacttcctgggtgaatggagtaggcggactcatgagcttcctttaggatgagatctcttaactccttcttggccggtacacagatgcgtggtccgcaccaaactgtgccttgatcgtctatggagaaatttgtgtctttcttctcctgtattctttttattaattcttttatcccttcgtcgtctttctgagcctcccggattcgcgactctagggtaggctgtactgtcaagctggcagggacacctgactgtaccacggtcagtcttaacttctccaattctccgcacaggtgatcttggtcaggccgtatttgagctacattgcaataggccttgcgacttagcgcatcagcgaccacgttggctttaccaggatgatagtggattccaagatcgtaatccttgattagttccaaccatcttctctgtctcatatttaactcggtctgagtgaagatatacttaagacttttgtgatcggtgtatacttcacatctgttcccgattaaatagtgcctccagatcttaagagcatgaaccacggctgccaactcgagatcatgggtgggataattggcttcatgaggcctgagctgcctggatgcataggccacaaccttttgttcttgcattaggacacatcctaagccttgtcttgatgcgtcacagaagatctcgaaatctttttggatatctagcaaggtgagaactggggcagtggtcaaccttttcttcaattcttggaagctgtcttcacaggctgcagaccattgaaatttcttttccttctttaacagctcggtcataggtctggctagcttagagaatccttcaatgaatcttcgataatatccagctaagccaaggaagctgcggatctctgacacgttcttgggcgggttccaagcaagtacagcttcaaccttgctgggatctacttcgacaccgttggaggaaatcacgtgtccaagaaatgctactctgtccaaccagaattcgcatttcgagaatttagcgaatagttgatgatctctgagcttttccattatcagcctcaggtgttcagcatgttcttcctcgttcttggagtatatcaggatgtcatcgatgaacaccacgacaaactggtctaggtattccatgaagattttgttcattaagttcatgaagaatgctggagcattggtgagtccgaaggacataactgtgaactcatatagaccataacgcgttgagaaagcggtcttcgggatatcttcagatctgattttcagttggtggtaacctgacctcaagtcaatttttgagaaaactcttgctcctttaagttgatcgaataaatcgtcaatccgtggcaacgggtacttgttctttatagttacttcattcagggctctatagtcgattaccattctctccgagccatcctttttcttaaccagaagcactggggctccccaaggggatgagctaggtcgcacataacctttactttccagttcttcgatttgtcttttaacttctgctaactcattagctgccattcggtagggtctttttgcaattggagctgtgcctggtgccagttctatggcgaactcgatctctcggtctggtggcattcttgttaattcttccggaaatacgtcgggatattcacagactatgggcaccgactccaaggaggtgacttgtaaacaggttaggatagaccgacttgcggtaggggtgttaggggtaaagcggacttgctttcctctaggtccttgcaaggtgatggacttttcggcacattctatctgtcctttgtgcttagccaaccaatccatccctagaatgatgtccaagctttgcgagtctaggactatcggtttggctaggaagtcaacttcctcaattctaaggttaacttccgggcatatttgagttgcccttatattccttccaggggaatgtactatcattggtacacgcaaattttgggttttccaaccatttcttttcacaaaagcttgcgatatgaaagaatgggaagctcccgaatcgaacagaactattgcgggtacggagttgacagagaacatacccatcacaacgtctggagcatcctgagcggtttcagcttgaatgtgattcacacggcctcgaccaaagttgttggaagcacgtgaaccttgtccacttgcctgagagctaggacgagactgagttgccgctggagtaggagttctggcagtgctgccattagcatgccctgagttggtgttggtaggattctgaggacactgtctagcatagtgacccatctggttgcaccggaaacactgaactgctgacggtccctacggtgacttgaaagaggtaacgctgttaggcgcagtattgccactaggggcacgctgctgtggctgaggtgccggacggtttatctgaggacgaggggcgtagcctggctggcggttagcctgagtgaccgactggtggtattgcatgggttgaccgtagcgagggcgaggtgcgcctcgggaagaatttccctgatggttagacttgcgtttcttgtattcttcggtagcctcttttctggcatcctcaagtagaagtgcgttgttgatcatatgttgaaaagtggggaagtcatgagcaagcaactggagtctcattccaactgcgattcctttcaagaatttcctgatcttcttcttgtctgtgtccacttcctcaggggcgtaccgagccaacttgttgaactgacttaggtactcattgatactgctgttgccttgcttaagtctgttgaattcttctttcttcatgtcaatagtgctttcaggcacatgagctgcacggaaagccgtagcgaactcatcccaagcaatgttagtgggttcagggtgtgcattgcagtaattctcccaccaatctgcggcaggtcctcttagttggtgagaggcgtagagcgtcttctcaacaggagtacactgcactaagttgagttttctatcaacatctttcaaccaatcgtcagcctcgacgggctcgacggtctgagagaactctggcggacgagacctcaaaaagtctgtcagcttggatctgttgttgcccatgtgagggtggccatttccatgcgcattatgctgaaaactggctatggctgtggttagtccttgcaagatttgtgtctgaactgccattaagtgttgcatgttggtttccacatgaggtggggaagggaggcgttcttctccagaattgtgactggcagtgcggtgagagcggtgagactgttccatctctgcatcacgggaaactgtgcgatgcgagcggctgctgcggcggggttgctcaacctctgcgttgcgggaaacagtacgatgcgaacggttgctgtggtgagactgctcattagctgattcatgattttcttctggctcaactctaccatcctcaacaccaaagcgggctggtgcacgagctgcacggcggggacggctagccatctaaactcccagaagagggcggggtaagagtcagataagcacttaggagggcaaggagcaaagcaaatagcaactcagatagcacacactaggcataaactggatttttcaaatcataaaaacacctgatacaacgggtgtggacaagtcacagagctacgccgagcttgactgtgcgcacaccacctaggagaatcagactaccaaacaacacccacaacaaacacacgcacgcactacctcgccacgactccaaaagagttggcggcggaacaaaagggcctatcacacggacggctgctgaagactgcctcctctactcctcgtcggcctggctgcctcctgtagttggctcctcagtcgaagaaacgtcgatcggctgacgcgaagggaccggcggaacctgtcgagggccggcagcagcacgggccgctggcggtgggggagctgggtagtggaaacggaacacggtggcagaaccaacaacacgcttccgcgcagtgcggataaagcgtgggccacggcgggaggaagcaactggggtgtgtcctggggtgtaggaagggctaactgggtgtgggtagggcgagtacactggtgagtacggcgcacgcgagctgggggagcgcgggccactgggagtgcgggcagagccgcgggagctgtgggaggacaggtggctggcgtggcagaggcggcctgagtcccaagagatagtgtcaactgaggtgacaccctcctcggccagacgggcctccaaagcggcgtagcggcgggcaagggagcggtaagcctcaaggagtaggtcgtgctgagtggcctgagcctccgaaagctcgaccatgcgagtcagcactggctgagactcgctgtacggacaagggtacctggcgtctgagtggccagagggaaggcgtggaagctgccggaaggcggaacctccgagacggtggctgtagtcgtgggccaggcgacgaagcgcagtccaggagaggtcctggtacgcgatctggagagtgggcctggccacagtgaagtggtgggggcgaaggccagctccgtgtatacctccacgggggtaaaggtacaccgagagctcacagtgagggggaacacggtccacggagtaccccgtgtactcgggacacgagaagccaaggaaacgggagaggtcacgaagctgagcgacgtggtgaccctcaccaaaaccgtgggaactgaagctggcgttcactgccatctacaattttgaaagagggagaaagatcagtaaccgttttagaaacaaactattgaaaataaagaaaacaaaagaaaccttagcttttcgcaagtagttttgaacttagtatccttagggtcgtcctaagcgtcgggtttcgccctagggccaagcctgtgctctgataccacctcttgtcacgccccgaactagtcccgaccggatctagcccgtgacgctccaaattaacctgttaatcgataccagtcccaggaaatagtgctggtatcacaaggagacagagtatcacagcaacagaggtctctttattatagagtagaagtacagtcatgttgggctgcggacagatcccgagctcacaactgcattacaaaaggaaagcggaagccagtacttggaccaatcatcacaggcgcgacttgggaactaggccgaaaccctaaaactcatcgtagccgacttgctcctggaagaactcctcgtcagcaggatccacttcatcttcttcagcaactaggggggattatttatatagagcaagggtgagtacgggagtactcagcaagccaggggaaataagtgtttaatgcaggcttcaaggaaaggctgttgttttcgtaattgattttgtttgaactcttttctaaaaagtctaagtgagtgcttctcaaacgacacggatgagacagtgcgtctcgtccggtcggagtatgtgcaatgtatcagtctttagatcttgaaacagggttggcacccggccaacagcttttcaaacggccacccgggccaacaacttttcaaacggccacccgggcctagctgatcccgtcagctgctgatttttcaaacatcgaacccagtttcacaacagcaatttcacaagcagtagtcaaacaaaactacgctaggaatcacctcacatccgcccatgaccgtgggcacggctgttcgagcagtttgttaacctctgtagagggggtacactttacccacacgacattactaacccggatcacccagcccgtggggatcagccacgtcgggagacctccaagctttcatgacaaggcatttcgaaagccgatacaggtttaccatatgccgacgagaggggtcccagaccaacaacaggttaggtcccagaccatactgtgccaggaagcccaggggtcctccccgacaccaccccggcgaatccacatgtctctcggcatcaaggctcccctgataagctagttactcagccaggggtgtcccattccacccatgtggtcgtacttgtcttatgtttggatgaaattccaaggaatcggtccttaagtgcgagagcgggaaaccgtacacccggtacgttccccggtccgcggttttggaaattcatttagttcgcaagcaccgacccaggtgtcgggttttccaagtcttttgtaaaactccagttttacccaagttgttactcagattttaagtttgaaggcgaccgtcgatactcgcacagagtgcacgaatatcgaggtgcaactgggtggttacaaggggacatggtataacaattaacaaaggaaggatcaaatgcaacaaattaggtaggtctgccaacctgccttgcagacgggacaacagattaagtgtgatcctatcaatgcataatatttcgcaagcaatataattaaatttcaaatataggctcaagatgttcaaaggtggcttgccttgctcgagatccggagcttgatcctcgaaatcctcgcactgcgggtcttcgggctccgaaactacacgcgaaacgggacaactcaacaaacggcgaaaataaagccctattaatgacctctaagcgtgccattagatagatctcgagatttgaggaattttggaagttgaacggagtcaatcggatttacggttgggaagatattgaatttctaagattattggatttttggtctaaaggaaaaaggatttatttaaatcctttttggaaaagaaaaagaaaagaagggagggagggaatatagacttttctcggacggctagggcgcggcccaagagaaatggagcggtctggccgagctaaatgggccggccggcccaaggtggcccaaactcgcgcgcgcgcgggagggaggagagagagagccggtggaccaggctcaacacgcgcggtcccgggtgggacccgcttgtcagcggctcggctcaccgtgcggagggagcacgcgacgcacgcacgcgggcggggaagggacgcggtgcacgcgcgcggttcgcggtggacgcggatgcggcgggcccacgcgcagcctcacggctcgcggtggaacgcgcgcacggggagggactgaccggggtcggctcgacccggtctaggctgagctggcgccgacgtggcacctacgtggctgccacgcgggccggcgggaggtagacgacgacccggccgcgaatggacggcgggcggcggcggcgagcggcggagcgaaccacggcgatacgggcaacagcgagcacaccgggcggttgcacgtgacaagggggggcgagccaacggctcggattcgccggaggttgctcgacggcggcggattgcggcggcgacaaccggcggcgggagaagagggaaacggcgacgaggtcacgagaggtcgattcccggcggtgagagcatctacgcggcgtcgggaactcgacgctagcgtcggattggacggaactacgccgagcgaggccggcgacgagcgggtgctacggagctcgggcggcgacggcggcgagcacacggcgagcgacggcaacggtcggggcggcgccggctagctacggggaggctactcgtgctaccaccgaaaactaaggggggggagatggagcgaggaggaagaacggagagaggcactaccgtgcgggtcggggcgctgtgacgagaggccgacggcgcgggagtaatctctccggcctcgggccggggaagaggaaggagagggcgcggccggagtcctcttccgcgtccttgctcgtgccggctcctccgacacatgcaacgacgatcggcgacggcgaaacagagggcggcaatggcgcggaggcgaaaatgagggagtttggagggggagggcttgggcttaaatggacggcaatgtcggtttgggagaggggaaccgacattggacggttaaggcgcgagctggcgctcggcgcttgtagccaaagcggcggcaggaggatgacgccggcgaggaggaaaaaggggaaaaggagggggagaaaggggcttgcccctttgccgattcgggaaaaagagggggaggggaacgggagcatcgcggcagagggaggaggggcgcggctccgtcccttggcggcttgcgcgcggaggggcgggggccgggcgatgacgacggcgatgacggcggggcgatttggagcggagcggcgacactggcgacaggcgcgtgcagaggctgacggcggcggcgaccgggcggtcggccaccacggcacgcgcgcgcgggaagcaacgggcggcgtccgcgcgggcgcgcacacgctggctcgcgaggacgagcggctgcgcggctgcaggcgcggcagagcgaggggaaagggagggggcgctcggcgcggcggcttacgcgcacgcgcgcgcggcgtgcgggcgaggctgagcgggggaggagagatgggagagcgcgcgagagagagagagagagagagagagagagagagcgcccggggagagagggggccggggaagaggggaagatgggtcgagcgagattcggcccatcgacctcgggggaggcaaaatagacttttgcggaggaatttgattggaaggatttggattcggaattgaactcgatgatagatcggggattgagatcttgagatggcacggacactagacaacaagcaaagaaacaaatttcgcaattagggtttttaagagatgattttcccgctaggcgccacgacggaacgggcgctacaatacacctctccgtgggtggttgatcttgacggtggagatcaaccttattcctgcaagcaaatcgaagaaacaagtaagaacaagataaaagcaatttgaattacagataggaattgaatacaaatgataagttggggctccgtaacgagtaaaccggcaatctaaccgatcacgggattacacggcaaagtagcaaagctaaactttaatctaaacaaaacccaagaaaccctgaaggggtacctaactatttaaagaggtgggaggacgaccaaggggaccctagggtcgtgctccatctggttgggtcgcaccccacataggccccacttgggccggggtcccaaacgaagttacaagcccataggcccattacaggtgacgcaacaccttgtttcttcaattgcggatgattgggatggaatttgacgatgaggctggatccgttggaaagaggactccgagagctttctatcaagtactaggatgtgtcagatccctccgaaatcccgtatattatgggataaatggaatagtatctaagtcacatcttactactcacttggtgaatatatattgtgaatggcctaatgcggctatactggtgtcattgtgtatgtagatccctttctcctactaaggccattcacagtgctccgacatgctgttaggccaaccctcgacgcgtcagagatttgcggctagctaggtgtcgcgcgtgaccaaatgaggtccacggagtctagattgggcattcgttcttctgacaacccaaaggagcacggtgtgggggagaatggcgtggccgcgttgtggaggtcatggccttgccgcttcgagcctccgtgcgtgtgttcccctccccatccctcgagccggcggcagaagaaaaggaagacacaacggtggaggaagaggaggcggtagatcttgtgcctaccttgttgatatcccccctcccaccgtgccgccgctcgtcgtcgtgcctcgctctaagccgccgagcttgtcgtcatcctctgatgtgcgccgctgctcgttgtcgtcgtccactccaagcatggcagcctcctcgacccctccgtagcctcggtggcctccatgacccgtccagatcgaggcgccaccgaggagagtgtaaaggtcgtgccaccactcgttattgttgctctaaactacgggcaccggcgaggagaggggagaagggatttggcgccggcgaggagagtagagaagggagatccggcgagccccgggttggatttggccacgccactactctgcctggtgccgtcgctgcttgggtcatcgctccccgtcgcggcgcggtggactgaggagagcacaagcaacaagcaaggcaacaagcaaccaagaagtcacacatggagaaaatatgaggaaaagtcacaaaagcttgctgcaagcaaccaagaagtcacacccacgtggagaatatcaggtactaccgcacagtagcgtgctacatattaccaacctaaaaaaaatacatcaaaaaagtcaaaaacaatatgaaaaaaaattcgagatgtgaaacactatgacatttgccatcacacaaaacatcaactcaaaatacaatgtgcacaatgagaaaaagaaacaattttgttctccaatagtatttaaacaaatcagttttctattccactgagatttgtcattttttctatgtgtatatgttgtattttgagctgatttttttacatgtcataggtggtgtttggatacagggactgatcctgtcatatcagatgtttgaatactaatttaaaagattaaatataaactaataataaaactaattgcataaataagagctaattcgtgagataatttttttaagcctaattaattcataattagcacatgtttactgtggtatcacatggactaatcatggataaattatgctcaatatattcgtctcgcgaattagttcaggttatggattgtgttttttcattaatctacattttctacttctaatgaatcaaacatccgacggtaactaaaatttagtcctcccatcaaacagccttgcgcttgcacctctcaaaatttttctattctttttttttttgactttttcggtgtatttttcgataaggggactcatctctcaagtgcactgcttctcttcgtctcttcccccatctccggcgagccgtactggtccaactccggcggccaacgacccctcaactaccagctgccccaaaactggatccgtcactgagttagttaccaaggtatatctccccctcattcatatcggcggccggcgacggcgagggtgagaaactgaatctgtacaccctgttcttgcccagcggcggcggtgaagagaaggggcagatggacggagcagcagtgagcgtcgccactggggtgatgggatccctccttgccaagctctctgcattgctgggagaagaacgcgggcttctgaaaggtgtcaagggtgacatcaggttcttgagagatgagctgagcaccatgaacgtctttctgatgaatatggccagtgtggaggagaacatggatgtgcaggtgaaggactggaggaacaaggtccgggaactgagctatgatatcgaggattgcatcgatttattcatgcacaaattgaatcgcggggatgataaggtcaacattgttctcaagatggcaaagaagattagaatgttatggtcaaggcatcagattgctaaccagatccaagaacttaaggctcgtgtcaaggaagagagtgatcgccgtttgaggtactacttcagcgagtgcaatgcacatgtcgacgggactaaaattgatccccgcctaccggcgctttatgttgaagaagag

SEQ ID NO: 25924 - DNA, 1009 bp, Oryza sativa
tttgctgttatgactgaaccccacgcatgacggcatgagaggagaggaagtgttggacacttgccgcggttacctgacgacaattttttagtgcttttatttttgaaagaacccagcaagctggttttattttagtgcttttatgcatgatgtttagctcagcaagtgaccaagtaatttgtatagtataaacttcctagaaattgtatgcagaaatgcaaatttgtctcctcgtcatgcagaagttcgaattacaaattacaaatgctaattatggtacaccaaatatgttgcaatgcagtaagcgcaaattaattacgtatactgcaaactttgcatacgtattagcaccaagcgtgcattttgtgatgattgcaagtttggtccgtggtttctctccatttgactcatctgggtagcttgacaccttaacctgagtttgtaaattttgtaacatgggggcttctaggatgtgtgtatgccaatatgtgtgtcttcaaaatactacgtatgtaatatatatgtaccatttctgaattgtaagtactgttgcagcttctggttagtattgagtggaattcagctgatggaactactaaagattccctttaagggtgtcgtcgctgatatcgaaggccgagcagcttggtacaagcatgattggcttgagggattccactctggcttcaggttaattttgtttcgaacaattaattttgcagtagatcactgtgtgtgttttcactcctcttgttgctgtcagtttcattccttaattattcatgttgcctctggatgtatcgtcaggatattggcacctactatgtatatattttttgcctctgccctcccagtcatagccttcggaacgcaactgagcagagaaacaagtaaatacctaccctcttgccactatgagccatactacagttgtgctctttttggaattgctgtccttaggctttaattacatctctaacaaagggaaagtggttcatttcagatggta

SEQ ID NO: 25925 - DNA, 2412 bp, Oryza sativa
tttcgggatgttgatcactgttctgttcctgcaacaagctattaaagtatgctatttctagcgagctcagtgctttgtatcttggaagaaaatatttagaacggtgcctacttattgcagggaattatagaagaattcaaggtacctggaggtgtcgaccatagttcacctatatatcgattccagtggttgtatgtcaacggcctacttggtgtaatcttttcaattgggctgttatacactgcattaaggtcaagaagggcaaggtcatgggtgtatggtcaaggttggtcacgttttcatcttacttttatctcattgtgtccaatttagggggcaagttgagctctgggtcatcaaattagcaatagctgttccattagtcatccatccaaccgttagatttatgccaaacatttcttttgctgttttgaagtttggactgggcctactttagatcaggcgttggttgggctgggctgcaagcttgtgttgtgtcagcctgtcagctttggggcaaaccatatggactccttttttttccttattgagtggatggcttggcttgagatggtgtttagtagcccatatcgacagattcttattctgcacagtgtttttccctctttgaaatttttaacatttagaaacaaaaacaagaaattactactatcttctctattaaatacgcaaagcttttgccatctttcaagtaaaaagagaagaaattactactatgtatgctacatcagcatgcaaatgactccatgatgacattttataaccattgagaagcacatgtacatgaactgatcattgtgcgtttgagttgacacttgcagggtggctcagaggcttcatttctgattatggtgtcccacttatggtgattgtttggacagcattatcgtacgcattaccaaaggatgttccttcaggagttcctaggaggctgttcagtccacttccctgggagtcaagttcactgcatcactggaccatagcaaaggtaataaatcaaacttgcttgggatactggagatgtgaatatttatggtcttcaggtttagaattttggtatagcttattttgcatggcatcattgataatatctttgggttttttttttatttccaggacctgttttctgttcccccagcatacatatttgctgccattctgccagctttgatgattgcaggactttacttctttgatcatagcgtggcttcacaattggcgcaacaaaaggagtttaacttgaagaagccctctgcttaccattatgacattttggtcctcggattcatggtgtgtgccatggttctatgataaatttatctgcttatacccgtctaaaaaaattatctgcttatggcggcccttcttaagtttttttttctcggctaactaggaacctaacatcttttggtcctcagtgaacatttcatttctctatcacttctagcctaaaactagccaaaatcttttagtatagtcttatgaatatgaaatatttccgttcaaaaaaaatgaataagaaatattctcatatattttaaagtagagttggtatttgttacaacaattgaatgggtatgattgaaaatccaacatccataatatcttatattcttttttgcgtgattataacctggcactactgcaatctacaaggtgatggttgataggagtattggacactgattctgctttgtggtgtaatagaccaaagctgtgacatgctcctcttctcatatagtagtataaaaatgatgcaggtcctgctttgtggtttgattggcatccctccatctaatggagtacttcctcagtccccgatgcatacaagaagccttgctgtccttaaggggcaggttggtgaacttcagaccgaagtgttttgtttgctacaatatccatatttgctcatcagctcacccatcttcttcctctgtttgcttagctgctacgcaaaaagatggttcaaactgccaacgaaggcctgatgaatcgtgctagcagtttggaaatctatggcaagatgcaaggggttttcattgagatggactgtgaaaaaaatgtgagtatgtactcttcattactgatgtatgttaccatataatttcctcttccatttatttgttgcattttacttctattgtcaatgccagttcctgtcaaaattactacatcagttgtcaagaaaattagtcctaagctcatgtaattgcctgaacaccttacttttcaccttacgaggagtccccatacttttggttttctttcagtaactattcaaaatgtagatgccactgttagtcttgtatggaaaatgttcaagtaaatcaacttataggtcaaaaattgtcctgcagactgattctgttgacaaggagttaaagagcttga

SEQ ID NO: 25926 - DNA, 2959 bp, Oryza sativa
ttttctttcagcaactattcgaaatgttgatgccactgttagtcttgtatggaaaatgttcaagtaaatcaacttataggtcaaaaattgtcctgcagactgattctgttgacaaggagttaaagagcttgaaggatgctattctgcaagaaggtgataaagaagggacattggctgaagaatttgaccctataaaacatattgaagcacatttgcctgttcgagtgaatgagcagagactaagtaacttgctgcaatccttattagttggtgcttgtgttggagctatgccagtcatcaagatgataccgacatcggtcctctggggttactttgcttatatggccattgacagtctacctggcaaccagttttgggaaagaataagacttatattcatcccatcaagccgacgctacaagtaatatctctatctgcatctgtttaccccatttgaacaatgaaattgcatgcttgactacttgcggtgcagcctatgtgcctccttttggattaatcgtaagataatccattttttgtcaaaacagtgattaacagctcacactatgcttcaacatttgcagggttttggagggtccccatgcgtctttcatggagtcagtgccttcaaaaacaattactgtcttcacgatcttccagttggtttacctcttgatatgcttcggcataacatggataccaatagcagggatcctgttcccgttgccattcttccttatgattcttatcaggcagcatgtcctcccaaagttttttgagccaaatgaccttcgggaattggatgcagctgagtatgaagagcttgaaggtgtccaccacgatcacacgctggtataaatttatctcccattcttggattatttacttgtcagtgatgattgtgtttcactctttaattctccgatgccccacgtctgttgttaatctgaatcttttgttccacacaggaggatggtgcatctgattcagaaagctgtggcagccgtgacgatgccgagatattagatgagctgacaactaaccgtggagagctaaagcacagaactttcaaccaccgtgaagaaaggcacccgcaggtaaactattggcatgaacaatattgcgccgaatgtgcacgggattagagatgagatgatacaatgcgtggccttacaatttgctctctaactcttctatcagcgtcactactagccaggcttgttgaaatatcgagctctttcttttttacggaagatcaaataccacgcacgatttgttgtactttctgcctgaaaaatggcagagttcacgtgcaaattcaaaattctcttgcgttaagcgcatttcatggcatccctttatcttttttatatatttgagtttgacaaatgttgatctccatcatgcaggcgcatacaaaagccgttcagcccaggtgtggagatacagaaaactggtccgagtgctaaagaatttcggcttactgtcggatgggtatacgataggcatatatagcacttcctcatacattcctactttcctatacatcgcactgtagcaggagatcggcggccgtatgatatgatatgcttgtcagttgtcacattgtgcatggagtaaacagaagcaactggattttacgatgttctctagcctgtgaaatgttgctccttgattgttctgttcgattgtaaaattgcatggcaaatcagatgtggggagtagcacttcatgtttcgtttgctatggcataaacttttagcctttttattattgacaaaattggttatatagcatcgaaccaattttgcctataacttactgtagcacgcagacgcaggagctcacatcctagggaaggatgggaacatgcacagtgcgcacggaaaacggagtaatctattagcgtgtgattaattaagtattttagctatttttttccaaaaatagatcaatatgatttttttaaaaaacaactttcgtatagaaacttttttttaaaaaaacatattgtttagcagtttaaaaagcgtgcgcgtggaaaacgagaggggagtgttgggaacttgctcttgcaaacacagtgtttgatggatccaatcttcaaactggtaagacaattcctcgatctccagttatattcctagtttatcaacttcctgcttgaaattaagattcagaaatggttcagtgatatttttagaaaaagtgtcgagaagacgaaataaaaacatgcaaacaaacatcgattttgtataaactataggatgagttatagagggattcaggaccaagtaattaaagggagcaagaaacgttggtgctgctaaatagctaaatcctagccacaattatattcatctaaaatcatgctcttgactgatcaagctaccacaacgtcaatgctgtctaaacataaatgggcagaacaattcacttcaaactaggaaaattctgtacaacatgcaaccaaaagaacagtatggcatgcatttggcaaactagacatgaaattattaccttttcatggtttgtccagacaggtaatatggcatttcactggagataaaggagagtctctcagacatccttctggcagtcatgtaggtggtgttctgatgagacaagcttccatttttagaataactagtacaacctagtagaatcttcttcttcatgtggaccttgatcatccatgttgtggcttcagggacaatgtagttgccctcgttcaacaagaagcaaacggtgtaagggttttccatgtcaacaatagggaattctggttggacatttggaaggcggttttcacaatcgaggtcccaaagttgggcagcatccagtgtcgcatcttctctccatgttccgtcctcgcaccacgaccacagggttatgctaaaactgccaccacattggttgatgatattgacgaacttgatgccatggtgggtggcacaca

SEQ ID NO: 25927 - DNA, 2176 bp, Oryza sativa
tattatggagttcttgatagctatttagattgaaggatctgatttctttctctctctgatatgctgcatttgggatcaaatgtatgcaagcaaagagatggggtaaaaggggacaagtttcagtgcgtgacaggggaggggctacagaactccaatccaccgtaggtttgtttacaagattagtcatagcgagggatgcacataaataagatctgtactggtatactccatcccttctaaacaaaaagagactaacctaagagagtccgacatagacaacccgcttctctctcttatgttactgtcaggggagtccgtctttcccgaaactaaggccctatttagttgggaaaagtttttgggtttggttatcacattggatatatggacacacatctgaagtattaaacgtagtataatgacaaaataaattacagattccgtcagaaaaactgcgggatgaatttattaagcctaattaatccgtcatcagcaaatgtttattgtagcaccacttatcaaatcatggcgcaattaggcttaaaagattcgtctcgcaatttacatgtaatatgtgtaattgattttttttttgcctacatttaatgttttatacatatgtccaaacattcaatgtaacagcgcgattttttttccagaaactaaacagggcctagacccctgcatgggccacccatgtcatactcatagaccatctatctgcgagacagcgagaggtagtgtagcaaaacggctccgtgcaccttgtcccgaggtcccacgagtgcaccgggtccagtgcaccaaaaccaaaccaaaaccccccacccccacccactccgctcctcgtcctcctcctcctgcaagcttcctccctcctcgcggccatggcggcgccgttcgtctactgccgccccaccgacgacggcaccagttcgtccagcctccccccacctctccgcatctcctcctagctcgatcggcttgctagctcctcggccatgtggtctaatggcgatttctcggtttgttcgcaggtgagagcgctctcctgagggcggccttcgacgggaacctcggacgcctcaaaggtaggtttgcttcctctcctcctcctcctcctcctcctctccttcttctccgccgcgtcgatcccccccgatcgatgcgtgtatgcattgccccccctttgcatgcgcctgtgttgcgtgcttttcctcccttaggtttgggtgatgcatgtgtgtccttgtgtggagcgcttggcgatggctgtactgttaattgatttggccatggaattttggaatgcaaattctgtatctagcactcgttgcctttgggaatttcccacaatttattttcggtaatgtttatatgttgcatggatttttgaccctgcgtgaaggaattaacagccaggtctatggattactggagatgcatgccatcttatctagaaattgcaagatctgaggcttttatcgtagcaagtccttgcgttggataaatgcgacaacgttgtgatcatctttctattacagttacctctccaagtgctaatgtgtgatgagtagcaggtagtactctacaaaaatgtttttcaagtcgcaagtatgaagtataggttcacatgactcagtgaggttcttgcacgttgcacgtattcgtcgctttttcgagttctacctagttaatctgttcattcgcagattatcttcctcactgtgatgacttctttttgttcttatttgcgagaaggtattttaaagagccttgggatcgagaaaggaaagacccagtatgcagtcttagctcttaacaagcatgggattgggatgctgcacgccgtggcatgccagggccatctgaatgtttgcaagttcttggtggaggaattggggggtgacgtgaatattgctggaaaagaaggttattatctaactctaccatcctttcatgaaattggcggctgccatgtctatgttttggcagtataatgtgccaagtgtactgatgtgctgtttattacagatataacaccgtttatggccgctgctgagtctggtgatgttcctacggtgcagtattttcttgatcatggtggtgatgtaacaaaagcagatgttagaggatgcacagttctccaccatgctgctggcacaggtctcccttg

SEQ ID NO: 25928 - DNA, 679 bp, Oryza sativa
cctttatctctaacattgtcctatcacattgactattgcagtcaaacttggtgttggtggctttagcatgggcgcagctaccgccctttactctgcaacctgctatgctcatggaaaatacggaaatggcaatccatatcctgtgaacttaagtgtgtctgttggtctcagtggctggcttccttgtgccaggtttgtcctagtatgttcacgtgtttaggtatcactgaaatttcagccctgtaaatgatattgactgatatacttgttggttatcacaggtctttgaagaacaaaattgaaagctcacaggaggctgcacaaaaggcttcatccatacctcttttgctttgtcatggaaaaggtgcataaactgttctgtgaccttcattagtatactaagtttctgttacatgttacatttacatgtaatggcattaccaaatcagttggcattgttctaacattcaacttgaggtagtttggggtttatacttgtttcgttgctttatgctagctgaaggcataacctaatataccaggttctgagttttgacaatagcatggcactattcctaggaaagaaaggctacatgagtcttataatccacagcccaaatttgaatttggaaagttaattttaaattaatataggtgtttttttaactttttctattat

SEQ ID NO: 25929 - DNA, 1186 bp, Oryza sativa
ggaaggggaagggtttccagtagttgagaccagctgcaaatatatccattatttatatcagtatctcccaaattttaacttgcaatgatgcagtagagtttttttttttttcgaacgcacaaaagctttgcatgtcgcaatcagagttattgttatctacgcgtggtttcatacaatctacctctttcgccaatactaataaattgtgtgcgtgttaaaaagttcattgtacagtggtggtggaatttgggaagaaaccatcagaaaaatcactacaacataaacagagcaggatatttgtgtacacggtacactacaccaatcagattacttgagcaatcagcttgcaataacccggggctataagaaaggaaattgacaatgagaaactgccatcgttggcatttggcagtaagctaaccggatgcccggatgtcaataaattgacagttatttgttgacagttgggaaaaaaaagtgcattggcgctattgttcatctacgcatccggtaagcacatcaatcacaacgagaggatcgatcgcgacgagagagagaggatggacggcggcggaattggggaggagagggtgggcgtacctggctccgttgtccccgaggccgtggagccagacgatggtggccttgtgcgcgcccttgggcctcacgacatgcgtccgcccgtactcgagcctcttcccacctgcatccaaccatccaatcccacccccattttacgattcgatcccaaatcccccaacgcattcgaatcaaaatcaggagcatcacgaacgcaatcaaatcacagcatcaatcccatcccatttcacgaatcaatccccccctcctcaacgcattcaacaccgatcaatggaacgaaacgtaccaccggaggcgacggagctggtgccgccgaagctgctcatcccgcgaacaatcgccgccgccgccgcccctccgcgtcccctcgcggccacgctcgctccaccacccaactctgcaaacaaaaaaaaaatccaatccaaaccaaggtaaacaacccaaacatcaccaccaccaccaccagataaaggagaggcgcgcgcgcccgtgggtaaaggggggagaagtgaaagtggaagtggcagtggcgacccaacccgacccgacgggacgcgacgcaatacaaagggaaagggcgatttgg

SEQ ID NO: 25930 - DNA, 797 bp, Oryza sativa
attcctgcagctcctatgagaaaaggagcatgccacaattttggactgataatgaagtcagaacacaggatagatgcagggtgtacattagaccagaaagcagaatctgtatcctatctgccattgccttgtagattgcagtagtgccataatcacgcaaaaaaaattcagatattacggatgttggaatttaattttctaagaaatgcaggtgtattttcaatcatacccattcaattggtgtaacaaatacaaactctactttaaaatatataagaacatttcttattcaaaagactatactaagagaaacttaagaagggtcgccataagcagataaattgtatcataaaaacatgccacacaccatgaatccgaggaccaaaatgtcataatggtaggcagagggtttcttcaagttaaactctttttgttgcgccaattgtgaagccacgctatgatcaaagaagtaaagtcctgcaaccatcaaagccggcagaatggcagcaaatatgtatgctggaggaactgaaaacagatcctgaaaataaaaaaagagaagatattattaatgatgccatgcaaaataagctgtgcgaaacttctaaaattgaagaccataaatattcacatctccagtatcacaagcaagtttgactaattacttttgctaccgtccaatgttgcagtgaactcgactcccagggaagtggactgaacagcctcctaggaactcctgaaggaacatcctttggtaacgtgtacgagaatgctgtccaaacaatcaccataagtgg

SEQ ID NO: 25931 - DNA, 948 bp, Oryza sativa
cgatctcatcgtgtattccgctacgagcttggagaagagagacgacttgtcctccagtagcctggtcggcgtgtcgcgctccacggccacacctgcaaaagcattggcacggtgtttcggtcgtcagacagacgcgacaaacccatacaatatgtaagataaattgggattggttagttggaactgtggttattgtcgttataaaatcggagattgattagtggcatctgtgattggtttgggacttggaaggcgaactaaactcaccgttgtcaaggagcaagaccatgtcgctgtcaaggacggaggtgatccggtgcgcgattgtgatgaccgtcgcgtcggaaaactgctgcctgagagttttctggatgaggttgtccgtggcggtgtcgacggaggccgtggcctcgtcgagcaccaggatcttgctccgtttcaggatcaccctcccaaggcacaccagctgacgctgacccacgctccagttctcgccgttctctatcactgcaaccaagccaagccaagccaaatcgggagaatattcaccaagaattaccaagtgtaaaagtagactttgaactgcatgattctgaacaggaaaaagaaatgagtccagatgcagagaaccgaacggacctggtgaatcaagtcgcagctccttcctcctaacttcatctcctagctgacagcgatccaaggcctgaaaaggaagggcaagatattcataaatcataatagaacttcactgcaagtccacaaatagtatgtggcagctgacaatggtgaagcatgtgaagactggaactacctcccagatttggctatcagtgtactctccaataggatcaaggttggttctcacggtaccctcgaacatggttggctcttgcgggatgatgcttagcctggatctcagatcatgaagtccgatggtgcagatgtcga

SEQ ID NO: 25932 - DNA, 3469 bp, Oryza sativa
  unsure (1)..(3469): unsure at all n locations
ctctacattgtcaatttttttcagattttttcacaactatttgcatcgaatttagaagaaaaaggtatacgaggggatatccctcgagggattagaatccactcccccaccatgccatccattctctcaaggtcacaacagctgcttatatagcaaagaagagagctggaagagctagtagctagcaagcctccttatttttgcacttgcaaactgcattgtttcacttgtctgcagctagtttcaatggctgccatcaaagaggaatccgactacgacagtagccggtcttcgctgacggcgccggactcccgccggagctggatcagtgacattggtagctccagctcggtctcggcgcgctccttcggcggcgacacaccggcgtcgtcatgccggtacaagccccacaaggcgaaccaggccgagtgggaggccatccggcgcctccgtgccggcgccggccgcgtcgggctggagcacttccggctcgtccgccgcctcggcagcggcgacctcggcaacgtctacctgtgccggctgcgcgagccgtggtcatcgtcgtcgatgacgacgacggcgggcggttgcctctacgccatgaaggtggtggacaaggacgcgctggcgttcaggaagaagctccggcgcgcggaggtggagcgcgacatcctccgcaccctcgaccaccccttcctgcctacattgtacgccgacttcgaggcgtcgcactacgcctgcctcgtcatggagttctgccccggcggcgacctccacgtcgcccgccagcgccagcccggccgccgcttcaccgtctcctccaccaggttcgtactcgtacacctccacacccacgtcgaacgtgtgaatgcatgcgtgcccccacccatgacccattcatgtttagttactgctccactagcctttttctttgttttaccactactactactgtggtctgaatgaatgtatctgatgatctgaagagtgggggagaaatgctctgttccagggtcaagctttgtttcagtgtcacttttgcaaaagcttagacctcagctttaggttagtgatcgtctttccatgttgcattggggctttcatccaaatcctttttgtcttgctgtgccaatctaaacagatttgttggcaccacttggggttcatactaagctaatgatttagtaagatttaaacccaaaccattgtgcagcttaagcttttgatactcacaagagggggaaaaaagagagaagagaatcttggggttattagcattcctagtctcttactgtggatggattatctttgtcggacagtgaactgatgttgctgaaaacgaattaacattgtgttgtgtatggcaggttctatgtggcggagactgtgctggcgctggagtacctgcacatgatgggtgtggtgtacagggacctcaagccggagaacgtcctggtccgcggcgacggccacatcatgctctccgacttcgacctctccctcaagtgcgacgtcgtcccgaagctgctccgccccgccaggagcgccgccgccggtggcaagccgccgctgccgccgccgtcgtcgtgcgtgccgccgacgatccagccggtgctgtcgtgcatcttccgcggcgtgcacaagtgccatcacgccaaggagtgcgccggtgncggcgcgccggcgggtaacaatggcgacggcgacggcaacgacgaggaggcggagaccgagacggcggagcccnaggtggtggtggtggagccggtgncggcgcggtccaagtcgttcgtgggcacgcacgagtacctggcgccggaggtgatctccggccagggccacggcagcgcggtggactggtggacgctcggcgtgttcatgtacgagatgctgtacggccggacgccgttcaagggcgagagcaacgagaagaccctcatcaacatcatcaagcagccggtcaccttccctcgcctcgccggcgccgccgccgccggcgaatgggaggagatgaagacggcgcaggacctgatgttgcagctcctggcaaagaaccccaagaagcggctggggagcaccatgggctccgccgaggtgaagcggcaccccttcttcaagggcgtcaactgggcgctcgtcaggacagtccggccgccggaggttcctgcgccgccggcgccggcgccgaagaaggtgatgacgatgagcaagaaggagcggcaagagccgtacaactaccgaccggaaaaccacttcgattacttctgatcaagtagctgccatgcatgagcatgatgcatgatgcatcttggttaattaattaattaatcacttgtaagaggggagattagtagtgtacatagagtgctaatcaatgagtaaccagtgttagtttctcagtgagtgagtgagtggcaggcggccatgggtggtgggggtctgcatgcttgctctcatggcgcggttgcgcacgcgcggttcgtcactgggttgggctagtcggctacccgtgcgcggcagacacgagcccccaccagttccgtcggtcgatcgatcgatcggtgaagcagcagctttgtttgcgtggccccggacaccgtgcgcgcatctcccagccgatctcgctgctgcgcctgcgcgcaatttcttgtgccgcctttcgcggaaataaagccagccccctccccgcgaagtgtctaagtaacttatcctaaaatataacaactttttctaaaatataataacttttgacttatcttgtcctaaaatataacaacttttagctaagtgtccaaatttataggtaaaaatgcttatattttgggacagaacgagtatactctatactcatcatggaaaatgtcaagcatgtctgttcttaggccgcccaggctagtcgacgaaaactccgttaaattttaatactgacgagtaaatcgataataaaatttaaatttttatagtaaatactagttatattgaaatttgctcatgcttaaaaaattttcgggtaggcttttttcccctaaaaccaagtgcaaacgttgctcatttgttcacatttatctctataaatatacactcactatctatataattgtacacatgcaatgcacatcttatctctctggcctccgtaaaagattagactgaacggcttattattaataggtatatagcatgtcgctaaaaagaatcattaaccataaatataactactcggaacataaccagctgagtgtcagctagccatacaatttatgttcaacggtgccaatgatggcaatgctaaattttgctataaaattgaaaatgcgaacttgaatttcgatctatggaagcaattttgccaatagtttaagaggtcactaatggccaaagttgtaaacagttctgatgacaagtaaataggtaaggagagtagctaaaaataatagtgatgttcaaagtattaaaaagaatcaactcg

SEQ ID NO: 25933 - DNA, 754 bp, Oryza sativa
gctgacattcctgctggtcttcagaaaatggagagagcattcaggtcttgaagtatggagtgaacagaagtggcagtatcaaggaggaacctaaatcaagcagtggtgcccataggcttgcgaccattttgatgtatctttctgatgtcaagcaaggtggtgaaactgttttccccagatctgaggtaattatatcctcaccaggcctactttttcagaacaccttatcagaataactatgcactgcttatagtctaggcacatgtaatttcttcagtgatttgattcagttgagcagaagatcttatactaaactatgattttagatgaaggatgctcaagctaaggagggggcaccatctcaatgttctggttatgcagtgcgaccagccaagggcaatgcaatactgctgttcaatttaaggcctgatggagaaacagataaggatagccaatatgaagaatgtcctgtcctcgaaggagagaaatggctagccataaaacatataaatttgagaaaatttgattatccaaaatcatcacttgcatccgaggatgagtgcacagatgaagatgataggtgtgtgagttgggctgctagtggtgagtgtgacaggaatccggtgtttatgataggaagctcagactactatggctcttgccgaaagagctgtcgagtgtgctgattattttgcaattttttgctagtagaaatattgatgtcataggcagagaatggtgtaacaaactgtat

SEQ ID NO: 25934 - DNA, 3811 bp, Oryza sativa
cacattattattccaaactcagtaggtgcagttggctagttgttaattaatttctgcatcaagattatatatatttcagctcccagtcagtttagcagattatatatattccagctcccagtcagtttagcacaactaacaattgatgttcatataataccacaacattgcaattaccgctaccatgactcgtggatacattctttaatttggagatatgaattgaaatcggtcgaaatgatatataacgtgtaatcgtctatactcctttaaaagataccagtggtaataacagtgaatatgttactaccacagtgccaccccaccactccttaagcagtttttataaatcatctcttggtattttctgatattatggaatagtccatttgattcaaatgagtgaataccatatattttaataaaaaaacaagtaaaaaaatatattttgtgtaaaacatatcataatatattttcttttacacctagcaaaacacgagcatttttactagtacgcataaaaatatgaatgtgtggcatggcagtgcgagagcatggaggcggtgcagcggcggctgaaggagatgggcgtccggtacgtgcagcggcgggtggaggaaggcggcgtgtacgtggaccagatcttcttccacgaccccgacggcttcatgatcgagatctgcacctgcgacaagctccccgtcgtccccctcgacgccgccgccgcccactccatcttcgccggccgctcgccgccgccgcccgtcgcctgcaagatcaggcccgtcaagcagccgtcggcgacgaagctgggcagcgtcgccgccggcggctgtgttggggaggtcatcgtcgtcgacgcgatcaacggcgccgccgccgccggcggcggcggcgcgatgagctgaggagacttgtggcattgctgatccaacgaggaatcattgatttgatgaattgttgttcaactttaattttggtcgtgatgatgattaaggtgtatgtaattcgatccggtgattaatttgtctctcgctgcccaataatatttgcgtaaattaattaattacctgtggtcgtcactagctaattcatcaacgtacgttgagtgaccagagattagcaggacaaactgaaactagcgcgcgtacgtaatatttgattccctccgttcaaaaatatatgacgtattttttaccagtctaaaaacacaaaactttgaccgtaaatttcttttgtactatttcgtctatggttacaaatcatgaatccaccaatatttttttaggtaaaaatctaaatattattaaattaatagcttgtcaaagcttaaaattgggcggtcgaaatacatgcatcttatataaggacggagagagtatacgagtacgcagcagctctgctagcaattactgtctttgaattcattcacgagatgtaatgtttcctttgctgctttgcacacgtagtaggccgcactgagtgagcaagataagataagataagaaaattcctcatttttgcgtgcgcttcgcgaggtgcaaagctatgtgttttctaagaaaaaattgtagaaaagttacataaaaaatatattaatctattttttaaatttaaagtaattaatatttaattaatcatgtgctagtggctcatcttactttgcatgcatatacatatcttcttcaatttcctatcctcaagtacagctgtagtatgtgttatatgcgtggtatttatacattgttcttgtaataatcagtgctgtcagcacattgtattacgttgttgaattcacagacaagtagcacctggagatcagttgcgttcaaaatgtgtaaatccagtaatatattgtgcaatgaagttagcagaaatgacatgcatgcacgcatcactaacatgccacagaactgataaaatttactattgggatggaggcatgtgacaagctaatataataggaacagtaccacgcatgatccacactgctcatgctccaccattcttaatttcaggttgacgatatattggtatgcatgtgatcggatgacagcttgtacgtagtattagtcatgttgcttcaggcagataacaaatgtattttaattcgattggtcaaagccgaatttaaaatttcccagcccaaccagcctgaccgaggtttttaattttgggcttcccaaaaaagaagtgaagattggagccgacgcgctgtacactttacacgagggaaaagtgcaatttgcatttcttaattattaatggtggagctataaatttacgtccctcaaccgtaaacgggatatatatagcctcctccaattcttttttttttcttttttttacgaacggccggtcagaattgactggcgttatattgatagaaggagaaaaagtacagatagccaaagggctaagaaagagaaaaactgtacatgacaacatgcaaacaagcttgcacgtagccttcctagctcctcatggcaacattctcccaatgtgtttagcgctggtcatacttcaccaacctaattcctcttggatgcgactaatcatctggtgtgctgtcgcctcctttgctctgaagattcttgcatttcgttccttccagatttcccgagcaatgagcaagaagagagttctgagtcctttctattttgttgcttccgggtcgcttgttccttgtgtccaccaatttaagaggtttctacttatgttccatttcgggatgatgtgcccttggtgtagccatgtgagaatcccaaaccagatttgctttgagaccggcattcaaacagaagatggtcgattgtttcgagatttcgaaagcatagctggcagaaataattatttggccatcccttatctgtaaccggtcagatgtccacacccggttttgaagaaccaaccaaaaaaagattttgcactttgccggagcccatgcctcccaagacaactttgttgatggcgagagtaccattccattgaattggaattggtacgtggattttgcactgtattccccattagttgtccattgccaaacaatcgagtcttgtaccccctctgttagttgtggggtgtcacgggctaaaatttcccaaacatggaaagaattcatcaagaaggggaatggtgaggctgtggcggatgtcgttaatccatcttccttgttgcagggcgtcctggacggtgcggggttcctctttgaatgcctataaagattcggtgcttgactttttaggctttggccaccgatccaatttgattcccaaaagctcgccttttgtccgtcaccaatttggactctcgttgatgccgcgaaaagatccttatccaattcatcacagggtgtttcagtccctatccaaggcttctctggcgtcctccattcgaaccataaccatctcagtcgaagagctctggcaaacttttctaagttcggaacccccaaaccaccgtaccggacatgtgagcaaactttaagccaattgaccttgcattttccgccatgcatattctcgttacctgcccacaggaaccgccttcttgctttgtcaatttcttgaagagattgtttcgacggtttcagcaccttgagggtgtaagttgggatggcacttagaactgagttcaccataattcggcgcccccccccaatgtacaacaatgatggtttccatcccgagagccgacctttgatcttatcctggagaggctggaaatgcaccttacgtaggcggccaggagtgagtggtagccctaggtaagtcagtgggaagctggctcttgcccccgaaaaactacg

SEQ ID NO: 25935 - DNA, 39365 bp, Oryza sativa
  unsure (1)..(39365): unsure at all n locations
cagatttggcaggataacgatcaaacaataagaagtccagcagtaaagccgtttgggaagacgtcaaagcatgtcaagtgggataagttggttcggttgagaaacataattcaaaggcaaagttatcgaccctcgcatggaatagcagaagtagctagcacccggagagcaggaaagctaatatgatgcagttagtgacaagttgtcaaacatggtatgctggataagcgtgatatcatagtccaaagcattcagtggtaagttagaagtaaatgacaagcatgatattctcatgatgacaagcatggtatcctagtaatgacgagctgatctcgacgcatgacatgaagtgggtaacttgtatgaggttgactccgaagatatgaatcatgagaagttctggaacggaagcatcattaaactaccgcaacctagtctgagtcagctaaaaggtgcaccctggttcaagtcaggtgaagagaagattccatccgcaacaggaggtcaagccaagcagttccgagtcgtgaagttttgctgaaagtttgtgaagacggagcggaagaagtcaaacaagaagagaagaccacccaacctatcttcttgctagcctcctcgaatctcggggacgagattcttgtaaggggggtggatttgtcacgtcctgataaattcatcccgaattaaaaatcattttccaaaaggaataatagaattaattaaaattcgaaaagaaattggcaaacactaaaatacgtacaagaaaaattcaaatgtggcccggagaatttttgttaaattctccttagtctaaaaagagccctcaaattttagtggaattttcagagcacaaataataattattaagaaataaacaaagttaaaaaggttttataaaaagaaaagccctaaaaagtcttttttccccccccctccccctcttgggccggctcggcccagcttcctctctctcctctcccccgcggcccatccggccttcccccgcgcgcgcgccgctgacgggcgggcccgcccgccaccctcgctgacgggtggggcccacccgtcatcccctacctcgcgccgcacccgccgcccgcccgtgccctagcgccgccgccgccgcggattccgccgcatcccgccgtccccgcgcgcattaaagagggggaaatcactccccgtgattccctccctctttccccccacttttccctctctctctccctcggattcgttcggatttactcccgcgaacttcgccggcgcatcaatggaaaagagatagccgcgccggtttccttcctctccggccgccctctctcactcccaacactatataatcgctccccgtgcctccctcctccgtttccgccgttcgccgctcgctctccccgtcggaatcgagctcgcgccgtcgtcctctctctccgccgtcgccgccgagcttcggttcgccgccgtcgtcgccctggtacctcctgccgcttcggcatcgcctccttcggcttcgccgcgtccccgtcgacctcgtccacccctccgtttcgcccgccgcccgccggaacgccgccgtcctcgtcgacccgaaccgcgccgccgcctctctccgcttcggccgccgtttccgtcgtcgccgtcgacccggggtgagccttggaccgccatttcgcttcccccttccctcccctctctcgggcgccgctccgtcgcgccggaggtcgccgccggcgaccatcggggcgcgggcgcgccgcctcccgtcggccgtgccggcgaggccgccttcgggcgcgccccgcggctgccatgtggggcccggccgtcagccgcccgcgccctcgggtgcggctgacgcgtgggacccacggcatcggccagcgcaagccgcgtgcgcccggtccaccgtggaccgagaggctgccgcgtgggccccactcccgtggacccggtccgcgcgcccctcccctcggctgacgcaataaatccgattttaaattaaaatttaaatgaagaaattcgtaaatatccatttaaagagcatataaacttcaaatggccatatcttggccatttgaactcgggattggaccgttcaagtctctaatttttccttaagaagtcaagaacccatttttgtgctttgtttctgcttgttatatggggtttagtagagtaaaagccttttcttttccgtcggtcgtgtagacgctgcagcttcggaagatccgctcttcgtggaagttgaagccgacgtttaggaaagcgagcaaggcaagtcacatcatccttgaacatattgaatcccagtttataaaattatgttgatttaaattattgcattatcgctttatttaaattcccgcgttatcactgttttatctagccatgcctatttacctttgttatgaccttattattgctattgttattattaccttgttcaccctagaataaacaaaaccccaactagtgggtactctattcgtggttccactagtataaatttaggtagatgcttcgctgactaattaggcaacattaggtggttttataactttagactttgggaattctcatatcatttggacactatggaatagttggcttatgttggaattggacacacacctcccccctctattcaaaaacccccaaaatggttttaggctgggctcgaggtgcgtggttgggttttgctagtcgtacctcgggtactataaggattaagctcgggcctctgttgcaaagcactaccgtacttccacatgtctagtgggtaaggcttagtttgtggctcagtctggttataaacaaaagtacacggattggagatggatgaagtcgggggtcgatggacattctccatggaaaatgaaggctacacgagctgcggcccggtagtcgagatgtcatggcacagggctggtgtcctgctgctagggggctcaattctgcctgcctgtcccgggggttccggccgtaggtgggattgggtcggtactcttgtggctaggatgggttgggaactatgtcacgtcttccgtccgtataccgtggtggtatgtggcacgtggttacacgtgaggaagatgtgtcttgtgggtaaagatgtacacctctgatcagagtataatctattcgaatagccgcgccctcggttatgggcaagccgagcaatgtacccaagtcagtgttttaattcttaaaatttgcttaacaactaaaatgtggaatggttggcctgggttggcttgggacgagctgggacccagggtcgggttgccagttcggtctgaatcatcgtaggccttgggttaaggcaggttcgtgtgggttcacggccttgattaataatattgtgtagctctaggatcgtctttataaaatagctttgggcaactaagtgacttttaaatgctgtttactgcaaaacttaacccctatattattatccccttgtaccccccttgcattaattatgcatctccgttgtggcttgctgagtactgtggttgtactcattcttgctctatctttctccccccttcagtaagagaagctttggagaagatgtcttaggtggagtcctggcttataccccagttgagcgcctgtgaagatggagccgtaggcccgctagtccgctgctgtttatttttgattgtcaggcctgaagcgcctttgtaataatgtaaatattatcgatataataaagatgtgtcttttatatcatgtttgtgtggtgttccccggcttttcctgggacgggggttaatacactagcgttcgggaaaaggcaattttcccggtcgcgacaggaggccaattcatgagcacttaccttcaccaaacaaaagccgattttatggtaaaaatcgggttaatgaagaaaaaagggaaggaaagcgcaccaaggtggaggaaaggacttcggaggtgattactatcaaaataggatctcatgatgtgcctataccttctggagatggagttggaaagtccccaagcaaaaaatccgaagccggtaccagctcctcgcagtcggccagtctgaccaggccctctggccggtctgaccgcagccatgttgccggtctgaccgggccatcaggccggtctgaccgccgacctgacgacggtctgaccgacgcctcaggccggtctggccggtctgaccggtggcctacagccggtctgaccgggctccggtgtcggtttgatgagagggctgcaaagggcgatgtgggggcttcatcgtcttcaagcaaagttaatagaggacattatttgcctcctagaacagagccgaatcctaggtggatgcctaaggatttgacggctacacaaaagagaaggttgcaatgtcttcgggcccaagaattaagggagaaaaaggccgaagaacaaagagataaaaggttcaatgagttacgaccaccaccggtatggaggcctaaatccatagagaaggcaaaaccgattgatgtagaggagaaggaagaacaatcggttgacaaagataaatcgtctccaaaggaggacatggatatcaacatggtgtgtatgttgcctatggagttttgtgctatggatgaagccgaggttgcccaattctcattaggtcctaaagatgcggtttttgagaagcccgatgagtcaaaccgtcacatgaagcctctctatctcaaaggccatgttgatgggaaaccggtctctaggatgctagtggatggaggtgccgccgtgaatttgatgccgtattcgctattcaagaagttggggcatgaggatgatgagttgaagaagaccaacatgatcctcaatggcttcaatggtgaaccaatggaggcgaggggtatcttttcggcggagctcaccgtgggaaacaagacgctaccaaccgctttcttcatcgtcgatgtgcaaggtaactataatgttattttgggtcgttgttggattcatgcaaattgttgtgtgccttctaccttgcatcaatgtttaatccaatgggacggcgatgatgttgaaattgttcaagcggatacatcggccgaggttgcaatggccgatgctacttttgagtggcgttatgggaatatccaatgcttatcggggagggatctttctagctatgattttattagtatctccgatggcaaatttgtacctatctctgtaaagctggctagtgtagcacggctaagccatataaacttgtataatgaataaagaggctagtttagagtggttacaaaaaagggtgcaagaatatcggtctacaaagaacgatattggagagaccgttgaagattttgatgaagtagagaagcttgggcaagggtttacatcggccgatccattagaagaagtagacataggtgatggaattaaaccaaggccgacttttgtaaacaaaaacatgagagccgattataaggttaagataatcgagctacttaaagaatatgttgattgctttgcatgggagtaccatgagatgccgggtcttagccgtgagcttgttgagcatcggcttccaattaaaccgggttttaggccttataagcaaccacctcgtcgttttaatcctttattatatgaccgagtcaaagaggagattgatcggttgttgaaggcggggtttattaggccatgtcgttatgcggagtgggtttctagcatagtcccggtggagaagaaggggagtggtaagattagagtttgcttagattttagagatttaaataaagctactcctaaagatgagtatcctatgcctatagccgacatgatgattaatgatgccttgggtcataaggtgattagcttcttagatggtaatgccggctacaatcaaatttttatgacagaagaggatatgtacaagacggcttttaggtgtccggggtttgttggtttatttgagtgggttgtcatgacctttggtttaaagagtgccggcgcaacgtatcaaagggcaatgaatttgattttccatgatttgctaggtattatcttagagatctacattgatgatattgttgtcaaatcggatggtatggaaggacatatagccgatttgatattagcttttgagaggatgcgccggtatggtttgaagatgaacctacttaaatgtgcttttggtgtgtcggcggggaagttcttaggattcatggtgcatgagagaggagttgagattgatcctaagaagatagaaaaaattcgtgatttcaaagcgccgacatgcaagaaagaggtccaaaagttgctaggtaaggtgaattatttgaggaggtttatttctaacctagcgggtaaaatcgatgcttttgttcctattcttcgcttgaagaaagaagccgattttacttggggggcaaaacaacaagaggcgtttgaagagttgaagaggtatttatctactccacccgttgtgcgagcgcctaaagccgaaaagccttttcggttatatattgcctccgaggacaaagtcattggtgccgttttgacgcaagaggaagatggcaaggaatatatcattacatatttgagccgccgtcttttagatgccgaatcgaggtatgttcttatagagagactttgtctatgcttatactatgcttgtaccaaattgaggcattatttgttatctagtacatgcatagttacttgtcaagccgatgttattaaacacatgttgcaaaggccaattctaagtgggagaattggcaagtgggcatatgctttgatagaatatgatttggcttatgaaccattgaaaactataaaaggccaaattgtatgtgattttatagtagaccatcatatagatgttgcttatgagggagagatttgcttagttgaagttataccttggaaaatttattttgatggttcttcttgcaaagaaggtcaaggcataggggtagttttgttttcacctaatggcatgtgttatgaggcatcggttcgctaagaatattattgcacaaataatcaagccgaatacaatgctttattgttcggcttacaagttatggagatggttggagctaaatatgtggaggcctttggtgattcggaattggtggtgcaacaagtcgccggagtctacacatgcttggatggatcactaaataggtacctcgattcatgtttagatattattgccaattttgataattttgctattagacatattgctaggcatgataattctagagcaaatgacttagcacaacaagcatctggttataatgtgaagaagggattatttctgatattagaagaaccggtgcttgattttaaatctttgtgcgaaattagcaaaattggagaccagggcggtctgaccggcgttgcacggccggtctgaccggtgaccaggggcggtctgaccggccacatgccgccggtctgatcagcgaccccgagcggtctgaccggccctgtgtggccggtctgaccggttttgggcaggatgctgggggcacacttcaatcaatttggaggccggattaattgaaaattcggacatttgtgcccaggatacagaagaggattggagaattcctttgattcaatatctaaaagatcccacacttaaggttgatcgaaaaattcggcggcaagcattcaaatatacattgcttgatgaagatttatatcgccgaaacgtagacggtgtcttgttgaagtgcttggatgaagatcaatctaaagtggctattggagaagtgcatgaaggaatttgtggaactcatcaatcggcccataagatgaattggttgcttagaagagcgggattctattagccgaggatgattgatgattgcttcaaatattataggggatgtgaggcttgtcaatggttcggcaatgttcaattggcacccgccgccgtgttgaaccctataatcaaaccatggccgttccggggatgggctttggatttcattggtcaaatttatccttcgtcatcaaaggggcataggttcgtgctagttgctacggactacttcaccaagtgggccgaagccgtgccttcgaggaatatgactcatacggaggtaattgattttattttgaagcatattattcatagattcggtgttcggcaaacattgactacggaccaaggtgcttcttttatgtctaaagaagtgaatagttttaccgaatcttatggtattaaattgttgagttcttctccttactacgctcaggctaatggtcaagccgagtcgagtaataagacattgctaaaactagtgaaaaagaagattgaggagcacccaaagaggtggcatgaggtgctttccgaagcattgtgggcgcataggatatctaaacatggtgccactaaagtcactccttttgagttggtttatggtcaagaagccattttaccggtagaggtaaatcttggttctcttcgttatatcaagcaagatgatttgtcaagtgaagattacaagacgttgatgggagacaaccttgatgaagtcgtcgacaagcgcttgaaggcattggaagagatagagaaagagaagaagagggtggccaaggcatacaacaagagggtgaaagcaaaattgtttcaagttggagacttggtttggaagacaattttgcctttgggtactcgatccaaggagttcggtaagtgatctcctagttgggaaggtccttatcgaatatgcggcattgttcgggggaacgcatactttttggagacactttaaggggagcgttttcagcgagcaatcaacgggaaatacttgaagaaatacttcccgagtgtttggcaagatgcttaggaggtactatggccggtaattggattatcgtcctaaggccaaaaacatgctctatgcttttagattcacgttgttcaccaaaaaggtaggggggcatgtgtttacacccaaatttggcacctaggattaaaataggaaagattaccaaaatttggaaatctaccggtttcctccgagtgggccggtctgaccgccatgtgttgggcggtcagaccgccgattgtaggccggtcagaccgacggtatgtggccggtctgaccggcaggtccgagttcgaccctgtttcgtcgggtttcgaggtttccttgctcgggaaggcatgtttcggatttcctttggattctaccccaagttggacgtggaggatggcctgtagagggcaagaccaacccctatataagggacaaggccggttcattgtaaaaatcaatctactatcaatcaatcgaatcgctcttttcatattgcttttagttttctcttagtttgtccatctttgtcggtttgcgccgtaaaccgtccaccgccgctgcgagagtgcgacatctctttgtaggtttgtcctgaaaaccttctgtttgcccacgagacgggtagttatctaaaaatcggctccgctagccggtttagttatcgaaacccatctaggtttagctcttcgctagatcgaggtggttggcgactctaggatcaccgcaaggcttgaggtgctgcgatcatgcttgtcaacttgtcacaaaaagttaccaacaataaccagaggaaaaaaatacttctcctttaggtatatttttactcttacatataccatatatttttaaaaactttttccttttgttttttattttcctatgatacatgtaagggtaaattggacaaatcatatagattttgcataggaaggtgacatggcatgtcaatgtggcaattttggtgggaccaaggactatatcagcccacatgacaaatttaaagaacttttttggacaatatgaaagattaaggactaaaataatccaggagcgaaactttagggaccatattggctgttctccctaaaatctttgtcagctcacaatttccaaatgtcataccaaatttaaaatccgtttgaatttatggcctcctctcaagatgtaaaacaaaactattccaatattgattttattcggacatcgtgtgatattggaaatttcgggacccacccattatagggacattcctaatgtatttagtaaatctaggctgcaaataatattctcatataaattaacacccaataatatattatttccacaactatttttcaaaaagctacagccccgtggaggtacgctgtcctaccgtcaaggcgtactggagttttatgtaaacattttaaaccagtggtgtctacatgtgagagagatgaactcctctaatctttcagccaagcactaaagttttcagaaattacgtatagatcctagtgctccttgtcagtgattgatcttgtttttgtaacatactaacatgtacctcagcttttccactaattactgtttgaggcggcgtggcgacgggctaccgaggcggcagagagcggtgccggcggcggcagcgctccggcgagggtggccctgaaattggttgagggaatgagtttgggggcttctaggagctcgctggcgcgagggctaggtccgggactcaccgaggcggcgactcgatgttgaggatatggcggccgcgtcctggccgacgcgggcggcggtgatggcgcggcgttccacggcaaaccacaggtgttcggacttcggatttgggtatggaggtcgagtgggttgtggggagttagctggcgcgaaggctcgattcataggcgagggaggagcgaaaggcgggcgcgtcgagcacctgtcgcgacacgttcggcaggagcacggcggcagcggggaatcacgtcagctttgtaggcgtgctctcagcgtgggacacggtatcagcagggcagcgagaaggctggcgcggggagctgcaggtggcaggcatggtcgggcggagcggtgtcgtgttcgtgtccagccgcggggcggcttcgattggctgaggccggcgcccggcgccgcggcgacgttagccttgcagtttcagcgtcagctttgcagagcggagacagaggcggtcgggctagtcgcgtctcgtcgtttcgggtagaggggcagtgttggttcgccacggcgaacggcgaggtcagcggcgatctcgacagggcatcgggcacggcggcgtcggctttacaggcgcgggtcagtggctttgcaggattggcgcgcagcgggggacaaggcttttggccgcgacgcgtcgtcaatggttcgttgtgctcatcgcgcagtttgcacgccaagtgcttgttaaaatgcctgcaaggagggagagagaaaggaaggtgggggagggatggggcactggtgcggctggcatgtggggtccagggctcctgggctcaccgctcagagaggaggagaagaaagagaggagaggcgattttcctgaaaattttggtgaaaactgagagtgtgatcgaattttcaggatatgctacagtgtagcaaacacctgtgcatagataactgggaataaatgcgatcatgaacttcttttggtgaatttttgagacttttgtcatgtgtacttctgtgaaaattcagagaagttcactgtttcatttcaatttgaactggtttcgattgttttgacatatttaattgacgtgcaaaactaaggtacaaagttgtcaaacttttccagaacattattgaaggtgtctactgtttataaaaaacccatatttttactcctcttagatttaatactttcacttttctgtttttcaatgcaagttcattttctgcagccgtaacaggatgcccagcttgctggcgctgcagcagccagcagaaacgatcaagcccatggagcacagagaaaacgctttggaaataaaagtagtgcatataatacttgcagagaagcagccgtagaataactgatggcattagatgaagcacccgatattcttatacggatcaggtgaccgattacgagcaatctccaaaactaatcctacctggatgggacaaccagcgtttcactactctgcagaggccacaaaccacatccagtccaatgaaccaagaacatcttcagggatacaaaactaacagccagcctaatagcagaggcaagaaacaaattatagacctgatgtcgactggtctcagactctcggtcgttcgagaacccttttgctccatgtatccaggcacctcctctcatcagcaatttgctccatctctgcaggaaagaaaccttattagttggtgatattatttggtaccacttaaattttggtgacaggaatgtagttttctgacaaagtcaattactgaatataaaaaatatttgcacagctctgcatcaacagttgtccaagggatgcctcaaaaatctgtgcagattatcagtcgtcacgcagaagcagaacatcgtggtgtgctaggtctgcttcttgcactgggccatgaatccggtgggttgttaggtggtgtttaggaaggagggactaaactttagtcccttttacaaaagcaagtctttatgggagggactaaaatctctcctctcttagggcatcagcaatttatgctatcgacatgggtattagcgtgggcccagatgacaggtggtaatagagggagacgcgctccacattgcttatttccgtgagttggcggtaaggtggggttcatggggtaaaaaaatcgcagcaaggacagagcatgcatgcgacggttgggagaagcaatggtagcctgttttttttttttcttttgctatcagaaaacactgtatacatacatattctatttccttgcttccggcggtaggggtatgacccggttgtagttatgtactactcccacaatgcttaataccacgtagtaattaagaatgtatttattgcttactatccggtttgtgagcgtattgctgatgcccttattctcttattaagatgcacaactcttttgtattccaaaaaaaatcctgttgatagtagccacggtgccattaggtaccgttgaacctaacagatatttatgcatgtgtatatatattgctatatagataaaattggtgccgattatagacccaaaagcaagaggtgtataatataatacagaccacacgaccaaactaagaatcgatcaaatagacaaggcatgtctccaaattgtcttatactatttccgtaggttcagccgttcaggagtcgaatcagcctctgccggcgttttctttgcacgtacgacggacacacatgggcataccatatagctggtccatgacattaggagagagaacgtacgtgttgacctgtagctgagatataacaaggttgattataatatcaccaaacatgaaatcatccaaggatgacccataactatcactactatagtactgcatctggtaatagaaattgtatagactctatttcgagcactaccacataacgcctgcaatgtgacaccctacctgttcactaatgtgcctcttcccacacgctttccacccgtactgctcacagctttaagaaccagaacaaatgagtaatattagtgtcggttcatggctaaaaccagcactgatgtacatgaccacatatgtcaaatgctgcttctaggcatgacccgctcttactaatacctactcatcgctagaagaattttcggctgataaattttcaatttaagcaagagttatccgcattggttcataactcaaactgatggccccaaccatattagtgcaaatttcacatatgatcataaccttttcatatgaaatcgggtcgaggtgaactttatataaaaactgtagctgtagatgatacctacaattttatagttcacaacctttttatttcaagtcatttaaatgcccaaataggtgtttcaaatatcagatagaaatgttcaaaagtaaaaaaggtccatattatagcataattaatatgtaagtgagttggaaaaaagataagtacgctgagagaggtcggggatcgaattctggtgtaaaaataaaaaatgtatgtatttcactcataaaaattggtagcagctagtagttgggactctgtatataccggtaaggatgggatggtagtagaataattccttttttgtttttagttttttctggtcccaaatttaaaatttggatcccttacttgtaccaactaatattaatgagtgttgagggtagtagagatgcaactttaccatactccctttgtttcagattataatatgttttgactttggttaatatcaaactactttaaatttgactgagtttaagcgcaaatatagtaatatttataataccaaattagttttattaaataaataattgaatatattttcataataaatttgtgttgtgttgaaaatattattaactttttctacaaacttggttaaacttgaagcagtttgactttgaccaaagtcaaaacgtcttataacctcaaacggagggagtactttttttgtgggaacaagtttacaatgtttaataaaagcacaatccatcttaatgttttcaagctgaatattgtaaaattcatggataaaccagcttctaaatgtttaattgggaaaatgtcgaatgacaaattaatatttttaagtggagggaagtattaatatttcaatatcgtactaaactgtgggatttattttctaaaattttataccctgccaattcacgtgttgtagatctttttttttcactaaccgacaccaggtatatcaattttattgaatatagcagcaaaaagaatgtgttgcacttgtaaacaaaaagcaaactgtacataaaaaaatgtactaatgaagttcataaagatgctttgcttaatgagggcccaaagttttgatgaccttttgcttgatctcgaaattaaaattcaagtactgttaagggaggtcacaccaccatcaattttcagcctgaagaaacagttaaacaacgaccccgatgaccagtctactgctctccacatactagcagcattattgatcacaaaagaaaccaaaataaaaatcagcaccgagtgtgcagagggagacaaaggtgatctggcagtggatatctccccatccatcctcacccgcgctgcccatcactcgccgccgcatactacatcatgtggagagaggaagacgaggaccacagccagagcccgggtcgagatgccaccacggccacaatccacgagcccggcgcgacaccaccgcgcgcgcgtgagccagccacaaacgcccgcggataggcgcgcgcacgccggccaatcctaccacatccccggcctccgcggctcgcgagcgccgctgccatccgatccgctgagttttggctatttatacgtaccgcgggagcctgtgtgcagagcagtgcatctcaagaagtactcgagcaaagaaggagagagcttggtgagctgcagagatggccccctccgtgatggcgtcgtcggccaccaccgtcgctcccttccaggggctcaagtccaccgccggcatgcccgtcgcccgccgctccggcaactccagcttcggcaacgtcagcaatggcggcaggatcaggtgcatgcaggtaataacctactgacccaacacacattattcttcttcttcttcttcttcttcttcttcttcttcttcaacattaaccaataattcaattatcgtttatttaggtgtggccgattgagggcatcaagaagttcgagaccctctcctacctgccaccgctcaccgtggaggacctcctgaagcagatcgagtacctgctccgttccaagtgggtgccctgcctcgagttcagcaaggtcggattcgtctaccgtgagaaccacagatcccccggatactacgatggcaggtactggaccatgtggaagctgcccatgttcgggtgcactgacgccacccaggtgctcaaggagctcgaggaggccaagaaggcgtaccctgatgcattcgtccgtatcatcggcttcgacaacgtcaggcaggtgcagctcatcagcttcatcgcctacaagcccccgggctgcgaggagtctggtggcaactaagccgtcatcgtcatatatagccttgtttaattgttcatctctgattcgatgatgtctcccaccttgtttcgtgtgttcccagtttgttcatcgtcttttgattttaccggccgtgctctgcttttgtttttgtttcacctgatctctctctgacttgatgtaagagtggtatctgctacgactatatgttgttgggtgaggcatatgtgaatgaaatatatggaagctccggctatatatatttatacaaagggtacgagatggatgtgaatcctagagcatatgtgtccaacaatcaattcgtcgacaatgaaaatttgatcatggaattaaaaaatcatgcttctgttgttcatcggaaatgcctttctatactgattagtggatttccaaactgaattcacaagaaaacatatataattgttgtgttcatcaatctacttcttttgatcaaataaaagataatttgacttggcaaaaaacaaaaaatacagtttttcaggtatggagggagtactttttttttttcaagattgtcacatgcaaataggcaataatacactctttttataacttgtaagtgtttttttaccttttttttgctacatattaaataccaaaacagtgtatcgaaaagcaaatctgtacgacgaccaaatggctaagtggtgtaattgtgtgtcagtccagtccaagtccaacagaaaggttggcagatgataccccaacggtgttgcgctttctttttgtccataatttctatttctagtttttttttaaaaaaaaacaagcggtcagttaataaaatacggttggaccaactgctttctaattttatcccaaaagattgctctccaatggcaaaaacgtaaaagcaattctaaggcccttcacaatgcggggacgtggaccggtgctccaccgcgctagctaggattcgcgcttgcgtggcgtaaggttgcgcgtcccaccagaggcgctcgctcccgcggagggaagcgcgcttcctcgctcgcgctggagcagagtaacggctggagcctacactgtggagagcgtgcctccgactcgccgtcacctcgcgccctcccgctccgcgtcgccgacctcatcgtcgtcctgggctccgcttcgcgctgccgcctccgaaacctcatcgccggccggaagtggagacaaagcgaggaggacgacgaccatgagcagctccgtctcctcgtcgtcggccgagagaggaggagcccagatccgctctgccaccatctccagaatcgcgccaccgccgccgtcctcccgccggcgcttcttcaaggacgctaccgccactgctcggcccggaggacgctgctgctgccgccgcacggcatggaggacgccgttgctcggcccggaggagaggagagccggcgccggctgagggaagaggggagccggagccggcggagggagcaggggagagctagcatggtgagtgacggaggaggagacgggcgtgatgactgagggagttggggatttggtaaagcagtatatgtgggtcccactagcggtgcttgcactgtgaagaaagtgtctttgaagctctctatcctaggtgccaccttgtggtacctcacaatgtaagtcattctagcatttcccacgttcatatttcccacaatatgaatgtggctagaatgacttgaattgtgaaatggagggagtacccattaaagttggataaaaataaacattgtgatgatatgatgcatgaaggagcaagttggtcgttaaattgaagttgtactgaaatgtgaaaaaatatatatgccaaatgcaaggtaattcattaattaatcatgcttggagcacaacgctcttacaaaaagataagcagcaaaatgctaagtgctaaccaatgttgagaagccacttcagtaatcttggcaaaaagaaagaaggaaagaaattaaagaaaaactcacttcagcttgtatatatctttcttttacaaccatgagtccatgatcgataaacttatcagtagcaattaaatcactgcaactgatcagatctctttggctggaaataaaggagcaacgggcatattacttcgtaatcatctctgaaacttgtcaagacgagcagctcgacgactcgaacgtggagacctttcggcgtttgctgcccagcagcgacgcactgggtgcgaagtcgaagcctgagctgaccttgccgagcacggactggagcgcgtggcggaccgaggctatggcggcggcggcgtcgcgagacccgcacgatacaaggaaggcgagcctgacctggccgcccagcgtggtgacctccgagccgaccacctccagcccgagcctgagtcgcgctctccactgccgttcggtttcgatggatgaggaagcggcaactctgctttgcgacggagaggagcgagtgagcgagcgacgctgaccgtgggacccacgaggagaaaaattagtgtcaaatttaccctaatcaatcttaatactttactaatctacccttaaaaataaataaaccgttccgattagttctactggcctggcagcataatactatcggtagagagcatcgccctagaagaaaaatccagagatctcctatcttgtactgcaccacattcgtctaccctttacattttctcatccagccatctgaaagaccttggtgtcatagatggcacggttcgtagtctcgcggatggcagcatggtgtcatgaagtcctggaaggaagtggaatgttgcaaagaagtcaaatgtagcgacatggcattcgaagaattcttgaagagttgaggaggaccaaatgaggaggtaggcagtgtgtggtcgatacttccagattcattgataccaatcatacccctcttaaatcaatggctagatgtgattggtacctcgtctcgtggttcctgatacctcgtggtacctcacggtatctcctcaagagtggtaaaatatcttccaaggaaaacttcggaatacgactcacaagcatctggattgcgctgaaatgatgtaactgatataagaaaaaagaagtaatatatcaagtcttaaaaaataaaagtccatcagtagcaggccggtataacccaagttctctgctgttgttctccaatgtttcctctactagtaacctagcttttgtgctagttaccttgttagtagaccatggtaagaaattgtgacctacaactaaataacctataaacatcctttttttttttacttgttgtcatgggcattgggctgtagacctgtaggtaacccatatcaattaattagagataagattggattgaatcctttcttaggctgtgtttgtttccctgtgttcccaacctctctcactcgtgttctgcgcgcacgttttttaaactgctaaacggtttgatttttgagaaaagtttctatacgaaagttgctttaataaaatcatattgatccattttttgaaaaaatagctaatatttaattaatcacatgttaatagactgctctatttttcgtgcggagggaatgagttcccatctcagagaaacgaacttagccttagggggtcaagctataccaactatataaggatgggattgtgtatattatctgcaagcaaatagtctaatctatctgtcccaataatatgtttctcccttatttaaatctatatcccttcttcggaagccgacgtcgcccatgtatcttttcaacagtgtttatctcatcattgcctcaggtcatgagacttgttgacatacatacctcggactttagtaaaaatcggtgcttgctctgtttgttaagctctgtttttgttcctacgcgctatctgccgccgagtaatttgtttgctgttcttttttccagacaaaaccttattctactgccggttagtacttacttcctccgtttcacaatgtaagtcattctagcatttttaatattcatattgatgttagtgaatctagatagatatatatgtctagatttattagcatcaatataaatgtgggaaatactagaatgatttacattgtaaaacggaggaagtagtaatcattaatgtaggaccagtccatgtaaccgttgatccattatgagtccaacccttccgtggcctccataccccatacaacgatcgaaggaaataaaaaagatgggacagtgtaattaaaagcacgggacgcagttcgatcttgtcaaaccatatgtcggccacatttggatctctaccataccaattcatttgttggtagtgttaaaatctaaataattagttatgtggcttatgttagaaatgagtttaatacaaagtccgtggcggagctaaaaaaaattactgaagtttttactggcgagcccatgtatgaagtcaaaatttgatattgtattgaagtctgtgaagaaacttctaagatttagccaaattaaacataggcactattaattagttgagcttaatcccacatttactatttggatcgttgaaaaaataggcaagacacatttttgacatcaatccaaaatgtcccatcatcgaagcagaccaattagcaacagggttcactatatcagtttagggtttttgatcgggggtcactgaaatcccgaaatttcagaaattttagaaattttggtacaaaattttgaacaaaatttagttgaatttgaacaaatattacccaaattcatgaaaaaattgaaaatttcaaaaatttcggccgaattaatatcgtatcggaggaatttcggtctgaaatttccaaccctgattagcagtgagcgaggacgctcgatggattgacgtgagtggcccctgatcagtgatcactgacgacggcgagatgcgccgagtacgttcaaccaagaagagaaatccagtgcagactatactggatttctttggcggattcatgcaatgcacggatcagctccgacctacatcaccgttgagtgaggtttgtgagaagactctgtcggggtcacctagcctgggtacatattacaaactgtgtggagcgggactgagctattcgttagaaacacgggtagtaaattacaaatatagacgcccatattgctcgtaaattttgtatttttatgtaacacatatattctacctctattaatatcttcaaaatattgaaacgtcataatttaagtttggcaaagtcatcacatgaatctcgttatcaatgggtatgtgtcagggttacgggtctggcataccctctacccttcgatatacgttacgtatcgacatggcatacccacgcgtacgtggatatttccttcataatctaagaaaacttctcacgaaatcaatagacgggaagagtccttctcggacaagaactgggttacctacgtattgtgctaggtctagtgtgttcgagtcctactcggagagcatcagacctatggtataaaagggacccccggggagggcatagatcatcgaatctcagagccaacacaacccacacagcctacgaagccggagcctgcgaggagccaaatcgacgagagctagtcggatcaactcgactacgatctcgttggatccgacaagttccatcttttcctttgtaacctgtgttttctaccatataatcccatatcaactggattagggctattacctatcaaggggcctgaatcagtataattcttgtcttttgattgctcgatgtcgtactacttagatccttgtaccagcgtaccccaataccctctatatccggtctacgggtatcacccgtcgacagtatgttacttatcatcgaaaaataattagccgtaaatacgagactcgtaccaaatctagcaacgacttgtacctgaatatactcatttcaccttgtttacttccccgggctggctattttaatttgcacagctacattttggcaaagtcatcaaaatttaaaactttcaactcactttttaaaactatatattttttaaaatctatccaaaagtttcttcaataaattagaaaccaaaattattttttggggtttaaatattggtgaaaatatcgtttgaatttcatcaaatttgattcaacgttttttattttaaatttatgatcaaataatttaatcccctttgattttacaaatgaatcttgtttgcatttttttattttacactagcacaaataagtatgagaaaggagcaatattgtcattttgaaagaaatggaataatgtaccaacagaatatagagaagatccaaatggaaactcaagtacatataaagaattggtacataaacatttttctactataattaatggtatggaacagaggagcaaataattttttttaaaacaagtgtttctagaaaaaaaatggttaaatgaaatggggcatcaatgaaataaaaaaatagagtaatttttttaaaaaaaactacaaatagtaaagatacagatttaaaatgttatatcacaaaactacaaatttaatactcactccgttccaaaatataagcatttttagttatgaatttggacattgtatgtctagattcatagctaaaaacaatgtctagattcatagctaaaaatggctatattttgggacggaggtagtattacatttataacaaaacaatagatttaagttcaagtatcataaaattatagatttaataaaaatatcttatcacaaaactactggcttcaaatccatttaatcacaaaactataacacttatagccctatatgacatcaatactagagatctgatctataaaatctatagttttatcataacttcgatatatatcaaatcttgtgataaatttagtgttatatgtgatacaatgttttaaatctgtagtttttttatagttcgataaaacgtatatacagttttgtaaaatttactaaaaggaatatatttgcatgatggtttactaaaaagaatatatttgcatgattgtttaaatggtacggaacggtggagcaacgaaatttttttaaaaatatttggataaaattgcaaggtgcatttggtaaaaattggaacggtggagcaacgaaattttaaaaatatttggttaaaattgcaaggtgcctttggtaaataatggtcccggcggggctcgaacccgcgaccttcggctcataagatcaacnnnnnnnnnnnnnnnnnnnnnngaccaaactgggcttaactgaacattacagtttttataaattttgaacaatgtgaccaaatctgaccacttataccgtaggtcttatacagttcttttcccacgtatattttggttttctcgccttgcatactaaatggaattggcacactataaagattcattaacaaaaacaggattttttaaaaaattttactataggacattttaaatttgtagttttcactctagaacaccacatcaaataactcttaggagaacacactttgtcattatgattatttgtcagcagacatcgtacctattaaattagtgtttttgtgcggactagtgagaggggcccattaaatcgccatgcgtgttttgcttaggctaattgcatgtggctcctgttctctttctcctcgtcctcttcatctctcctcctctcttgcttctccagacaaatcaaacaaacaacattgttgaatctcgactaaaaatattatacataattgatgagttgataaaattatatataattgttggttctggagtaataaaaatacattaaaaagggaaaaaagcaatagaaggatgatgatgagggaggcgccgtccaacaccaccggttcgccagccacccaccgacgacagcgtgagcatatgtaactgtggtggcgacgagcaggagcagccgatcggaagtcagggatgataggtgcgagtagctcactccggatcgggtgttagggatggccatcatgattcgccgatgtcaggtcggtcagggcatgagtagatctgatgatagcgtcgtgcggactagccgagccagcggcattgactagtgaggcaaatggattgggggatggtgacttggggaaggccaactggcagagatacttacgatttcgtcccgctcctctgcctaggaccttgagagaggaagaggaagacggggattaaaacgaaaaactttttttagaggcggatgtctttttttattctaaatgcaggatcaatatggccatgccgtgtaaaaaagtagctaggctctctctcgccttgtcaacacgaaagcactaatttaatggatgcagtatagcttgataaataaaccatgaagtcacaaactcgcaatgtcatgtagcaaaaattaacctttttatttatttttaaagtaaaaccggaagttgtcgccgctatgttgatcgcaacgcctttttcggctgaggcaccccgagtcatttactttaacctccaccagtcaccggcccagccacacaacacaatacagtctgcttgcgttttcccgtgatcagtcagaaatttcacgagccggcatgcatgtgcatgcatccacgacggatcgatcatcttccaaccaaccatattatattacctctatatctatatatacacacacacccacactcctccattcacaaagaccaatataaataatccatcgacgccacagcgcagctagcgcccccacaatgcacactaaagctagatcacctgtagcactcgtgcttctcgtcgtcgccatggcggcgtcgccggcgttggtggcggcggcggcgcagcagcagcagctggtgccgtgcatgtacatcttcggcgactcgctggtggacagcggcaacaacaacaacatcctgagcctggcgcgcgccaactaccagccctacgggatcgacttctccggcgcggcgccgccggggcgcttcaccaacggcctcaccgtggtggacatgctcgccgacatgctcggcctccgcccgccgctcatcccggcgtacgccatggcgcagcccggcgacttcgcccgcggcctcaacttcgcctccggggccgccgggatcaggcccgagaccggcaacaacctggtaagggagtagtacgtactgtacagtacggacgtgccaacgttaattcagacatgttgatcatgtagctagtaataattaatgaccacggttcaatattacggaaaccaccaatattttgaggagtaatacaatcggttttggagatgttggaaatttccggacaaaattaattttaaaatttcagcaaaatttgtctgaatttaattaaactaattttgctgaatccaaacttttcaaccgaagagaatgtgctctcggtgtaccgatagacccgaaattcagtctgaattttggccaaaatttaaattttggataaatttgcactatatttttgacaaaaaatgaaatttgagtgaatttaagcaaaatttgaacatattattctgacttgtttcagaaaaaaaattggcaggattttaacagatttgacttgttttaggaaaaaaaagggatattttggcgcaaaaaaaacctacaatgggactagctgatagaaccaaaatttgtttaaattcagccaaaattactcattttcagtttcttcagaaatttcagttctatgggtcaccaaaatatttatgatttccgcgacattaaaccatcttcctcaaagtacatgtggacacgcaccacacgcatgcatgcagggtcggcactacccattctcggagcaggtggagcacttccgggcggcggtgcggcagatggggccgaacgccggctcgccggagcggctcgggcggtgcatcttctacgtcgggatgggcagcaacgactacctcaacaactacttcatgcccaactactacaccaccgcgcagtcctacgacccggccgcctacgccgccgacctcctccaggagtactcccgccagctcgccgccctccacgccctcggcgcccgcaagttcgtcctcgccgccgtcggcgacatcggctgcatcccctacgagctcgcccgcatcagcaacaaccaagacgacgatgacgctgctcctagtagcgattccggcaccggcattagcatctctctcggcggcgtcggtctgaccgtcggcggcggcggcggcggagggagtacgcgagcggcgaacgcgagcaggagcggcggcaatggcggcggcggggcgtgcaacgaggagatcaacagcgcgatcgccatctacaacagggggttgttgtccatggtgaagcggctcaacggcggcggcggcggggggaggatggcgggggcgacggtggtgtacctggacacggtgaggacggggagggcggtggcggcgagcgcggcggcgcacgggttcgaggtgctcgaccgcgggtgctgcggcgtggggcggaacaacgggcagatcacgtgcctgccgatgcagcagccgtgcggcgaccggagcaagtacgtgttctgggacgccttccacccgacggaggcggccaaccggatctacgccgccagggcgttcaactcctccgccgccgccggcgacgcttaccccatcaacgtcagccagctcgccgccatatgaatccaatgattaatctcgctgacatatgatcgatcattgatcaatgcatgcacttacttacggcaagagcagtgtatctcggttggaaagaattaatgttgtacccctcattctctaaatgtttgacgttgtcgacttttttaaatatgtttgacaatacgtcttattcaaaaacttctgtgaaatgtgtaaaactatacctcattccctaaatgtttgacgctattgacttttttaaacatgtttgaccattcgtcttattcaaaaacttttatgaaatatgtaaaactatatgtatacataaaaatatatttaacaatatatcattttcaaatgatatgaaaataattaataattacttaattttttttaataagacgaacggtcaaacatttttaaaaagtcaactgcgtcaaacattttgggatgaagggagtattgtagtagtatataggtattattatcagctattcccatcgttccataatataagggattttggtcggatgtgacacattctagtaatatgaatctgggcggcccagattcgtagtactagaatatgtcacatcccaccaaaatctcttatattatgggacggaggtgctaaagggtttgcgggcgtgaaagcatatatgaactaaatacacaaaataaaataaatgtagacaaacgcactttattaatgacatttttccctgtttacatggaacacgtacatacatcacgctcacgcgcaaaaaaaaaaaacgtctccttaagacggaggtcaacggcaattcaatgatatcactacaatcctattaaaagtatatagtgctacaaataaacccctaatagagactggctaataagcgtcagcttatttaaaaccgatacctattaaccgttttctaactccataggatgtaaaagctggtacgtagtatagtaatggttttttaaaaaactgacacctataaactttatatatatatatattgattaattaaaaaatcggtacttataatatattataggtgccaactcttttaaaaacctgcacctataaaaaccaagccaagttgatcaagccgagctttatcctctccctcctaccacttctccttttcttcgtccccctcccgtctgccactcgccaaatctccccattcctcctctgccgcaacgccacctcccctgccatcgtgctacacctcttccgctcttcctccacctcacctctgccgcctccccgttgtggccgcactccacctccttcctctcctgcatctgtcttcctcacacgtcgccctcttcctgagcctcctccaccatgagcaggagcaacatcgtccaggctcatcgatggagctcggcatggagatggagaagaaggacgcagtcacctcggccatgccggtgcaggtggcgcaggccgggcagcatttgccatcgttcctagcatcatccaggcttaccgattgcctctcttccaccgtcacttcacctctcttccaccactgcctcaccttcacggcctctccgctcacttccgccacctccacacaaccatgagcaggagcaacgccgacaagcttcggtagtgatgagctcaagggcgaccaaagccgccacgagctcaggggagttgacaatgagcaggagcagcgacgatgatgacgaaggtcactgccattggtctccctctccccttctccatggtggccctgctgacggatctgatgatggattggctacaggtgcatgtacaacttagggcattattgatggttcatgtgggatattgttcttgttcatgttggatgtgttgttcatctgttgatatgagatccggagattatttgttgtttatgagttgaactgttgatatgaggaattgggaatcgatatgtgttgatatgtggaaattgggatgtgtttatttcttgatacattgttattaggtggatttaggctagggttggggttgctcgaagtatcggatcgagccgacttcttttcttttggctagtggattccacgtggttgccggttgttaatcgactatctctgtttttttaatacactatgccggaccatgctagctgtgacgggcctaaaccatcacctctgacggattcagcctctcgtcagagattagtggtcagtgatgactctcttcacctttgacaggcgaaggaccgtcagtggtgaccagcccctatgacgggccacgtgtagaacccgtcacaggtaactattatctcaaatggcccattagtttgtgagccgtcagtgatgtctataatccagaaaaaaaagaaaaatagattgcaacccgtcacacgtgtgaaaaaaccctagcaagaaaattggcacacgctgccatggtggtgcttgctgtcattaaactgaccacatcacaaaaacttcaaactgaccaatagttcattgtcctccatcaccgcatcaccatcttatatagcaatcatttacaaaaggggatggcaaaaatttatcatacaacaatatcatatcattcacaaaaggggcacaatggccgatagttcgtcgtcctccatgacgaaccagctacgagagacacaggtggagacgccgcgctcgcagccgccggggaggcggcggaggatctcgaagaggcactccactgctgttgcactaccaaacaaaaatcaagaaacaagaaaccaccattagagcccacattctcaaaccaaacacctcaaatcatcatcatcatcaacaacaacaacaacaacaacaacaacaacaacaacaacaaggagaagatttaagtaaaaaaaaacaacaagaagaagaaacctcaccgaggtggccggtgggtgggcatggaggaggcggtacctggcgttcagatctgcgcatccccggcctcgtggaggtcggatctggcggctagcgcggtcggtggcggagctaagggaggcgttggtggcattggtggccgggaggcggggggaggcgctggcggaggtggaggcgtaggtggcggccggctagcgcgggaggaggcgaaggcgcggctggaggcgtcgccggcagcggcggcggaggtggagaccgctgccgccgtcaggcctcggccgcctcccctccccccctcggcaaaaaccgcgccacggctccagatccgtcgtccgccaccccgcttcccctcgcccctgccggatcgggcggccgagccgccgccgcgcctcccctcccgcccctgtcggatctggcggtcgggccggcgccgccgcgcctcccctcccgcccttgcacaaagaaagagaggggagatagagaagaagtggaagagatagaggagaagtggagaagagggtgccggccgaccttatctcctcctatgggccccgctgggagaggagatatatatatatatatatatagtggcagaagtcatctcaaacgggctaagacttaaagccgtttgaggtgagtaaaccttacctctgacgggccgtccggctgcgatccgtcacaggtaaacccgtcacaagtgactagttacctgtgacgggtcgcagccggatgactcaccgatgacggcatcccgtatgacccgtcaaaggtgacggtcatcagtgaccatttcgtttgcctatcacagttatcccgtcagaggtgtgaggatctggtgtagtgatagtttacaccgttaactttttgttacacgttttaccattcgtcttataaaaaaatttacgtaattataatttattttgttgtgatgccatctattaggaaatggagggagtataacgcatatctatcgcaccatggcccccatcctagtcggaaactaggaagaaattaaaatttactcctcctacgactcctattcggaaactggtaatttgggcatcgaatcaaaccagagcggatagatcgcagagggtttgctcctcgtaacggattgcattgctcgatccctccccggcccctaccaaattcacctccctggccgatagcgccgcaccgcagttatccacctcctccggccggccgccggccagtcgaccagtcgagtcggaggcggagtgcatcgatagatcgatcggtttccatcggaaataatcggagaaggtttcgtttccttcattaacccggatcgatcgggaggaatgcgaggagcgtgcgttgggtacgtgaggctggaggagaggaagaaaacgccgccgccgccgccgcagccggagatgatccccgggcagcatacggtggagataaggaggatgatatacctgacgatcaagctggccacaagcttgctgaaatcaagctcgagcctgcccaagaggtagcaactgcactttggttcactcgtttcttctttaattattagaattgtctttcagtttttattatggtaactagcagattgcgcggcaaacatcattatattttctctcatataatagtatatatgttttctcaatatattattcaaattttttataatgacatcaaaattttaaattttgcaataactttacgaaactacaaatacgtaatattcatattgtattttatatacgtgttagttattaattatttttaatatcaaattttagttatttgtaaattatatatattcctatatgtactctagacttgtcttttttttttaattctgaattttctataaattgtatttctatatagactctaggctcttcttctaatattatttatttttatttctgattttttattatttctaattatatttctacgtggactctaaactcatctctcaatattctttaatttttaattttgaatttcagttacttctaaattgtattcctatattgactttaaactcttcttcccatgtttttcttaattttgaattttagttatttgtaaattgtatttttatatggactcaaaactctacttttaattttgttatgtttattccgaagtttagttagttttaaattcctatatggactctatactctacttctaatattccttatttttaattctgaatttcagttatttcctaattgtatttctatatggactctagtgtcctcttctaatattccttattttttaattccgaatttcaactatttctaaattgtatttctatatggactctagtctcctcttttaatatttcttattttttaattccgaatttcagctatttctaaattgtatttcaatatggactatgatttttctttttcttcgattaatgtgagaatttctaagccatgagagcgaacgtggagactcctttttctattcctttaataatataatagattttgttaatttccttattagaaaaacaatagccttgagccaattaacaaagacaattctaataattaaagtctagctcaaggcctagcacaaagagaagcttagggtagctaggccttgagctagatttgtctactaaactagatagaaccccgcgcgttgtcgtgggattttgtgtacagtaatatattataatcaaataaaaatatactccaaagagaagtctgaaattatagttaaaaactttataaactctgttgtctagtagtactaaattatgaagatgtatatattttcttttctaagaaacatgttcctagatgtgtgtgtctatatatttcaaccgatggtaaggcaaaagaagatatcaaactccaagggtcggtgagtaatgatgggacggtggtactcataacaatagaacggatatgtactttgtcaactaaagctcaatcgttgtcattaaggaggccaggctcttcaatcgccttagttgatttgtggatggcattaaggagggttgttcaatcctacttcatgcatgcatgttgatgaaacgcccggctagcaaaattgtggcatcgaatgcattgagtgcatgatggaaggaataactaaatgcaagctacaaaacgtatcacactcaaaagtaaatctgagctgtccaagataatccaatggtgaatagtgaaatggctttgagataatctggaatgttggatttcaatctaatggctaaaaagaattaaggtgatgtagaagcaccacaagtgagaaaaatactaataactatacttagtggggatcaactatatatattatatagatatagattactattagattctctcaaaactcagtgaaaattttgaaaaagaaattaaaacaaaagatataaacaagttcaaccccccccctatggagatggattcgaatcactccggtggacgtccacagttcccctctactcttgaagatttctttctctgtgcctgatagcctagtttctcaaaattgatactgtactactacctccgttttaggttataagactttctaacattgcccatattcatatagatgttaatgaatctaggcacacatatatgtctagattcattatcatatatatgaatacgggcaatgctagaaagccttataatatgaaacagaggaattactagttagttagtacttggtcattaaaacactattgatatttcagtgcgtggatacatatcagaacaattttgtggtgatactaatgcatgatttcacgaaccatttgggaagccagctcctgaaccccagatgataatttgtcaatggaaaaaatagtgaaccaagttgttagtaataattgttaagtaacaatactaaatactagtactaactacgtgggcattaggcatttcaggttcaattgacttatttaaattatcaggtagctgattgatttctttggtccttcagtgctgaaatttgcatgatatggtttttcccctatgcatgctaactgttgcatgtttcatttctcagatggaattatgcattatgctcctcgagtgttgctctcaagagagaacctaccttccatattacggattactagcacaaagattgtgcctaatcaacaaagtttaccaaaaaaacttcgagaaatgttttgcgaaacaatattcgatgatcgatcgtctcgacacaaataagctggggaatgttgccaactttttcgcgcatttgttggccaccgacgcgcttccatggcatgttttggcctacatccgtttgacagaggaggataccacgtcgtcttcaagaattttcataaaaatactgttccatgagttatcagatcaccttggaattcgccaactcaataagagactgagcgatcctaaaatgaaagattattttgattcaatctttctaatggatcatccgaagaacacaagattctggatcaatttcttcacctccatcggtcttggtggtatcactgagacgctgagagagtaccaatgcctgcaatgcaacaacagaagtcagaatcaagttctgatgagagtggcagaaacccaagtaagagaaggaagatgtaaagagacggatggaagaagagctccatgaaaattcaactgtgcttatgggggatgcaactgtcgtcacaatcggcatcgtcagatttgttcagtgcgattgttttgttggatcaatcttcctctatctgtatccatgtgtaatatcagatgatgtttgttgcttatcgaattcaggaaaccagccatagcagatgttttctgcagtgcaagttttgtgccttcataaacggtttattattgtttataggtttgacaacagtgatgaagaaataattttaaggataaaatgctataacaggcagcagctaagcaggattaaaaatgatgtaccttttttatgtgaaatatgatttacctttttgtagatgaaatattatgatatacattggaaacacacgtaggtttcacttaaggtataaacttttgcaccctcttgttatatttctcgtctacatagataagtggtggaaatgaatggtaagaaaattaaatccagcaggaaaataacatcaaacatgtgtacaaaataacagacaagatttcacagaattcaactttggttgatctagaatcccctttcaggccactcagttgctgctccctgtcagacatggcatcatatgtggcaagtcatggtaaaagcgtggaaacccatctacagccgttgtgcttggcgtctgaccaggaacagccacagaaaatatgccccaatttgcaagcacaaatcacaccgtcttcagtagggcagactatcagtagctcctgctgactttcacactggaaatgagcagcagatcacccacatctgagttcttacaataccaggcgtgaggtcgaaatgcaagcaaaaacttgttgcttttgttgactagtaagatttcattgccgtatgaccgggtgcaggggaattccatgaagaggacgcaaatatcacattcaaatcaactggaccagacacttcatcatgactcgaatgacagagataacataatactactgccaaaaagaaaaaaggaaaagaggatcagtattttcttctaacagtagtcactatataacatgatccgaagtgtcattcatgagcaaatatatatttttgcatattacatttgcatccattcattcacacagaaaaagaagaaaaacagaatggctgagcccaggtttcctcctcctgaaactctgaagatagcattgctgtgccttctcctccccttgttctcaccagccacagcatccatcccttctgctgcatcgacgtcgtcggaccggagctgcatcgccgatgagagggccgcacttctcgccataaaggcaaccttcttcgacccgaacagccgcctcgcatcatggcagggcgaggattgttgcagctggtggggtgtcaggtgcagcaacagaaccggccatgtcatcaagctgagactccgtgggaacacagacgactgtctcagcttctatggagacaaactcagaggtgagatgagctactctttggtcagtttgcagaaattgaggtatctagacttgagttgcaacaacttcaattggtcacagataccggtatttcttggttctcttccaagccttagatatctcaacctttcatatggtttcttctatggaagtgtacccccccagcttggcaacctctccaaacttgcctaccttgatctgacctcttattcatacaaccagctatactcggttgccctttcatggctgtcacacctatcctcactgaagcatctggtcatgaaccatgtgaaccttaccactgcagtagattgggttgatgaaatcaacatgcttcctgctctgaaagtactctacctgaaacagtgtgggctgaggaaaacagttcctttccttcgtcggtccaatatcacggggctcgaagtgcttgacatctcgggaaatagatttcacaccaagattgctcctaactggttttggaatataactagtctctctgctcttgatatccgatcgtgtggtttctttggctcaattccagacgaaataggcaggatggcctctcttgaagaagtctatttccaagggaacaatctcatgtcaaccatgataccctcaagtttcaaaaatctatgcaacctgaaggtgctggatctacgaagtaccaatactacaggggatatcagagaattgatagaaaagttgccaaactgtcactggaacaagctgcaacagttgggtttatcttataataatattggtggaaccctgccaaattggtcagaacctctggccaacttaactgtcttgcttctctccaatactaacatctcaggagctatgccatcgtcgatatgggctctcacaaaactgaacattttggatctttgttccaataagctcaatggcacagtcagggaagatcaattaggaaaccttacaaatctagtgtacttagggttgggcaatacacatctacagattaaagccagctcagattggattcctccattcaaactgcaggtagttctcttctattctttgcagctagggtcagaagtcccaccatggcttagatcacaaacaagcattcaacaccttcaaattgcaaacacaagcattactacaatcccagattggttttggattgtgttttcaagagcagattttttggatgtggcatataatcagataacgggaacgctaccagcaacgttggagtttatggcagcaaaaaccatggatctgtccaacaacagatttactggtatggttccaaaatttccaataaatgtaacatacatgtacttgcaacggaactcattatcaggaccactgccatcagatttcggagccccgttgttacagtcacttactctctatggcaatttaatatcaggcaccattccatcttcactgttctcactggaacacttggaaatattagatctatctggaaataaacttagtggcgaagttccaacttatcaagaagattcaaatccacgcacacgacaactcattgtcgtaaacttaaatagtaacaacctctctggagaattcccattgattttcagaagttgcccgcgcctagtttttcttgatctatcctataatcagttttctggaaatttaccactgtggatgggaaagaagtttctgccaattttatcattgttgcgtctacggtcaaatatgttttcgggacacattcccacagaacttacaaggattgatcaattacagttcttagacctcgctgaaaactacttctctggaagcatacctgactctttggttaacttgagtgcaatggctcgcacatctggatacagtgttcttctagatgaagtcatcgcaactggtcaaggtgcaatgtaagatataaattatttctatgaactggtatcagttcaaacaaaagggcagcaacttgaattttcaagaggaatttcacgtgtggtgaacctcgacttgtcgaagaacaagtttactggagcaatcccttgaggcattggtgctcttgttgcactaaaaagtttgaacttttcttggaacctcataaatggggaaatcccggagactattggtcagctcaaacaactggaatctcttgacctatctcacaatgagctttctggtgaaatcccttcgagcatgcaggatcttaacgctttgggcaccatgaacctctcatacaacaatctatctggaagaattccaagaggaaacactatgggatcatatgacgcgtcttcctacattggaaacattggtctatgtggtcctcctttaactagaaactgttctggaaatgcgacaagcaaagacttacctagaaatcatgttgatttggaacatatatccctttatcttggcatggctattggatttgtcctcagcctctgggtggttctttgtttgctgctgttcaaaactagttggagaaaatcctatttcatgtttgttgatagacagcagaagaagatttatgttagtgtaaaaattagaagtgccgtcttaaagaggaagttaggtgcaaataatcattgatgtatctctagtctctaatatatacaagaatgtagtggttattgtgcggtgttgagtttgcttattaaccaccatgccttgtgttggtggcatcttctatgtataattaatcatttgcatgtatggcttgtaataagataattgtgtgatacacatatgcaatattgttaagttcacaaacttatggtattttatctaagttttggttctcttctatttctataacatgggagtagctatatttatggcgctatatttttcaccaaaaaatagttgtcatgtatttagattgtaagtccctaaattacatgtgtaattttaatgtatttacaatgtaagtcccaaaattacatatataagtccaaaatttacatggtaattatatatttaagtggtgtgtaagtggggtgtaactattgtgtaaatttcatttgatgtatttttatctaaaaatttgtcaccatatttttatagctgctaacgtcttaaaggaaatcaaatgatctagagatcgactgtaaacaagacaaaaatgtggcgacagtggtttagcaaaaccgtaacataatgtggtagcatcttccttgtcatatactcgtaagtcataagtagcaaattattcagtgattaattcagttgattccatgacgccaatctataccttctattttttattactattatttttccccaatttcaagccctacaattgattcagtttgaaattaaaaagatggaaaatgtgtttgtgagacttgtgaaagggggttcgtttcagaaatcttaccggccggcgccgatgcggcagtgctccgcggatgggaggggtttcaggggctagccggcggcgagggggctggccaccttcgggctcggggctccagcctccgccgctcttgctgccgcgagaccgcgagagctttggcatgagcgatggtgtgcgtgtcgtggcgtccgggtcggccgtccgggcggcaggcaaggcgccgtcgcggttttggggggacggcgaccggcggcggctgccggctggagcagtgaagcccgaaccgaaggcatcggctgctgccttgttgggccttttttctgggcttgcggctgtcaatttgggctgactaggggtgtgggctgctaaaagcagagtccgcccctcctcctctcccttcgtagttcccgcatataaagaaactgcattaataatttaacgcgcagattgcgcggtatcgttagcatttttttgtcatataatagcttaaatattttcatattttattattaaattaataacataattntaaattgagtaaaa

SEQ ID NO: 25936 - DNA, 20270 bp, Oryza sativa
ttctcccttcttccttctcttttctcttttatgaaaagacgatgacatggacgatgacgtgtataaggcattttcatcttttcgacaaggaagaaagagaaaaaaaagaaggaagaagggagaaaaaaataaaaatccatgtcatcgtccacgtggcgtgccacgtaggcaagaccacggtcaaacgcggctttggaccggaatgatacaataaaccaagtttagggatctcgatgtgcgcttggcaagttcgtggacctaagtgaaacctgctgacaagtttaaggaccgctagtgcattttactcttttaaattcttggttgaactaaaaatgtgtgatatttttattatattgtatatacatgatagttatttataaattatatctctatatggactcaagaatcatcttttaatattccttactttttaaatttcgaatttcctttatcataaattatattcctatatggattctagactacccttccaatattcatttttcttaactctgaattttagttatttataaattatatctatatatggactctaaactcttctttcaatattttttattttttaatttttaatttcagttattggtaaattgtattcctgtattgactctagacttcttttttccaatatttcttttttttagtttcagtgtatggacgctagacatttttttcccaatattctttatttgttaatttcgaatttcagttatttataaattgtatttctatacggacgctagactcttctcccaatcttttttatttttaattttgattttttgtaattataaattgtatttctatatgaactccaaactctacttttagttttcttattttttagttctaactttcagttagttctaaattcctgtgtgtggatcgtagactcatcttccaatatttctacttttctaattcccaatctgttatttctaattatatttctatatgaactctaaatttatttttcaatattgtgtttttttattttgaatttaagttatttataaattatattcttatatagactctagactctttttttctcatttttttatttcaaattttagttatttataaatcgtattgatatatggactctaggctcttctcctaatcttgattttttaaaattttgaatattagttaattgtaaattgtatttctatatagactctaacttgtacttttaattttcctttttttaattccgaattttaattaattctaaattgtatacttctatggattccagtctactctgtcaatattctttatttttaatttcgaatttcatctatttttaaattatattcctatatgaactctactttttctttttttctgattaatgtaggaatttctaggttgtgagcgcaaacgtggtggcttttttttctattactttaataagataatagattattaatgcagttctaaaaaaaagaaaaaaagcaaccacctaaaatcagtgttctcacatgaaaatcaaccagaaaaccctttagtttcaatctagttgaaaagaattgtttagtccattgaaaatgattcgatttactccctaataggatttcttttccccgccctatagtagtcaattttattttgatccacctgatgttcctcttaatttacactaggtaacttatcttttttttattgttccgttagcaactctccattaaaagtgttataggatgaataatacatttaacgacgtgtgatagacaaaccctaacggtgatggtatttctggaacaaaatcgcttgtaaaataatattccatgaaactcgcgcttatcgataacatttttttgaaattggatgcttgtcaatggtatttcttggattttctctaaaattaattcccaatctttaatcccatatccaatatatttacatacactcttgtaactgaacaaataacccacattggaacatgcattacaagacaatatatatggatgtgtatacaattattcaacaccttgctaagctactcagtagggtaggaaggctgcatggcaaggccacacatacccctcttgtcatcaatgtccttctccatcctcaggtacccggcctcgccccacgtcgtgccccacgagttcttcaccagccaatacttggtgccatcgctcgccgcgccatagccgatcacggtgacgccgtggtctaggctggtgccgcattcgccggccatcacgccgccgccgtagaactggaacttggacgcgtcgacggccaccgacaccggctggccggcgacggccttcatgaggctgggctcgtcgttggccggcacgtcctcgtagcccctgatggacgcggcgacgtccgccgccgccgtggtcttgcaccggccgtcctccgccgtgtacgggtagtttgcctcggctgtgaggccgccgttgctgaggatgaactggaacgcgccgtcaatctcgccgccctcgcagccctggtcgttgccgtcgacgtcgcagtcgaccagctcctgctccgacagcgagatgagcttgccggtgctcagcttgacgaagccctccatcgctgccacggccgagaacgcccagcagcaacctgcacttgtgattaattatggtagataacattatcttcttttaataatcaaagtgagcaacttccggattctgcatcaatcaattaagagtgaattgcaccagcaacgacttcagctctaccaccatgcacttcatctcagcttgagcacctgtaccggtgctgaacctgtgatgatttgctactcttccctccagattggatagggtgactggagtttgggaaactgtcatacttctacctcctcctgatcggtgatagaataacgagaacaggttgggagagaggataatagggctgcctgacttggagaagatgaggtgtggtgtaaagtgaaacaaatggtaaggttatgtggtgcaaagcgaaaatcatggctaagaccctgtccaagctgcaacaaaggtaaaaatacatgacccaaactgcaatttactcatcaattaacgatgaaaaacagccgacgtgccatcatattgttcacaaattaagatgaaagatggattattttttcatgctttgaccttggttatttgtgtactaaaatgaggacaaccaaggaggttatttgtgtacttaaaatgaggggaaatataatgataaccaaggagaaacttgattatcaaataattagaaggaattgtgaccgttttaagaattaaacacgggatgttaatgttcaaaccacataccttaccactacactaccaagtgcatctcggttattttctacttaccacattggccttggtccttgatgcgagtgacggcacctttggtcctccagtccacggacgcaggcaaagcatcggcactaacattctcatacttgaacccagttgataccctaacaccattattaggagtactgaaccccttgctgttggtcatggtcgccttgaactcctcgctggtgagatcggcgaactggttgacgccgagccagtacctgttcttgccaccggcgttgaacgactcgatgaacgcgacgttggccttgaacacctcgagccgccgcgccttctccgcggcgtccttgtacacacggccgtgctgcgccatccacctctcgtgcctcgccgccatggctgcgtcgccgccgagctcacgcgccgccgcgacaatggcgccgccgctgctgctgtagaggcagacgatgcagcagaggatggcaaggagcaatggcttggagatggcgcccatggtgagatcaaccagatcaggatttgtgagttgcttgctgcttaattacagctactactatgtgttttgtactgtgtttggtttgtccaaatggattggatggtatgtggtttatatagtgctgctcctgcaggtgttgagagggacactccagcgtagccgtgaagctaattgatcacaggattattactagtaattaaaaacctgcaattagaacgtacgctagcttctccagtgacttatgaattaaataagaggtttaaaaaaagccggcaaaagagaaaggaattaataatgatcagccgggcgggcagtgcaggtaggctgctgatgaggaattaaaaaacgaaacagacaacatacgacgttatgggttctgcacattagaaatttagaaaatgaacatcataggatactcggattacatgtttaccatccccaaaaagggttgtttgaacatgttacatgtgctcgtactattgagataaaaaaaaatcactgctcaacaacacctctgctttattttccaagctagaaaatgatagtcccaattacaatcagcaagcctaactcgagaattagatgcgtagagaaaggcatcctctaatacagattggaagggcaaacataactaacaacattaatacagattggaagtactacaaaggcaacacagcgaagataagaatcaaacgaataagctattatttactaagccctaaaatcgccggagaaaaataaaagagaccatataatctaacccagccttctgagtggaaagcaacatatttgtttgtctttggatgcttctttgtttgttgggtgtgcatgactgttgttgacatcttgtgaactctgcatttaaatttttgttgtcagaggttgagatctcagaactttgacacaaatgtatagagccaattgcaagcggagaaaatgcatatacagattggtgattctccttttacatctgatttctatagacaattcacaactgataaatacacaaataaaacatcaaggtgaggtgcagtcatgaattagtcatacaaaaggatagtgtttgcaagaaatgggaaactccaaaacagagaagtttttctttgttatttatcatccatttccattacaatatagaccaaatgctgttacaatgtaaacatgagctctaattccttcttagcataaatgcggatgaaagactaaataattggatttcaaaatcagtaattccatgtccgaagttacaggtcaaacatgaagtgagattgggtaactttcaattacattctctatttctgctgcttagtttgccccttctgaataatatgcacatattattcttttttgaacaattatgatttgcaatgatagatgagtcgttcagcaaggctcctttgctcaatgatgcaaagttctgaacttgttccctattgacttcaccaatagttattaaaagaaacatatgaaattggcacaccacttatggtgttctctcatggatggatcaaattgatcttgacatctccaaaatgttcatcagaagtgtgatgcaggaatacacaggaagaaatgtgcagcgtgggtataccataatctccagtaactgctaccatcattatgaaggcataacgatgattatctatatagtgatgttgatctatctctggttctttctatgttagggacggtagaggtgccctttacctatcatatacaaattaatttacacatcatttagatgaataccaaactaacatgaacttatgttgccaaaaaaatcttacatgacaaagtggaggaaacatcacacgattaatgaatataagaggaactatgatattcaccagatatgtgaagtaaaccactatgttacttgccagatgcacatatttgatattggaaagttttgacttgaaaatgtttgtgctcgttactatgcattgttcctcagaaatgttcagacacaagcctccatatttcttaaggaataataacatatcggtttatggttcatttggaagtatgtgattcaattagcataaaatgatttcgatgccacactctcaattagcataacaaattggaatagacttgtacctggtgaattgaatcctttgcttgcttatttctacgataaaaatttggtagtggccgagccttgaagctttcattttgggtttttccctgcacaagagtagcatgtaaggttatacctgatctataataccttttcaatcattatccgttatgatttattatggtctttgagaaggcatcacaatttttacattaatttatggcacctcaacatttggatggtatgtgaaatataacaacaaattaacattgtaaagtatggtatctcgtggtacctcttcaaggatcataaaaatctcgtcttgaaaacatgtagtttataaaagtattatttactagacaacgatggaacttctatttggtatgtccttgatattattttgatgtgattagctggtattttagtatctggcaattcctaccaaaatattaacagcatggaactccctaaaacatatgaaaacagagcagtgcggcagctatatttatcatattgcattcactcagtcaggtactttagtaatttaccttctctttacgtggtgtattggctttctgatgtgccgattgtgaggtaaaaccaaataacttttctttcaccctcgttacatgtgaggacctggtgatgatagaagatgatgcaatcaagtcattcagggaaaccaaaaactccagtatctctttcaagtaaaaaaaagatgaattggcgtactgtatacattgtaatgtcaaaaatgttcatttacatcacacaaggacgtaaattctttcagtataaaagcctaatgttcagatcaatccctagacaactttggtatattcaggctctcacaactctgctgtcgaacgtacctttgttcttccagttgggatgttctcgaggtaatttctggcacatctttgggaaatgcctgaaatgccgtcaaacaaaattagtgcaacgataaaaattaattgaaaacagttatgttcattccatgaattaggcagcttcaaacctctattggtggcttgacttggctcagtgcagaatcagtgtgtttcacaggcccagttgcagattccagctgactaatccttgcagcaattgtggtgccaagattttttgagctcgaggcagcattgcctgtttcgcacctaccaaagttctttgacttctgaaacgcttccaagatggaccgattttgagggaccgaacttgttgcctgctggtcgctttcgttgttaggaggtgagctgttctcctttgcagaatgcaggcgtgaccgtcttttcgccgatgaggtaggccctttgctaccagaggaaggagagctgaatttggccggtttctgaagcagagatggaagccgtcttctctttacagactcggcacttccctgattaacaatggaactctcctgaaaagaacacaacattacagtacagggtggtatgtaaaatgcccaaacatttgattccgctgcacattacgaacaaaatccccacataatttgatgaacagaaatgtcaccttcaatggttgcttgtcgtctgcatcagcaggcacggaattgtcagcacaaggatcgggagtagcagcctcctgcttctccatcgcttgcaacacctctctcgattcaccagcatggacaccatcctgcttgtgatgcgcggctccatccgcatccactccgcaagaggagccaaccccaccatcggcgatgacatccagctcctccatctcttccaccggcccagcagcgacaacgcccgaaccaacgacgcagctcgtcgtctcctccgcggcgggctcgtccgtcatacacgaagaggaggaggagcgcgccgaggagacagcggcggcggcgtcctcgtcagggtcgacgtcactgccggtggcgtcggcgtcggcgtcggtcttgcgcttccgggcgtagtgcgcctcgaagaaggccttcttctgggcgacggagcccgggcgcgactggtgcgccgcctcctcgaggtagcggttgtgggcgaacgccgaccacttcccccactccagcggctcggcgaggaaccgcccgaacgacaccgactcccccagcgccgacatcatctccgccttccagctctaaccccaccattagaaacccaattaatctcaccaaatcgatcgattcgatctctccgacaattcgacgaacaggaggaaggcggggggcggcggcggcgctcacctggtggtcgggggcgaggatctccggctccggcgacagcgcgggctccggcggcggcggcggcggcgagaagtccaggtcggctcccatggcggcgaggctggattggatctgggcttctggggtggtgaaaaaagcttcgctggattggattgccttttcgaaatgtggaaggaggaggggagtatgattgctttggggaagggggggtggtggtcacagcctcacaggcgcagagcgtggtggtgggatttgaattggggggaggaggagaggggtcaggtgtacgttgggaggagctggggttgggtctcgggggcctacgggtgaccgttacacagtgtttgaccctgagacacactgactgcgtagggtcagagggagaaatgtttgtagcggctatagtagattacctttttatttttctttttcggcacatatcataagaccaagtttaactccatcctgtttttttaaaaagataatttgctgtgacaattttttttggcaaaagatttggcattcaagttctgctagctggcgtttaggtggtgtttggatccagggacttaactttagtccctgtctttagacactaatttagagtattaaatatagactacttacaaaactaattacataaatgaaagctaattcgcgagacaaattttttaagcctaattaatccataattagagaatgtttactgtagcatcacataggctaatcatgtattaattaggctcaatagattcgtctcgcgaattagtccaagattatgtatgggttttattaatagtctacgtttaatatttataattagtatccaaacatccgatgtgatagggaaaattttagtcccatctaaacagagccttagatgtagggtaaagttttgccactttactagtaaagaaagagagaacgactcccaacgttttttttttcaaaatttgctaccctaaactcccaaatgacaaatgacaaattgcgctactagtgcttatccatgtagcaaaaagtgcttcaaaacatcaaaacttttgtcattttagaggaactaaacagggctatactccctctgtttttaggttataagacgttttgactttggtccaagttaaattgcttcaagttttaccaagtttgtagaaaaaaataataataatttcaactcaacacaaatttattatgaaaatatattcaattattgatttaatgaaactaatttggtatttataaatattactatatttgtgcataaacttagtcaaatttaaagtattttgactttcaccaaaatcaaaacgttttataatctaaaacggatggagtagtagattttatctttggttttaattagtacgtttttaaacgattaaacattgtaattgttaaaggaaatttaatatatcaaataaatttatttttcaagttgtaactcaattaattattcgctaatgattttcttgttttacgtgcactaacttctttctaatcttaatttgtattaatctatcttaattactacctccatccatgttattcaagctaccttttctaaaatgaaactattttatcacctgtctccttgtctcaaccaatcacaatcattctccttcactaactttctcttctcatccaatcatacactttctccaattatttccacgtactttcttagtacctgtgtcaacctttaaaatacgtacattttttgatggagctagtaattaagatggattaatataaattaagataaagatgaagtcaacacacgtaaaatgagaaaaccattaacgtatgattaattgagctttaattattacaaacttgaaaaatagatgtatttgatattttaaatcaacttctgcattgaatttattttaacactgtccaaagtacattactacactcaactttggtaccctctttaaatactacactacagtactacactgcaatccggagcggctacggctgcgttcgcttctacgactcggatgaagataaagggtacgtttgagaacttctctcctgcatacgcaaaacggagtggctattggcggcagttatatgccaattttatgccgccaatacctgcataaaacataggaaataaaacatctaacatagtggtagtgcttaattctaacatattccacgagtgtgtatatttggatgcaggtaataaaccaccaaaattggaaggaaattcagactatttcatgcaagtgttgggctccaaaagtctatttcaacattggaaaatgggcccaactctcgaagaaatggataaggcaagttgcaaaggagatacaaaccaatttatgggcctgttgggctagaccagggttcggctgaaccaggcctggttcagctgaaccacaatctcagccgttcaggctaaggttcggcgtggtcgctccagatgcactcctgatgacggttacgggcatttcaaacatttcgcgttctgtaaccatcattacctgtctatataaggacatcacttcactcaatttcacacacacttcaagcttgagctgaattataagagactttattgtattttattgtatactagaattagagagagagtagagtagaggaagtcggaggaattataagaggaagtcggaaattctcttcttatttcttttactctgttaattactctgctttaatagaaatactattctgagtaattatgatttattcagtgagatttatctcttggttagttcctaattagcgtgcgggatcattgaccactatgatccagtaaagtatagtggttactttagtgtttagctaacgctgaagtagttattaattgtgtagacatggtgttagagagttaatttctgatggtggtctcgtatcccacaataggtctgagatgggtgtagaggtggtgacagccctcaattacactgaatccctccctgtccaggtatgcactagagcgacatctgggagcagctggctggccagtggctgaagtaccgcgttacgatcaaattgagctatctttgcctatctttgctttgtatcattggacgaatctggtgaagagctgacacacacattccctgtagaaatcgataccttggaatactctcaggtgaactgctacatcggtattttccgtgcgcttgcgtattctatatgtgatgttaagaaataccaaccgtggctcattagcacatgatgagttaagtattagtaaaaaaacttgaaaatagattaatatgattttttaaagtaactatagaatttttttaaaaaacaaagttcgataaatgtgcccgtgaaatacgagagagtagaagtttgtgtaaatgttttatattgaaaaagtttttcaaaaagtcaaataaatatatttttgagctggtaattattaatactcaattaatcttatgcctcgctctcttcagtctattggtacttagattattgcatatatgcttttcaagtcttttttttacataaagctaaaaacagtactttttaagtttataatagttaatactaattaatcatgcgttaattgactttcttatcttgtaagctaaccggctaattgctccaacctcacgaaatccgaatagggccttagctaatttgtgaaaagtttacttttacgtatgagcaaacttcacatacatggtaaagaaggaagggatcttgttaaagtttggcatgaaccgaacttaaaacaacttcttcatttaagcaaatggcccaatagaataatgctaagatataaaaagttcccaatagaaaatttaaaactactgttccaaaatactccaaacttctagaattttgtttctagcacaattcatactactacttgttacaccaatcaccccccatttgaatttcttcctatcttatcccacccatctttccaactccacttatccttatttattgagaggtgctaaagtcttttcttctcaaccttagtctctaataaggagaaaaatttttagaacggatgtagtaaatgctaccctcacatccggagacaacttcaataaggagaaaaattaactaaagtgctcctcgttatagaaaagtagtatgggtggtgatgtacctaaaggtaatgaaatgatagaacttcttgatttatggactgaggttacataagggtatagaaatcaacttattttgaaatttgaactttagaaattaacttgttttgatacgaaaagactaacttcttaaatttgttaatgctttgatgtccgaacgttggatatattccctccatttgaaaaatataagacatcattgtttttcgcatagtcaatattaaaaaaatgtctaataattaaactaaaaacaaaatgcttagtgtcatgcaagtagtatacctagatttgtatttaatactattttcatgcaatattaatattgtagttgttgatacattataaaagaaattaatgatcaaaggccatataaaaaattaatactgcttatattttcaaactgaggagttgctaagtacttagcaaagaaaataaaatactactctcctctcataatataagaattttttagagttaaatggttattaagaaagtaggtaaaattaaatggtggaaggttgtgattggttgagaagggaagatagatggagaaattaaatggtagagacttatgattggttgataagagagtgttggtggaaaaattgttatgttatgggataaattcaaaaggctaaaactcttgttagacttactattacaagtgtagcggtttactagtattccacgtgcaatcgcacccactagttccaatccgattcatcccacgctccccaccgactcaatgcaatccgtaaatcatctacttgttggttgattttgtcgacttgtgtccataagggttagaagaggatctaaaccaccagtttccttatcctaacaagaaacaaactaacagataaattcgttttttgtgtggtcggtacaaaaaacagaatcctaaactaattgagataacccctgagccccactagtgtcgcatatataaagaaagagaaggaaggaggcagacgaccgaactctctctctctctaatctcaaaccctaaattaatcgcccgatcgatctaggcactggaaggggttcgtgaggcatctttagaagaagaagaaagaagaacggcaatggcttcaaacacaggtcagtagatcaattaatttccgcataagcaagaggtgattgttttgtagactaaagcctaagatcctgtaattagaactccaacattgtggtatcagagctgatctttagtccactcaatccctcataatcacatcatccctgtgattagaagccatccttaaaaaggttcaagattgattcggcatgaacaattttgaattagattagattaatttctttaagtcttggttgcatattaagccatgttatactgttggtctcggccaacagtagaagaagcaaagttattgaagaatttaatttcgttgcttagcagtagaatttaagagaagaatgaggattgggataaacgagattgaaattcccaaactctcacactaagaattcccagaccgaagctatggcttcggccagatattagaggggaggattggtcaagtcagatcgaaaatcaccaattaacttttttttaatctactcggcctattgcaaggtctattaatctactgttcttacatgattaagtttttcatcatgaatgagcttcggctagcagtggattaagaagaaaattggggaagacgggataaactagattgaaattcccaaacttttccccaactatttagctcagaaaagaggagtttgggataaacaagattgaaattcccaaaatccacaccttagaaaccctaattcgaagaactctaatttcggttctaagaaccctaagaccaaagcccgaattaaatccaatatagagtcaatttagggtttgatttcgaatgacttaccggaattgaaccccaccggagcctcccgggaagcggcaccgccgcaccttagctcctcgcggtcgtgtcgggttccccgtgcgcagccgtcttggagcttgtctctccacaccatccctcgccagggacgggaagcgtcagcttggcggatgctttcgagctccgccccccccccccgacgagctccggccgcatcgacgctcgccgtcgcttgcgcgccgcctcgccggaccgtcgatgccgtggcacacggcttggcgccaccctacgggtgcgccccccagccggccgagatgaagccgctgcagcgctcgccgccgcacgcgtgcgccgcctcgccggaccgctgctcgctcgctcgccagggtgagagagccgtcgaagagagggaagagaaggggagaagaatgagctagggttagggctcacacccatttccccctggcatgcgatttgttcggcgcgggcaaaatctaagccgtccgtttgatcggacggccgtcctcgcttccgcgtcgggccgtcgccgtaatgggccacgccgatctcggccgcatccgcctgagagtgggccgatcgtgcacataaataggccggtccattttgggctggccttttcaataagagtgggccttttattttaatttattattaagcccgtgaatttaattttctcaaaatgtatttagcctgtttttatgggccggcttaggaagtgatgggccgcattattattttaagcccgccatttatgtcttatttatttccagaaatttatttatgagttttcttagccatttaaattgctggaaaattatggtcaattatttgatcacttagaaaattatttctagttaaatggaaccaacgggatgtttagctagaaagaaattaatggtatgatataatatttgaccaacgttaatataatttcatgtcaatatttattaagaatattatttccttaagccacttaatttatttttagttgaatggaaatttaactagaaagtatttatgatttcatgtcaacatcattatgatggtcatttccttagtatattaattatttatagttgaatggaaccaacgaaaatatcgtctagaaagcattaagatgtgaagttatatttaacccacgttattataattgcatgtcaattataatttttattccttagttattttctaccaaatggtgatataattaaggaattaattttaagattacataatcatttatgaccaatggtgctttgactatgaaattgtaagtttattttgcatatgattgattaagccatggtaaactaattatatgcaattagcaatgcttattatttaagattagttgcaatactgagtaaattatttctagattaatggaaccaacgggaagtttatctagaaagaaagatgatttaattaagattgttatttccttaattatttatgcccaacggtgatgtaattaaggaaacatctaagtattgtcaatcattattttcattttctttgtcattttggccttaacggtgatatgacttagaattttacttatgccattagtgcattatttcctttatcacttttaccttacagtgatgtgatcaaggatctctaattcgtcactaagcttaattcctttaccatttctgcccaacggtgatatggctaaggatcttaatttcatgtcatttactaatggcattatgccctatatgatatctacctacttttggtaatttgatttaggattttaatttccgtaattcattattctttgccatttcataatcttttctaccctatggtgtttgattatgaaaattaagattcatttgtatgtgattaattaagccaatggaaattaattgcatgcattactaatgtttaattaataattaatttttcagcattaggacagcttaaggctattcagcttcttgatggatcaaattacgttgaatggagaaataatgtgcttattaacttagccatgttggattatgacttagccataagagaggatcctcccgaggaacctcaaccagccgaagaactcaatataattggggaagaatatgataatctcatgtgggcctacaataagaagttagccaactgggagaagtccaacagaatgtgcttaatttatgtcaaggatgccatctctccagaagttattggaggaatcattgactctaatgacattaagacgtatctggcaaacattgaagaaagttttgaatttgcacctgaggctcatgccaatacgcttgtaaatgagatgatcactagtcattacgatggcgaaagtggtataaggaagcacatccttgaaatgactcatatggcaaatcaactcagatccatggatatgaaaatatctgatggatttttagtgcacatcatcatgagatctcttggtcctaactatgatccattaaaaaaatatataacactcagaaagaggagtggaccatacaagaattgatcttacactccgtggaagaggaagagcgccagaaagctgaaaagcagaagattaaagaccggctcaacctcactaatgcctttgataaaggcaaaaaggtctatcaaggggaatcctctaataagaatagcgagccagagggtgagcagaatcaagaagggatcaaggcctccacttcagctgttccttttaagtacaagtccctactgccacttctgtgcgtcagatggacattggcagagaaattgcacacgcttcacagcgtggttagtcaagaaaggtataaatgaaattaaataaatcccttatgatgaattttcccttaatacttagtgagtttaactcaatgccattgtgcatgtttctaactcattacaggaaactcgcaccatccaaacggtagcaaagaggggagtgaacactcagagtaactgatggagtgaagatgaaagtgaagggttgttggagacctcacacttagtttctccagcagttgcaataatgtctcatttgttcactctattaagagaaactctactagtttaattatttaaagtcatgtgagaaacgggtcatgtccgttatttttttccaaatagaacatgatatattaagtgtgataataaagtgattggtcttgtccttgtgcacgacagtcatatttgttcttttggatgatcatgtgactattataataattgcctgtaatgacaaaagatgagacgtcattgaaattgtgacattgtaattgatgtcacatttctagggggaggttagaacgtctcataagttggagatattctttcccttggattgattttagtgatgttatttaagctttaagggaagattcactaagttaagaatttagccaataaattacttttggcgatgtttacccataaggctatgtttactcataagcaacctctaatttcctttaagaaatttaagatttaagatactaatgctaaaatcaaatgaagttatgagatcggattatggtggtaaacactaaataaagcgtgttcacccgatgaagacattaaaaataagcgttcatccaaatggtttccgaaccatgtaagaataaattgagattgatgaacaaaataagacattgaagtgttcatctaaatggttttcgaaccatgtaataaagaatttagtagaagtttctaaatgagtcaaaaataggctatttaagtgggttaataaaattaagcctgactctaatggaaatttcgaacaattcaagtgaggtggacagctgcatgaaaattaaaggtgggaatttcattcaccggtactctgtactaatgacattttattgtcaagcaatccatattgctgttagaaactaaggaaatttttccatgaattattttggtctaaaggagtactgggcttatatcagtaagtcatacattgacataaattaaagaaataatttgagagaattcagttaaagttagtaaagctgagattaaattctaaagttagactcagctgacagaagcttgagattagctcaaatctggatgcatacagatttgacatacattttgctgggaatcttggcagtattaattaaatccagactagttcactggtattaagaatgttttgtattatttgcaaggcaatatcaagtaacatgctcatatttctaaagtccaatgaccttagaagttcagagacatttggacactttattttgtgagatgtgtggatatttataaagattattaagttaactaagattaagctatgtccacacataggggagcaataaccatggaaaagctccaaaataatctcttactgcatagtcgatgatgtagttagattttaaagcatgttatgattaatcataagaatatttcctagaactaagagtggtaaatagtgctcataaaccactcaaaaggtgtaaaccacccaaaatatactgtgttataagttgtgcactaattaaacacagttttctattctagtagcaatgtgttgtgtgttttctgcctaacacattgatatggttgtgaaagacatgtcccaggatcgaattattaagctaagaatttgctaatggatccataatctaaaggctcataaaattaagattaattaagattatgttctggccagtacatatgtaaattagagccttactcagatcctggatgagggggactaaattttcaatcaacatccactaaattaagcttgagtttatttgagtactatagtgagctataggtcttgttgtttcagtgacgcataatgttgttgaagacacattgccttggggagctattttatttaatagactcgtaagtaagtctcaaaatctaggggagaatgttggttgattttgtcgacttgtgtcgataagggttaggagaggatctaaaccaccggtttccttatcctaacaagaaacaaactaagagataaattcgttttttgtgtgattggtacaaaaaaatagaatcctaaactaattgagatgaagaaagagaaggaaggaggcagacgaccgaactctctctctttgatctcaaaccctaaattaatcgcccgaccgatctaggcactggaaggggttcgtgaggcatctctagaagaataagaaagaagaacggcaatgacttcaaacacaggtcagtagatcaattaatttccgcataagcaagaggtgattgttttgtagagtaaagcctaagatcctgtaattagaactccaacattattatctatagaaccagctattctagaaatgaaccgcccactctcaccattattcatctctctccccgtgtttttttggatcttaccaaatcgagcggctccaagagttggccaaatctatgccatctgttatttcctatggttgagatcatgatgaaccctaagctcctctggagatactcaaagctgttattggcccaatctttcggtgagttgatgataactacgatttgggagaaacgttgacgacccaactacaaccgtactagatgttgttgtgttgcaccttagcgatcgatacatgtcacgccccgaactagtcccgaccggatctagcccgtgacgctccaaattaacctgttaatcgataccagtcccaggaaacagtgctggtatcacaaggagacagagtatcacagcaacagaggtctctttattatagagtagaagtacagtcatgttgggctgcggacagatcccgagctcacaactgcattacaaaaggaaagcggaagccaggacttggaccaatcatcacaggcgcgacttgggaactaggccgaaaccctaaaactcatcgtagccgacttgctcctggaagaactcctcgtcagcaggatccacttcatcttcttcagcaactagggggggattatttatatagagcaagggtgagtacgggagtactcagcaagccaggggaaataagtgtttaatgcaggcttcaaggaaaggctgttgttttcgtaattgattttgtttgaactcttttctaaaaagtctaagtgagtgcttctcaaacgacacggatgagacagtgcgtctcgtccggtcggagtatgtgcaatgtatcagtctttagatcttgaaacagggttggcacccggccaacagc

SEQ ID NO: 25937 - DNA, 637 bp, Oryza sativa
tgctgggcgttctcggccgtggcagcgatggagggcttcgccaagctgagcacccggaagctcatctcgctgtcggagcaggagctggtcgactgcgacgtcgacggcaacgaccagggctgcgagggcggcgagattgacggcgcgttccagttcatcctcagcaacggcggcctcacagccgaggcaaactacccgtacacggcggaggacggccggtgcaagaccacggcggcggcggacgtcgccgcgtccatcaggggctacgaggacgtgccggccaacgacgagcccagcctcatgaaggccgtcgccggccagccggtgtcggtggccgtcgacgcgtccaagttccagttctacggcggcggcgtgatggccggcgaatgcggcaccagcctagaccacggcgtcaccgtgatcggctatggcgcggcgagcgatggcaccaagtattggctggtgaagaactcgtggggcacgacgtggggcgaggccgggtacctgaggatggagaaggacattgatgacaagaggggtatgtgtggccttgccatgcagccttcctaccctactgagtagcttagcaaggtgttgaataattgtatacacatccatatatattgtcttgtaatgc

SEQ ID NO: 25938 - DNA, 765 bp, Oryza sativa
ctatcattcacaggagaagcttccttctgattgttggttgcagcggatgacggtcttctgcttggtatcgccctccggaggttgattgcccttggctcggcctggagtaggtcggggagagacacaactccttccatctacgacaattctttgctgaggctgtcgttgcagagaatggttgctaagatttattgccgagtcaggtgcagcaggtggagcattggtgcattgtttctgctatgggttctgattaacacgaggccttacgggtacggcgtttgctccagtgaccacaatacgattggaatgtctgcttcgtgtaaattggcgaaaatgtggaggtcggggacagttttttggagtaatgcccttctccactgcagttgtgacaaacaataactttcttacactcgggttcttcatcttgtacttgatttctcagctgctgtattggagcttccaaaggtacaacgcagatactggcatctgtcttgtcaactggtggctggggctgaaattgagcattgacaccttgtggtagtgcactcattggaattggagctgttgcaacgcgggctataggactgcttcgggatgcatggatgaccattcgttgaggagcaagcttctgattgcagggagttgcgtggactgacgtgccggcagctatgtttctcggttttgggcacttgtcggcgaaatgacccattccttgacaattgaagcacagatatcttcccggactcggcattttcttttctcatt

SEQ ID NO: 25939 - DNA, 724 bp, Oryza sativa
ctcgaccgcgggtgctgcggcgtggggcggaacaacgggcagatcacgtgcctgccgatgcagcagccgtgcggcgaccggagcaagtacgtgttctgggacgccttccacccgacggaggcggccaaccggatctacgccgccagggcgttcaactcctccgccgccgccggcgacgcttaccccatcaacgtcagccagctcgccgccatatgaatccaatgattaatctcgctgacatatgatcgatcattgatcaatgcatgcacttacttacggcaagagcagtgtatctcggttggaaagaattaatgttgtacccctcattctctaaatgtttgacgttgtcgacttttttaaatatgtttgacaatacgtcttattcaaaaacttctgtgaaatgtgtaaaactatacctcattccctaaatgtttgacgctattgacttttttaaacatgtttgaccattcgtcttattcaaaaacttttatgaaatatgtaaaactatatgtatacataaaaatatatttaacaatatatcattttcaaatgatatgaaaataattaataattacttaattttttttaataagacgaacggtcaaacatttttaaaaagtcaactgcgtcaaacattttgggatgaagggagtattgtagtagtatataggtattattatcagctattcccatcgttccataatataagggattttggtcggat

SEQ ID NO: 25940 - DNA, 3991 bp, Oryza sativa
caacacgtgaggaagatgtgtcttgtgggtaaagatgtacacctttgatcagagtaaatctattcgaatagccgagccctcggatatgggcaagcctagcaatgtacccaagtcagtgtttaattcttaaaatttgctcaacaactaaaatgtggaatggttggcctgggttggcttgggacgagctgggacccaggtcgggttgccagttcggtctgaatcatcgtaggccttgggttaaggcaggttcgtgagggttcatggccttgattaataacagtgtatagctctaggatcgtgtttacaaaatagcttgagcaactaaacgtcttcaaatgctgtttactgcaactctaaccccttatattataattcccttgtactcccttgcatttattctgcatttgtgggtgtgtcttgttgagtacggtggttgtactcagtcttgcttaattttcccaagcccagatgaggagctccttgaagatgaaggcttcggtgtctagctcgtgcctgccgtcaagcgcctgtggtcttcgccctagtcttccgctgtttttcgttgtctttgtgtgctgggccttcgctgcccgtgtaataattttatatacgcttccgcttgttaaactctgaattgtatcaacttttggtgtaccttgcctcctgggacaaggattaatgcacgcacgtaaggaatgcccgttgggttatttccggtcgtgacaagttggtatcagagcctcccttgaccctaggacgagccgtagatcccaagccttagcaatattttcaaaaataaaaatcctttattatttgtgaaaacccgctattctctctttgtcttgctgcttcacttatcatcaaaatctgatctttcaaatgttgcttttctttttgtttgtagatggccggcagcgttacccgtcgtggtttggacatgactggcttcgtcttggagctgcggggcatgtgcgtggtcttggggtatccacatggagtggattaccaggccaggccgctcccggagcaggagggtgaggatgcagagcctcacgctggttgggaggtcactgcagtgatcctctccggctctcccgagcggacttcgctggcagtcaccgcgggtggggattccttccccgccgcttgccagaacgccgttctcctcgccatcggcacccttcaccagcgctacccggacgagttgcagcactcgccctaccgctaccaccctcgtcgcggaggagcccgcgactacgccacctttcgagacgccagctcggagcatgacgctaccgtcgtgcatctggcacgcatggtggaggcatacgacgcagctcgtattgacttccatcagatggtgcgccgtggcatggtggagaacaacatgaagatcctggagctgcgccaagagaatttgcagctcaagaaggacctcgacgcgttggaggcgcagctgcatcagctcaagatcgcccagggagaggacagccgtcccaagcgtcgccgcgtctgccgcagccagaagatcaccgcccgcaagagcacctccaggcccgagcttgttcgtcagtccctggcgtggacctgcttcgtcgagacccctcgtgccgagcctgcgcccgtggttcctcaggagggggaagcctccggcgttggtagctcggagggtgcgctgttgctcaccttccgtcctggcccgtcgcagcggtagacgagcagttagtaggcttgcgcgtgtgtttttcctcgtttgtctttttgagtcgtgtggggcatggttacgccggtgtgtggtgtaactatgtcggggcctgtctttatttgtttgcctaagcaacttgaacattaatgaaccaatttaatagcagtgataaattcaagatttatagtagtcgtgggtggttagttttaatcgtcagctctccttctctgtttgctggttctgtgtggggttttcagatggtgacgaccaggagaaatgttaacaccggtgaaggcaaccaacccgagggcagcaaccccaacccccaaggcaacccacctccaccaccaccaccagacaccaacgccattctcacccaaatcctcgcccagcaagccaacatgatgaatgctttcctccaccacctccaaaatccgccacaacagaatgctccaccaccccctccccaacactccaaactcgccgaattcctccgcatccgcccacccaccttctctagctccaacaatcccgtagatgcgttggattggttgcatgccgtggggaaaaagctagacacggtgcagtgcagcgatgaggagaaagtcgtcttcgccgcccatcagctgcaggggcccgcatctctctggtgggaccacttccaggctacgcagccagaagggcaacctattacttggactcgcttcaccgccgctttccggaaaacccatgtgcccgccggagtcgtggctcttaagaaaagggaattccgagagttgaagcaaggcagccgctccgtgatggagtatttgcatgagttcaacaatctagcccgttatgccccggaggatgtgcgggaagatgaggagaagcaagagaagttcttggcaggaatggaccctgagctgtccgttcgtctagtctctggggactatcctgattttcaacgactggtggacaagagcatccgcttggaagccaagcacaaggagctggaatcgcacaagcgccgcttggcgaatttccgcaatcagcagggtgctaaccagagggtccgctacaccaatccctacccagggggatcctcctcgcagcagcagcagcagcagcagcagcaacctcgctccgcgcctcgacctcaattcgtggtgcgcattccacagccgcagcagcagcagaatcagcaagggactcgtgcaccccgtcctcctacgccaactgtgcagcctgttcaaggtcgcagggacgctcaaggtccgcagcggctgtgcttcaactgcttcgagcccgggcactttgcggataaatgcccgaagccaaggcgtcagcaaggccaagtgcctccccgctccaacaacggcgggaaggatgtcattcggggccgtgtgaatcatgtgacggccgaggacgtgctgacaactccagacgtcatcgttggtacgttcctcgttcattccatccctgctaccattttgttcgactctggagcttcccactcgtttatatctgtgccattcgtggggaaaaatcagttgggggtagaaaggcttagaaaccctctgctcatcaccacccctggaggggttatgacagcaaagtattatagccctgccgtccctatagaaattcaggggattccttttccctcggatctgattctgttagacacaaagaacttggatgtgattcttgggatgaattggttggctcaattccaaggagtagtggattgcgcgaggcgcactgtcactctgtaccgaggaccggaacagccggttgttttctttgcacctccaacctctgtcagaagttcagaacttcatcagataggtctgtcagaaatccccatagtcagagagttcggagacgtgtttccggaagaactacctggtatgccgcccaagcgagagattgagttccggatatatcttgctccaggaaccactcctctgtacaagcgaccctaccgtatggcagcaaatgaactggccgaagttaagaaacagttggaagagttgaaagaaaaggggtatatacgtccgagtacttccccttggggtgctcctgtgatttttgtggagaagaaagacaaaacgaagaggatgtgcgttgactacagagctctcaatgaagtcaccatcaaaaacaagtaccctcttccccggatcgatgatctgttcgatcagcttaaaggtgccactgtattctccaagattgatcttcgttccggatatcaccaattacgtattcgggaagaagatattccgaagaccgcattcaccacgc

SEQ ID NO: 25941 - DNA, 2763 bp, Oryza sativa
cgagaaggcgttccaaactctcaaagaaaagctggcctcctcgccagtgttaattttgctggatactcgcaaggacttcatggtgtattgcgatgcttcgcgccaaggattggggagcgtgctcatgcagacggtcatgtggtagccaatgcatcacgtcagctacgacctcatgaaggcaactaccctacacatgacttggagttagcagcggtggttcatgctctaaaaatctggcggcactatctcattgggaaccgctgtgaaatatatactgatcataagagtttgaaatacatcttcacccagtcggatctgaatcttcggcaaaggagatggttagaactcatcaaggattatgatgtgggaatacactatcatcctggtaaggccaacgtggttgccgacgctctaagccgaaagagccactgcaacactctcaacgtccgaggcattccacccgaacttaaccaacagatggaagccctgaacctaagcctagttggtcgcggattcttggctgcgttggaagccaagcctaccttgctcgatcaaatccgcgaggctcagaagaatgatccggacatgcatggactcctcaagaatatgaaacagggtaaagccgcaggtttcacagaggatgaacacggaaccctatggaacggaaagcgggtatgcgttccagataaccgagaacttaaacagctgatacttcaggaagctcacgagagtccttattccattcacccaggcagtaccaagatgtacttagacttgaaggagaaatactggtgggtcagcatgaagcgggaaattgcagagtttgtggctctatgtgatgtgtgccagcgtgtcaaggcagaacaccaacgaccggccggacttctccaacctctccaagtgccggaatggaaatgggatgaaattgggatggatttcatcaccggccttccaaaaacccaaggtggatatgattctatatgggtaatagtggatcgattaaccaaggtagctcgattcattcctgtgaagaccacctatggagggaataaactagcggagctctacttcgctaggatcgtgagtctccatggcgttcccaagaaaatcgtatctgataggggaagccaattcacctctcacttttggaagaagctccaagaagagctgggtactcgattgaatttcagcaccgcctatcacccgcagaccgatggacagaccgagcgtctaaatcagatcctagaagatatgctccgcgcatgtgtcctagatttcgggaagacttgggataagagtctcccctatgccgagttctcctacaataacagctatcaagccagcatacaaatggcaccctatgaagcgttgtacgggcgcaaatgccggacaccgctattgtgggaccaagttggagaaagccaagtgttcgggactgatatcctgagagaagctgaagctaagtcagaatcattcgggataatctaaaggtggcacagtctcggcagaaaagttatgcagataaccgtcgccgtgatctggaattcgcagtggatgactttgtgtatcttcgggtcacgccattgcgaggtgtgcacaggtttcaaacgaaagggaagcttgcacctcggtatgtgggtcccttccgtatcgttgctcgacgcggagaagtcgcctaccagctggagttgcccgcctccttgggcaacgtgcatgatgtgttccatgtgtcgcaactcaagaaatgtcttcgagtgccatccgagcaggccgactcagagcaaatcgaagttcgcgaagacttgacgtatgtggagaagccagtgaaaatcctggacaccatggagcgcaggaccaggaaccgggtaatccgtttttgcaaggtccagtggagcaaccacgccgaagaagaagctacttgggagcgcgaagacgaactgaaggcagcccatcccgatctcttcgccagttcttccgaatctcggggtcgagattccgtttaaggggggtaggtttgtcgcgtcccaaatcgactctaaaattcatcctcgaaattgtgcaaaagaataagtaaaattcaatgtgaaagcctccaacaattaaaatgtgcaaagataaaagtcaaatgaggcttggaggatttttgtatatttcctaagagcctaaaatgcttaaataaattttagtggaattttcagagcacaaataataagtgaaaagaaataaacaaagtaaaaaggttttataaaaagaaaatcctaaaagaagttcttttcccccccctttttccctcttgggccggctcggcccattccctccctctctctctctctttccccccggcccatcggcctccccgcgcgcgcgcgtcgcttacaggcgggcccgcccgccgctctcgctgacgggtgggacccacctgtcatcgccctcctcccgccgcgcccgccgccgcgcccgtgccctagcgccgccgccgccgcggattgcgccgcatcccgccgtccccgcgcgcattaaagagaggggaatcactccccgtgattccctctcccgtttcccccgattccccctctctctctccctcggattcgttcgaatcgtgcccgcattcgtcgccggcgcaatcaatggcggccgagatctccgcggccggtttccttcctccccggccgccttctctcccttccgacgctataaaatcgttgcccgagctccgctcttccgtttccgccgttcaccgctcgctctcgccgtcggaat

SEQ ID NO: 25942 - DNA, 2063 bp, Oryza sativa
  unsure (1)..(2063): unsure at all n locations
gctaactcattagctgccattcggtagggtctttttgcaattggagctgtgcctggtgccagttctatggcgaactcgatctctcggtctggtggattctgttaattctccggaaatcgtcgggggggaaaaattaaatttttttcccaaccccaaaagggaaaacnccctttaatggggcacccgactcccaaggaggtgacttgtaaacaggttaggatagaccgacttgcggtaggggtgttaggggtaaagcggacttgctttcctctaggtccttgcaaggtgatggacttttcggcacattctatctgtcctttgtgcttagccaaccaatccatccctagaatgatgtccaagctttgcgagtctaggactatcggtttggctaggaagtcaacttcctcaattctaaggttaacttccgggcatatttgagttgcccttatattccttccaggggaatgtactatcattggtacacgcaaattttgggttttccaaccatttcttttcacaaaagcttgcgatatgaaagaatgggaagctcccgaatcgaacagaactattgcgggtacggagttgacagagaacatacccatcacaacgtctggagcatcctgagcggtttcagcttgaatgtgattcacacggcctcgaccaaagttgttggaagcacgtgaaccttgtccacttgcctgagagctaggacgagactgagttgccgctggagtaggagttctggcagtgctgccattagcatgccctgagttggtgttggtaggattctgaggacactgtctagcatagtgacccatctggttgcaccggaaacactgaactgctgacggtccctacggtgacttgaaagaggtaacgctgttaggcgcagtattgccactaggggcacgctgctgtggctgaggtgcccgaccggtttatctgaggacgaggggcgtagcctggcttgcggttagcctgagtgaccgactggtggtattgcatgggttgaccgtagcgaggcgagaggtgcgcctcgggaagaatttccctgatggttagacttgcgtttcttgtattcttcggtagcctctttcctggcatcctcaagtagaagtgcgttgttgatcatatgttgaaaagtggggaagtcatgagcaagcactggagtctcattccaactgcgattcctttcaagaatttcctgatcttcttcttgtctgtgtccacttcctcaggggcgtaccgagccaacttgttgaactgactttaggtactcatttgatactgctgttgccttgcttaagtctgttgaattcttctttcttcatgtcaatagtgctttcaggcacatgagctgcacggaaagccgtagcgaactcatcccaagcaatgttagtgggttcagggtgtgcattgcagtaattctcccaccaatctgcggcaggtcctcttagttggtgagaggcgtagagcgtcttctcaacaggagtacactgcactaagttgagttttctatcaacatctttcaaccaatcgtcagcctcgacgggctcgacggtctgagagaactctggcggacgagacctcaaaaagtctgtcagcttggatctgttgttgcccatgtgagggtggccatttccatgcgcattatgctgaaaactggctatggctgtggttagtccttgcaagatttgtgtctgaactgccattaagtgttgcatgttggtttccacatgaggtggggaagggaggcgttcttctccagaattgtgactggcagtgcggtgagagcggtgagactgttccatctctgcatcacgggaaactgtgcgatgcgagcggctgctgcggcggggttgctcaacctctgcgttgcgggaaacagtacgatgcgaacggttgctgtggtgagactgctcattagctgattcatgattttcttctggctcaactctaccatcctcaacaccaaagcgggctggtgcacgagctgcacggcggggacggctagccatctaaactcccagaagagggcggggtaagagtcagataagcactta

SEQ ID NO: 25943 - DNA, 2758 bp, Oryza sativa
ggctaactgggtgtgggtagggcgagtacactggtgagtacggcgcacgcgagctgggggagcgcgggccactgggagtgcgggcagagccgcgggagctgtgggaggacaggtggctggcgtggcaaaagcggcctgagtcccaagagatagtgtcaactgaggtgacaccctcctcggccagacgggcctccaaagcggcgtaactgcgggcaagggagcggtaagcctcaaggagtaggtcgtgctgagtggcctgagcctccgaaagctcgaccatgcgagtcagcactggctgagactcgctgtacggacaagggtacctggcgtctgagtggccagagggaaggcgtggaagctgccggaaggcggaacctccgagacggtggctgtagtcgtgggccaggcgacgaagcgcagtccagaaaaggtcttggtacgcgatctgaagagtgggcctggccacagtgaagtggtgggggcgaaggccagctccgtgtatacctccacgggggtaaaggtacaccgagagctcacagtgaggggaacacggtccacggagtaccccgtgtactcgggacacgagaagccaaggaaacgggagaggtcacgaagctgagcgacgtggtgaccctcaccaaaaccgtgggaactgaagctggcgttcactgccatctacaattttgaaagagggagaaagatcagtacccgttttagaaccaaactattgaaaataaagaaaacaaaagaaaccttagcttttcgcaagtagttttgaacttagtatccttagggtcgtcctaagcgtcgggtttcgccctagggccaagcctgtgctctgataccacctcttgtcacgccccgaactagtcccgaccggatctagcccgtgacgctccaaattaacctgttaatcgataccagtcccaggaaatagtgctggtatcacaaggagacagagtatcacagcaacagaggtctctttattatagagtagaagtacagtcatgttgggctgcggacagatcccgagctcacaactgcattacaaaaggaaagcggaagccagtacttggaccaatcatcacaggcgcgacttgggaactaggccgaaaccctaaaactcatcgtagccgacttgctcctggaagaactcctcgtcagcaggatccacttcatcttcttcagcaactaggggggattatttatatagagcaagggtgagtacgggagtactcagcaagccaggggaaataagtgtttaatgcaggcttcaaggaaaggctgttgttttcgtaattgattttgtttgaactcttttctaaaaagtctaagtgagtgcttctcaaacgacacggatgagacagtgcgtctcgtccggtcggagtatgtgcaatgtatcagtctttagatcttgaaacagggttggcacccggccaacagcttttcaaacggccacccgggccaacaacttttcaaacggccacccgggcctagctgatcccgtcagctgctgatttttcaaacatcgaacccagtttcacaacagcaatttcacaagcagtagtcaaacaaaactacgctaggaatcacctcacatccgcccatgaccgtgggcacggctgttcgagcagtttgttaacctctgtagagggggtacactttacccacacgacattactaacccggatcacccagcccgtggggatcagccacgtcgggagacctccaagctttcatgacaaggcatttcgaaagccgatacaggtttaccatatgccgacgagaggggtcccagaccaacaacaggttaggtcccagaccatactgtgccaggaagcccaggggtcctccccgacaccaccccggcgaatccacatgtctctcggcatcaaggctcccctgataagctagttactcagccaggggtgtcccattccacccatgtggtcgtacttgtcttatgtttggatgaaattccaaggaatcggtccttaagtgcgagagcgggaaaccgtacacccggtacgttccccggtccgcggttttggaaattcatttagttcgcaagcaccgacccaggtgtcgggttttccaagtcttttgtaaaactccagttttacccaagttgttactcagattttaagtttgaaggcgaccgtcgatactcgcacagagtgcacgaatatcgaggtgcaactgggtggttacaaggggccatggtataacaattaacaaaggaaggatcaaatgcaacaaattaggtaggtctgccaacctgccttacagacgggacaacagattaagtgtgatcctatcaatgcataatatttcgcaagcaatataattaaatttcaaatataggctcaagatgttcaaaggtggcttgccttgctcgagatccggagcttgatcctcgaaatcctcgcactgcgggtcttcgggctccgaaactacacgcgaaacgggacaactcaacaaacggcgaaaataaagccctattaatgacctctaagcgtgccattagatagatctcgagatttgaggaattttggaagttgaacggagtcaatcggatttacggttgggaagatattgaatttctaagattattggatttttggtctaaaggaaaaaggatttatttaaatcctttttggaaaagaaaaagaaaagaagggagggagggaatatagacttttctcggacggctagggcgcgggccaagagaaatggagcggtctggccgagctaaatg

SEQ ID NO: 25944 - DNA, 1970 bp, Oryza sativa
atgacggcggggcggtttggaccggagcggcgacactggcgacaggcgcgtgcagaggctgacggcggcggcgaccgggcggtcggccaccacggcacgcgcgcgcgggaagcaacgggcggcgtccgcgcgggcgcgcacacgctggctcgcgaggacgagcggatgcgcggctgcaggcgcggcagagcgaggggaaagggagggggcgctcggcgcggcggcttacgcgcacgcgcgcgcggcgtgcgggcgaggctgagcgggggaggagagatgggagagcgcgcgcgagagagagagagagagagagagagagagcgcccggggagagagggggccggggaagaggggaagatgggccgagcgagattcggcccatcgacctcgggggaggcaaaatagacttttgcggaggaatttgattggaaggatttggattcggaattgaactcgacgatagatcgggtattgagatcttgagatggcacggacactagacaacaagcaaagaaacaaatttcgcaattagggtttttaagagatgattttcccgctaggcgccatgacggaacgggcgctacagaccaacccccctaacaagaatctcgaccccgagattcagcacctaagggagcaggtccgggaactcggcgcggagaagatcttctcgctcccaggttgcctcgtcttcggaatgattgctccattggactttgtagaacttgatggtcttccttcgagtctgacgttctgcctcttcaagaaccttgatcggtctttccttgtaggtcagattcttttctagctcgatattacccaggggaacttgctcttctggaactcgaagacatttctttaactgggatacgtggaacacgttgtgcacgtctgcgagaccttcaggtagctcaagctgataagccacttcgccacgtctggcggttatgaggtaggggccgatgtagcggggtgctaacttgccggacatcccaaaccttctcataccacggaggggtgatacccgcaggtacacatgatctcctttttcgaactcaaggtcacgcctccgattgtcagcgtaattcttctgacggttctgtgctgtcttcaaacgttctcgtatcagcttaacttgttcttctgctgacttgagtatgtcaggaccgaataccagtgctttgcccacctcattccagcacaagggggtgcggcactttcttccgaacattgcctcattcggcgacatctgaatgctggcctgataactgttgttgtatgagaactcggcatacggcaaacaacgatcccaagtgccttcgaaatccaaggcatacgcacgtagcatgtcttctaggatttggtttaccctttcggtctgaccatcggtctgcggatggtaggctgtactaaaattcagatcagttccgagggcttcatgcaactgcttccagaaccttgaggtgaactgagtgcctcggtctgacacaattttcttgggacagccaaatctacatacgacatgggtcatgtagagttctgctagtttctttccatcataggtggttttcactggcacgaaatgagctgatttcgtgagtcggtccacgattacccaaatggagtcgtacccgttgggggttcttggcaaaccggtgatgaaatccattccgatctcttcccatttccactcgggaatcggtaggggttgcagcagaccagctggcctctgatgttccgccttgactctttggcaaatgtcagacagggctacgtattctgcgacgtctcgcttcattccagcccaccagaagtatgccttgatatcttggtacatcttcgtacttcctgggtgaatggagtaggcggactcatgagcttcctttagcatgagatctcttaactccttcttggccggtacacagatgcgtggtccgctccaaactgtgccttgatcgtctatggagaaa

SEQ ID NO: 25945 - DNA, 664 bp, Oryza sativa
ccctagcagaagggcaccaaccttctgccatatgacatctcgactaccggcccgcagctcgtgtagccttcatttgccctgaagaatgtccatcgacacccgacttcatccatctccaatcggtgtacttttgtttatgactagactgagccacaaactaagccttacccattagacatgtggaagtacagtagtgctttgcaacagaggcccgagcttaatccttatagtggccggggtgctacttcccacaactggcatgcacccaaaccccaccgaaaacaggttttaggggttttgaaagaggaagagaggtgtgtgtccaattccaacataagccaaccattccatagtgtccaaatgatatgagaatttcccaagtctaaagttataaaaaccacctaatgttgtcctattaatcagcgaagcatctacctaaattcatactagtggaaccaggaatagagtacccactagttggggttttgtttattctagggtgaacaaggtaataataacaatagcaataataatgtcataacaaaggtgaataggcatggctaaataaaacagtgataacgcgggaatttaaataaagcgataatgcaataatttaaatcaacataattttacaaactgggattcaatatgttcaaggatgatg

SEQ ID NO: 25946 - DNA, 5200 bp, Oryza sativa
  unsure (1)..(5200): unsure at all n locations
acaatcggcggtctgaccgcccaacacatggcggtcagaccggcccactcggaggaaaccggtagatttccaaattttggtaatctttcctattttaatcctaggtgccaaatttgggtgtaaacacatgcccccctacctttttggtgaacaacgtgaatctaaaagcatagagcatgtttttggccttaggacgataatccaattaccggccatagtacctcctaagcatcttgccaaacactcgggaagtatttcttcaagtatttcccgttgattgctcgctgaaaacgctccccttaaagtgtctccaaaaagtatgcgttcccccgaacaatgccgcatattcgataaggaccttcccaactaggagatcacttaccgaactccttggatcgagtacccaaaggcaaaattgtcttccaaaccaagtctccaacttgaaacaattttgctttcaccctcttgttgtatgccttggccaccctcttcttctctttctctatctcttccaatgccttcaagcgcttgtcgacgacttcatcaaggttgtctcccatcaacgtcttgtaatcttcacttgacaaatcatcttgcttgatataacgaagagaaccaagatttacctctaccggtaaaatggcttcttgaccataaaccaactcaaaaggagtgactttagtggcaccatgtttagatatcctatgcgcccacaatgcttcggaaagcacctcatgccacctctttgggtgctcctcaatcttctttttcactagttttagcaatgtcttattactcgactcggcttgaccattagcctgagcgtagtaaggagaagaactcaacaatttaataccataagattcggtaaaactattcacttctttagacataaaagaagcaccttggtccgtagtcaatgtttgccgaacaccgaatctatgaataatatgcttcaaaataaaatcaattacctccgtatgagtcatattcctcgaaggcacggcttcggcccacttggtgaagtagtccgtagcaactagcacgaacctatgcccctttgatgacgaaggataaatttgaccaatgaaatccaaagcccatccccggaacggccatggtttgattatagggttcaacacggcggcgggtgccaattgaacattgccgaaccattgacaagcctcacatcccctataatatttgaagcaatcatcaatcatcctcggctaatagaatcccgctcttctaagcaaccaattcatcttatgggccgattgatgagttccacaaattccttcatgcacttctccaatagccactttagattgatcttcatccaagcacttcaacaagacaccgtctacgtttcggcgatataatcttcatcaagcaatgtatatttgaatgcttgccgccgaatttttcgatcaaccttaagtgtgggatcttttagatattgaatcaaaggaattctccaatcctcttctgtatcctgggcacaaatgtccgaattttcaattaatccggcctccaaattgattgaagtgtgcccccagcatcctgcccaaaaccggtcagaccggccacacagggccggtcagaccgctcggggtcgctgatcagaccggcggcatgtggccggtcagaccgcccctggtcaccggtcagaccggccgtgcaacgccggtcagaccgcctggtctccaattttgctaatttcgcacaaagatttaaaatcaagcaccggttcttctaatatcagaaataatcccttcttcacattataaccagatgcttgttgtgctaagtcatttgctctagaattatcatgcctagcaatatgtctaatagcaaaattatcaaaattggcaataatatctaaacatgaatcgaggtacctatttagtgatccatccaagcatgtgtagactccgcgacttgttgcaccaccaattccgaatcaccaaaggcctccacatatttagctccaaccatctccataacttgtaagccgaacaataaagcattgtattcggcttgattatttgtgcaataatattcttagcgaaccgatgcctcataacacatgccattaggtgaaaacaaaactacccctatgccttgaccttctttgcaagaagaaccatcaaaataaattttccaaggtataacttcaactaagcaaatctctccctcataagcaacatctatatgatggtctactataaaatcacatacaatttggccttttatagttttcaatggttcataagccaaatcatattctatcaaagcatatgcccacttgccaattctcccacttagaattggcctttgcaacatgtgtttaataacatcggcttgacaagtaactatgcatgtactagataacaaataatgcctcaatttggtacaagcatagtataagcatagacaaagtctctctatagaacatacctcgattcggcatctaaaagacggcggctcaaatatgtaatgatatattccttggcatctttctcttgcgtcaaaacggcaccaatgactttgtcctcggaggcaatatataaccgaaaaggcttttcggctttaagcgctcggacaacgggtggagtagataaatacctcttcaactcttcaaacgcctcttggtgttttgccccccaagtaaaatcggcttcttttttcaagcgaagaataggaacaaaagcatcgattttacccgctaggttagaaataaacctcctcaaataattcaccttacctagcaacttttggacctctttcttgcatgtcggcgctttgaaatcacgaattttttctatcttcttaggatcaatctcaactcctctctcatgcaccatgaatcctaagaacttccccgccgacacaccaaaagcacatttaagtaggttcatcttcaaaccataccggcgcatcctctcaaaagctaatatcaaatcggctatatgtccttccataccatccgatttgacaacaatatcatcaatgtagatctctaagataatacctagcaaatcatggaaaatcaaattcattgccctttgatacgttgcgccggcactctttaaaccaaaggtcatgacaacccacttcaaataaaccaacaaaccccggacacctaaaagccgtcttgtacatatcctcttctgtcataaaaatttgattgtagccggcattaccatctaagaagctaatcaccttatgacccaaggcatcattaatcatcatgtcggctataggcataggatactcatctttaggagtagctttatttaaatctctaaaatctaagcaaactctaatcttaccactccccttcttctccaccgggactatgctagaaacccactccgcataacgacatggcctaataaacnccgccttcaacaaccgatcaatctcctctttgactcggtcatataataaaggattaaaacgacgaggtggttgcttataaggcctaaaacccggtttaattggaagccgatgctcaacaagctcacggctaagacccggcatctcatggtactcccatgcaaagcaatcaacatattctttaagtagctcgattatcttaactttataatcggctctcatgtttttgtttacaaaagtcggccttggtttaattccatcacctatgtctacttcttctaatggatcggccgatgtaaacccttgcccaagcttctctacttcatcaaaatcttcaacggtctctccaatatcgttctttgtagaccgatattcttgcacccttttttgtaaccactctaaactagcctctttattcattatacaagtttatatggcttagccgtgctacactagcaagctttacagagataggtacaaatttgccatcggagatactaataaaatcatagctagaaagatccctccccgataagcatgggatatccccataacgccactcaaaagtagcatgggccattgcaacctcggccgatgtatccgcttgaacattttcaacatcatcgccgtcccattggattaaacattgatgcaaggtagaaggcacacaacaatttgcatgaatccaacaacgacccaaaataacattatagttcccccccccccttttttttttgtgggggccccccacacacccccaaatattttcccgcggggaaagcccccggaaaatttgggaaaaaaaggaaaaaaaagggcccgggggtttttgggggtaaaggcccgttccatttgtttttacccacggtttgagtctccgccgaaaagatacccctcgcctccattggttcaccattgaagccattgaggatcatgttggtcttcttcaactcatcatcctcatgccccaacttcttgaatagcgaatacggcatcaaattcacggcggcacctccatccactagcatcttagagaccggtttcccatcaacatggcctttgagatagagaggcttcatgtgacggtttgactcatcgggcttctcaaaaaccgcatctttaggacctaatgagaattgggcaacctcggcttcatccatagcacaaaactccataggcaacatacacaccatgttgatatccatgtcttcctttggagacgatttatctttgtcaaccgattgttcttccttctcctctacatcaatcggttttgccttctctatggatttaggcctccataccggtggtggtcgtaactcattgaaccttttatctctttgttcttcggcctttttctcccttaattcttgggcccgaagacattgcaaccttctcttttgtgtagccgtcaaatccttaggcatccacctaggattcggctctgttctaggaggcaaataatgtcctctattaactttgcttgaagacgatgaagcccccacatcgccctttgcagccctctcatcaaaccgacaccggagcccggtcagaccggctgtaggccaccggtcagaccggccagaccggcctgaggcgtcggtcagaccgtcgtcaggtcggcggtcagaccggcctgatggcccggtcagaccggcaacatggctgcggtcagaccggccagagggcctggtcagactggccgactgcgaggagctggtaccggcttcggattttttgcttggggactttccaactccatctccagaaggtataggcacatcatgagatcctattt

SEQ ID NO: 25947 - DNA, 2192 bp, Oryza sativa
ttttaggattttctttttataaaacctttttactttgtttatttcttttcaattattatttgttttctgaaaattccactaaaatttatttacgcattttaggcttttaggaaatatacaaaaatcctccaagcctcatttgacttttatcttgcaccttttaattgttggaggctttcacattgaattttacttattcttttgcacaatttcgaggatgaattttagagtcgatttgggacgcgacagccgccgccgctccggacttcctcccgactcggcgacccctccatccgcttcgccgtgttgccgccgaccccgtccgccgctccgcttcgcccgcagaccgtcggagcgccgtcgccatcgtcatcccgagccgcgccgccgtcttcttccgctccgtccgccattctcgtcgtcgtcgttgtcccggggtgagctgtggaccgtccccttcgtttcccccttccctcctctctctcgggtgccactccgccgcgccgttggtcgccggcggcgaccatcggggcgcgggtgcgcgccgctcccgtcggccgcgccggcgaggccgccctcgggcgcgccctcgcggctgccaagtgggcccggccgtcagccgcccgcgcccgtgggtgcggctgacgcgcgggacccacggggccgaccgccgccagccgcgtgcgcccggtccaccgtggaccgagcggctgacgcgtgggccccacccccgtggacccggtccgcgcgtcccctccctcggctgacgcaataaataggttttttaattaaaatttaaatgaagaaattcgtaaatatccatttaaagagcatataaacttcaaatggccatatcttggccatttgaactcggaattggaccgttcaagtctctaatttttccttaagatgtaaagaacccatttttgtgctttgtttctgctgttatgtggagttatttagagtaaaagcctttttcttttccgttggtcgtgtagacgctgcagcttcagaagatccgctcttcgtggaagtcgaagccgtcgattggggaaaacgagcaaggcaagacacatcatcttgatcatattgaatcccattttataaaattatgttgatttaaattattgcattatcgctttatttaaattcccgcgttatcactgttttacttagccatgcctatttacctttgttatgaccatattattattgtcattgttattactaccttgttcaccctagaataaacaaaaccccaactagtggacactctatttatggttccactagtatgaatttaggtagatgcttcgctgattaataggtaacattaggaggttttacaactttagactttgggaattctcatatcatttggacactatggaattgttggtttatggtggaattggacatacacctctcttcccctttcaaaacccctaaaacctgttttcggtggggtttgggtgcatgccagttgtgggaagtagcaccccggccactataaggattaagctcgggcctctgttgcaaagcactaccgtacttccacatgtctaatgggtaaggcttagtttgtggctcagtctagtcataaacaaaagtacacggattggagatggatgaagtcgggcgtcgatggacattctccagggcaaatgaaggctacacgagctgcggcccggtagtcgagatgtcatacggcggagggttggtgcccaatgctaggggctcagttctgcctgcctgtcccgggtatcccggccgtaggtaggattgggtcggtactcttgtctaaggctaggatgggttggaaactatgtcacgtcttccgtccgtataccgtggtggtatgtggcacgtgtgtcgcgaccgggaaaattgccttttcccgaacgctagtgtattaatccccgtcccaggaaaagccggggtacaccatacaaacatgatataaaagacacatctttattatatcgataatatttacattattacaaaggcacttaaggcctgaccatcaaaaataaacagcagcggactagcgggcctacggctccatcttcacaggcgctcaactggggtataagccataactccacctaagacctctcctccaaagcttctcttactgaagagggaaaagattgagcaagaatgagtacaaccacagtactcagcaagcc

SEQ ID NO: 25948 - DNA, 2813 bp, Oryza sativa
gtttccaaaatagcttgagcaactaaacgtcttcaaatgctgttaactgcaactctacccccttatattataattccccttgtactcccttgcatttattctgcatttgtgggtgtgtcttgttaagtacggtggttgtactcagtcttctttattttccccaagcccagatgaggagctccttaaagatgaaggcttcggtgtatagctcgtgcctgccgtcaagcgcctgtggtcttcgccctagtcttccgctgtttttcgttgtctttgtgtgctgggccttcgctgcccgtgtaataattttatatacgcttccgcttgttaaactctgaattgtatcaacttttggtgtaccttgcctcctgggacaaggattaatgcacgcacgtaaggaatgcccgttgggttatttccggtcgtgacaaaacacgaggcctgggagatctgcttaactctagtgcaggtccaaagcttgccttcggatgtatgagcgtgccagttgatttgatcctgtaatcaacaagagatagaacaaagaaaccgcaattaatcctataaatgatagccgatcggctagatgccgatgacatatcttttatttcaagccgatgtcatgcgtacatcgatcgacaaatatcaggcgcttgacggcaggcacgagctagaaaccaaagccttcatcttccaggagctcctcttctgggtttgggaaaaattgagcaagactgagtacaaccaccgtacccaacaagtcacacccacaagtgcagaataaatgaaagggagtacaagggggttataatataaagggttagggtttgcagtaaacagcattaaaagacacttagttgctcaaagctattttgtaaacacggtcctggagctatacaatattattaatcaaggccgtgaacccacacgagcctgccttaacccaaggcctctgatgattcagaccgaactggcaacccgaccctgggtcccagctcgtcccaatccaacccaggccatccattccacattttagttgttaagcaggttttaagaattaaaacactaacttgggtacattgctcggcttgcccataaccgagggcgcggctattcgaatagattatactctgatcagaggtgtacatctttacccacaagacacatcttcctcacgtgtaaccacgtgccacataccaccacggtatacagacggaagacgtgacatagtttccaacccatcctagccatagacaagagtaccgacccaatcccacgtacggccggaacccccgggacaggtaggcaggactgagcccctagcagcaggacaccggccctgtgccatgacatctcgactaccgggccgcagctcgtgtagccttcatttgtcctagagatgtccatcgacccccgacttcgtccatctccatccgtgtacttttgtttataaccagactgagccacaaactaagccttacccactagacatgtggaagtacggtagtgctttgcaacagaggcccgaagaccggtccttatatggccgaggtgctactatcaaaaccatgcaccccgagcccagcctaaaaccattttggggattctgaatagaggggggcggtgtgaatccaattccacaatatttaaaccattccatagtgtccaggtgatgagaaaattcccaaagtctagagttgtaaaaccacctaatgttacctaattaaacagcgtaccatctacctaaactcatgctagtgataccatgagtagagtgtccactagttggggttttgtttattctagggtgaacaaggaaataataacaataacaataataaggtcataacaaaggtaaataggcatggctagataaaacagtgatagcgcgggaatttaaataaagcgataatgcaataatttaaatcaaaataattttataaaccgggattcaatatgttcaaggatgatgtgacttgccttgctcgctttcccaaatgtcggcttcaacttccacgaagagcggatcttccgaagctgcagcgtctacacgaccaacggaaaagaaaaggcttttactctaataaactccatataacaagcaggaacaaagcacaaaaatgggttcttgacttcttaaggaaaaattagagacttgaacggtccaattccgagttcaaatggccaagttatggccatttgaagtttatatgctctttaaatgaatatttgcgaatttcttcatttaaattttaatttaaaaatggatttattgcgtcagccgaggggaggggcgcgcggaccgggtccacgggagtggggcccacgcggcagccccacggtccacggtggaccgggcgcacacgggctcgcaccggccggcgccgtgggccccacgcgtcagccgcgcccgagggcgcgggcggctgacggccgggccccacgcggcagccgcggggcgcgcccgaaggcggccacgccggcacagccgacgggaggcggcgcgcccgcgcccctatggtcgccggcagcggccataggcacggcggagcggcggccgacagaggggaaggaaggggggaaacgaagcggcggtccacggctcaccccgggtcgacggcgacgacggaaacggcgaccggagcggaggaaggcggcggcgcggctcgggtggacggggtcggcggtgctccggcggtcggcgagcgaaacggaggggtggacgaggtcggcgaggatgcggcgaagccgaaggaggcggcgccgagggggaaggtggtccggggcgacgacggcagcggaccggagctcggcggcga

SEQ ID NO: 25949 - DNA, 37346 bp, Oryza sativa
  unsure (1)..(37346): unsure at all n locations
aggggatgacgggtgggccccacccgtcagcgagggtggcgggcgggcccgcccgtcagcggcacgcgcgcggggaggagtccgaatgggccgcgggggagaggagagagagggagagagatgggccgagccggcccaagagggggggaaagaactttttagagcttttctttttataaaaccattttaactttgtttatgtcttaataattattatttgtgctctgaaaattccactaaaatttatttacgcattttaggcttttaggaaatatacaaaaatcctccaagccttatttgacttttaactttgcatattttaattgttggaggcttgcacccagattttaattattctatgcataatttaaaggatatattttagggtcgttttgggacgcgacaataaagggcagatttaacgtgtcaatcaagcatatagaataaaagtagttaaattagataagatcaactgaaactccgatactaccctaatcggcaaccagaaagcaggctagagattgcaatttgaagcacgacttaatagatcaaactcaactgatgcagcattaagtatgaaaagaagaacaatatctagaaaatcaagccgctggaagtttcatagagtggtagatatatcacataatctaagttaacgtcattatctaacctaatcggctgccttccattagcagatgttagccgattataggttagataaagatattatcgaagactatgtgagatatatgataactcgacgaattatatagacaagattagagtgtcataaagatggaagcactaatcctgagaacataagtcgtcatgacaagttttacctcttgttgaagatcgaaaccgatgcagctcaacccgagagcacgaactcgtcgaaataaaagtaaagcaaaagggtggcgatgcgccgagattgtattggatgtgttttcttgtttttacatagggctcgggtctatttatacccgaggattacaagatacgtccataacggacacgactattatctctaacaaactctaagataccataagtctttacggcagacttttgcccaaacatatctctaaggaaattacatagaatatcctaattaatagatacaatcgccttcccaggactctatccaagcatggcaatcaccttgaagcagatcaacttgaacccaatgactttcaccgggtcatattatcggaatcggctgtatcggctagccccgtccaattcggactctgccgatcctgaccttagccgatttagactgcagccgatttttactctatctccgcaaagatcttcatcttggatttcacttcgatctgatcttcatctccgatgccaatagtgatagaatttaccaaatttggtcgttaacaagttaccaaaatttgtcagcaaactaaatgtaaccacttttttgacaactttaccaaaatttggtaagattgaaaatggcatcaaagtgaacaggcccccaataaaaaaaccaacctagctcttacataagtattgtcattcattatactccctccatctacttttgatagtcatatttcatcttatcacacagaccaagggtaagtaactctacttatcattcatttaaacatgctactagtcattcctcgtaaacaaacaattcattaatatttacatttctcgatgcccatgtagccaatgttgtgtggaagaatgaagagtcatgcattaaatccgagaaagtcattaagatggttgttgaattgaaatattactatcaaaaataaatttttcagatttgaaaatatgactatcaaaaatagatgtagagagtcctatataatattataattattttttatggaacggaaagagtaaatgacgtaagaagatataatgtaatacagtttttgtgtcactgcatcacgactcaagccgcattcgagataagagcatatgaaaacgaagtacatgcgcttaaaacgattatttattagcaaatgattaattaagttttagttatttaaaatttaatttttttgattatttaatatttcaaagtaatttttatatacaaaatttttacataaaacatattgtttaacagttaaaaggtcgtggtaacaagaaccgaattatgtatgttaataagaaaaaaaaaggccctcagagacgtccatgcaccacgtacggtaccagtaattaacgaaaactaagtagcaggtttaacatttctaacagccaacaaattacatcaccagtctagctaatatgataggtttaaattaagaagcacacgacaaactacatcactgagtctagctaattaagcggcagacgtagccacgtggcagcatctcaagccaagacgagcagcgcggcggcggcaaccccggcgacgcggtggtagccgncgncaccaccaccaccacgcgacggggagacgacggcggcggcgctggtattcccgtgcggcggcgtcggcggcgaccccgacgagtaaccgtaccccggcgtgcggtacgacccgccgctgtcgtnctcgtcgtcgccgtcgccgtcgggcgacggcgcaccggccggggagtcgccgccgccggcgcccttggcggcgtggtccgccatgacgcggaccgtcatcctctggcggccttgcagtggcccggcgcgccgctgatgaagtagaagttgccgttcctgtcgaggcggaacctgacgtcggcgccgtcgtcgaaccgctgcaccggcttgtcggcgctgcagagcttgtagtcggcgcgcgacaccaccaccaccgagtcgttcttggcgtacttgaaatctgcacactcacacacacacacaatgccgcgatcatgtcaccaccatggacgacgaatgcaatgcagcaagcaatatgtaatggaaatggcgatcgatcgatcgatctcaccgaggaaatcgccgatgtggaagcggttccgggaggcccagtggttgtacgtctcgtcggtgcccgtcggctggctccaacccctcggcccgtcgccgccgacgacgaacacgcgccccggcggcgccgccgacgccccgccggagaggacgacgcaggcggcggcgatgacggtagccgggaacagcagcgctgctccggccatggcagcaacactacttctgttgctaactgtcacagatggacgaacactaatacagttggctcagctcagcgattggatgattggatgatccgtcgatgtcgtgatctctccggccgggggggaggagggatgattatataggagtggacgtacgagtgcggtttcgcggttgcggacgtggcggtggtggatgccgtcgatggcgggcgtcgtggaggcgtggacggcgggagatgcgcgggcgtgggagggtgacttggtcagaggcggcgatcgagatgcatggtggcacaagtggcggcggtggtggtttggtcctgcaggggagtggcgttgaacgaggcaaaaccaggtgaaataggcctccatattatttgggctttaaaattttttcagatgggccctggcaactgagcaagagcaaaactaacgatttcagatgggctttaagtttttcgtggaattaggaaaaaaaagtctatttagctacctcagatatgggtcgaatctgattcgtaataatgactccctctctaactattaaaaccaacataaaaagtgtgaggtatgtggcacccgggtaccccatattgaggactaagatcgcgtcctcaggggtgggccgaagacccaattccgagtatggtaggtgttgtatagttggtaagctatagcagatatggcaatgaaccacgtatcatgtaatagtaggcaagtatctagattataaggatactgtaccctgattagcgccggcgggcctaagccagtataaaaggcgccggtggcagtctgagggaggtcttcggatcatttttccaccggatacagagttaaacacactggacgtagggtattatctcactctgagggcctaaaccaggataaacttatgtgtcaccatctcttcttatctagcgcaccccataaaatatattgccgatccaagaaatcgatagttggcgtgccaggtagggggcgcttgattattttcaaggcggagatggcatccaccggcgttgagatcaccaacaccaccacttccctgccaccacccaaatctcctttggcgcattcgacttcatcgccgacagcttcggcaaggtctgtcaggtgagcctcggcgtcatcgggccggttacagcctaccgctaccctccaggaatcaagctctctccttcggcagtctcgacttcttcgccaccaactccggcgtcctcaagctggcttcgtgggaactcacgccatcgacaactacaccgccagcacctctcggtatcagcaacttcgttgcttcctctgccaaggcatttcaagtcggcaacctcgacaccagccgcccgatcacgtccaaacccccgcggtgcccgggacaccacggccgctccgcgtcaccgtcctcgactgccgcgggagctcagatccctgctgggttggtttccttgatgagtctgtacgtctctccgactcggaactcgggaagctccaacaacacccggacttcaagccatcactcccgcgaggtcttcatcgtctttcaagagacggacgaggagaaaagggagtacgaagaggagaagcgccgtatccagtagcagcaggaggacctcactcggcgtctaatcgagctgcgacagcgcgnccgtctcgcccaaaatgccatcttccaagtcaagttggaagaacatgatgtcttcaccacgctacagaacaacatgatagccgcaaaggccctcctcgacaacatgccgattccaggcgacgcggcagtcaagaccaccatcgctcaggtgaaggccatggtgtatgccgccgctgtccagcactcggaagtaccactgaccgcttccactgccagcgactcctctggcaagagaccatcccggccacaaaataccgggtcaaggcgtgtcgaggcatctcaagcgggaaggtcacacccaagtctgcgcaccagcgacctgcgcgacaagatcgaggtgggacgtcggctaaacgccgacctccgcaacgtcatgaacaagcgtcgccagctccgcgacgcctaacgtctacggatacatgaggacaacatctacgctggccgctgccacgccgacgtccagccggacggctgcattgtgttaacaacgaaatttggttagcccaaagtcatcatcgacttagagtcagtatcgccttcagagttatggaatcagccgatgagagtcgtcaaatcgccagcaaccgtgttctcgatggagtcggatcaactaaagggaatttatccagaagagtccgagttcaagaaggatgcggcatgtcagtttatctattaattaggaatagtttgttagtttccttttatctttaggaaagtttctttcttgtccgagaaggacttgtatcaacctatgggtataaatatgtacacccgaggtctatgtaatttatcttcacgatcaatacaattcggcgcatcgcctccttttaccttttctactttattttatcgtccggcgggacttggcacctgacgcggggctgcaccgatgtttcgccggcccaggcaattatatcgtttacatcggcgtcgttcaaggctgcatcagtacattcgaccttttggattgctctggtttggatgatatatttgcctacctatttatcatatgtctctgttaatctagtattagcatatcaatttagctctatcggctgcttctcgttttagggtttctgccggtatcgggattagcttagacatctaccaccctgaaaacttagtcaacggcttgattgtctagatattatgtttcttttcatacttagtactgcatcagttaagtttgatctactaagtcgggttttgaaacataatctctagcctgcttcttgattgccaataagggtttcatcggggtttcagccggtgagttatctggacgttgcatcggctcataaggattgcatatacatataagttggatttagccgatgacaacaaaggtttcactgtttaatctaaccttgtggatttcatgacatcggatctccagccgatgtatgctttaaccttcagatcagtgcttattctatcatatcaatgctagacgattggtttatactggacaatattattgttatattttattatcagtagttgattgcctatatatcattatttactaaagtgttagaatctacattagacgtatagctgattgctcaaaaccctatcgctatcggctggtatcggcatcggctattatcggctatcggctggaactactccatcggcttgtcagccgatcggctgttttgtctattatttgcatatcttgtcagttgcaggatcaaactgactggcacacccgcatcttaccaatctttggacctgcacaggagctaagcagatctcccaggccggtgtgttcaatttttttcgtcaacacattgtcgtccatcgaccataccatgactaccgcaaccacttgcccgaccccctcccacaccgcgacgacggcaccgagggcataccagctttcaccgtcaacctacgtcgagtcagatggccggccaacttcaagcccatgggcatcaacaagtatacgacggcaagaccgaccccagcgcatggctttccgtctactctaccaccatccaagctgccgggggcgaccaactagtcatggcaaactgcctgctagtcatgctgaccacagccgcccaggcatgggtgacggggctaccgaggtacaccatcaacagttggttcgaactgaaggggcagttcatcgtcaacttccagggcacctttccccacccgggcactcagtgggatctataccagatcgttcaaggcaacgacgaacgcttctccaattacattcgccgcttcacggaacgtcgcaacaccattctgcatgtcactaacacggaggtgatggcagctttccaacaaggctgcaagaacgatccaattactcataccaaattctagaattgggtcactcatgttaagcagcatgttttaggtacgattcataagcgagttgtcaaaccacattagcttatgtcccctaaacatagccatcgggagataatcaatacctccaacaatattcactataaaaccattatgttcagacatatccacaaaaatagtggggtgtgtcgatgcaatcatcgttggcacaacgagctcaacttatgcaacacgacgaatctttgcatggcttgcacacgtccacacgtgaaaaacgccagcgtgcgacaagcatggtcatcaaccgatggctgatcaaccaacacaaccagggagtagtcaccgactacaagaacacgataaaacacaatagtgcatagccaacatttgtctgaaatacagttacaccgaattgtgttagtagttgtaactccttggatcatacactaattgttcttctaaactaaagcattttgtcaattccagcatgaagataagctttagaatagaataggaaagaccaagaactttatctatctagaaaatatcgatctaatgcaaagttccaaactaagcaaaagataaactgcttggcaacagacaacagtatagccgaccaatgttctcctaggacatgctcgaaactagccatacaactcccattgtcaaaacaactttattagacaaacactaccaaccattggtcatcaaccaaaggtggccatttagcgctagatccacgcgaggatcgagattgggtcaacacccaagtttagctgttggtgctatagtgaagtgggaatcatgcatattcacagtatctaccctcgggcttattctgctagatttggctccaattttccggtgtccttgcaagacatcaggttcaaaataatattgagaagatatgtgcacaataggggcaaccatatgaacaatgtcattccaccacatggaaaacactttacatctttcaccggaccgagtgaaaaatatctcaaattattgaacctcgcaactccaagttgctagaaaattgaggtataatcatttatctccaaatcagaaaagtgtgctctcaaccattgggaaagcaaaatgtcgaccgtagtccgactgtactctaattgagatgttaagccactaggggaaaggcacagagaatcccaagcccataatctaatttcacacatttcaacgactcagaatcctattcttgagtgtgatcatagggatagagtgatctacattaatgcccaaagctatagtcattgaaggcctttacgtgaaatcacccacactatctgtccaaatcatttcatgcagttctcagagaacccaagacgcaaacggacaatatgcgtgatgaattcggcaaaagcatggatctcgtacaacaagaatacgtgtctccatcttgtagacacattaatatcaccatttatgtatgaaggagtttatcagtaaagagcggtcttatccatagccatggatattcaatttcccagaattttcatgcattaggtgattttctgttatttacttggtcttatttagcattgtattcccaatatttatgtcacacagaaaaccatcacatattgatgcaggaaaataaacccatcataatgcttccaaggggagattcaacactatgtgaacacaatttatggaagcatcataacctagaaatccgtatctaaattattttattggaattgcatcaactttaaaagcattagaatgtttaaaagcaccattacatgattatttacgagtccgaggacccacacgcaaaaccaaactatacaaggcctaagcaacaagaaaattagatgcatatactgatgcatgcatgcttgcaacatgctttttgccgatcgatctcaagcatccaaggacgcaagatgcatccatacatgcgcgttacaaggccaaccctaggtcgtgccggcgtgaagtcgtgcatgaagagatgcagacgacactgcgctatattagatagcaaatccaccggtacatgcaagccaagaacaaccgagcaaatcaatctgtcgttaaaaaaaatcaatctaatagcaatagattggaacgacaaaccggtgaacgaagagctgctgataacgtgttgtaaaccaacacgcctattagcggatcaccggatcctttccctgtccctcctacaacaatagagacgtgatatcatgtcgaacacccgcgcccattcctttgccctcaagaacattgcagaagtagacaatgaacacaaatatagggtggagttctctcttcattatagatctcatctggagtacaagccaaccttaaatattacaccctgcccctgtatatctaggagtcttaggaggagatagaacttatctctactctgatttagattggcccacaagaaacttatctcctagagatttgtttcacaacaccaataactcgtctagatttatgtgcggccgataagcccatctgatttgaacggtgccaagtctcatttttgtcatgtatggtgtttactgattacttttgtttattccctcagttaaacataatatagattgtgtgtctaattttaacatttggttactattttaagatggagatcagtgtaaccttcatacttcattcatgctggtttaacagaatgatcttaataacgtgacgtgactcttacagtatgtaacgttacgcgaggtcgtgagtcttacacagaatgcagcctaacgagtactaacaaggttttcaaaaaaacgagtactaacaactacttcctccgttttatattgtaagattttctaacattgccaatatttatatatatgttaatgaatctaaacatatagttttatattgtaagattttctaacattgccaatatttatatatatgttaatgaatctaaacatatatatatatatgtgccgagctctcttgcagtgacagcctgtcctggacagttggttctacgcttcgcactcacgtgccacatggaccgtgtgcgccaatcgtcggcaagcttagcttcaatatgcatggacagcttggagtacttatatacttacttacacagagatccatctcctagctgaaatcctgaaacacttcagcatcagtaaaaatcaaccaggtgctcgatcgatcggatcatccgagttgcagaaagatagcaagaatcccgtcaccaacaatgtccgtggagatactgatggatcttaaccttatcaatggccaacctccgagcgccagtgccgacgacgccgccggcgatcaggcgatgccggccacggggaaccccgtgcaagtcctgatatctcccatcgttcccgtcccggcgttgacggggacgcagcggctttgccgccggcgtacacgggcgtgctgtacctgcaccaccacaagaaggaggaggaggcggcggccgcggcggcgctggggcagttgaacgaggcgaagaagaagcgggagaagtggctcaaggagatgagcggctggctgatggtgctcgccgtgctcgccgcctccgtcacctaccatgccggactcaacccttccggcggcttctggcagcacaacgacggtgagagtcacgtcgccggcacgccggtgctccagtccaacttcccacaaaggtaacaacgacgaactaatttttgcctccgaccacggcgagacccctccattaatctttcttttcaatgtttgatgtgcatgtgataaggtacaccgtgttcttctacttcaacgcgacagcgttcgtgacgtcggtggtgatcatcatcctgctgatgaacgagtcgttctaccactcggaggcgaaggtggtggcgctggagatcatcgcggtgctcgacatggtgtgcctcatgggtgcctacatcgccggcagcacgcacgcggcgccctgctccatctacgtcaccgtcctcaccgtcgtcgtcttcctctacgtcgtgtacgcggcggagctcctgcgcaagatctggtggctcatcatccacgcgcccgtgcacgacaccgccgccaccggcggcggcaagctgcccgccgtgccacaacacatcgtcgagcaggcctcgccgcaccaccgctgccacgccgacgacgttgatagctccatgtcggcgccgccacggtagtccgtcaacgtcgcctatatacttcctccgtctcgccgttgacttttttaaacatatttagccgttcattttattcaaaaaatttaagtaattattaattcttttcctatcatttgattcatagttaaatatacttttatgtatatatataattttacatattttataaaattttttgaataagacgaacggttaaacatgcttaaaaaaaataaatgccgtcaaatatttagggacggatggagtatttaggagcagagacgagagtacatgtgttgtgtaccatgtgtctgtgagtgtaatttcaatttccttgtgtatttcgcaacttttcagcttatgaatcctgtgatgtttggagctaaaaatcagtgatcctttcagaagttgcatgcagaagttctgcactcctttttctttcatgcatgtcggagtgaggaatctttatttcgtctacttggatcactgaagatacacagaattgaccagccaaggaaatgtaaaaatcgatccattaataaatgaaaaacaaatgagtaaaaacatgagaggggtaagagagagagagagagagagagaccaatgatcctttcagttacatgcagaagttctgcactcctttctttcatgcatgtggagtgaagaatcttgattgtctacttcgatcacagaagatacacggaattgaccagccaatgaacagattgtcccactctagtgggtgttatcgtttattataatcttgtcatatttcaaagtcttattgatagccttaggtgctaccaaataactagcaaaatacctgtgctttgcaacggataaaaaaaactttaattttacgtatgtagtcatgatgggtaaaaccctgccaacttatagacaggaagctgaataatacatataaacaaaacgaacaaattaagtgccagtaaaataaaagacgcaagtcatatagtaggaaaagataaaacacccgcgctaacggataagcaaacaaagacaacaacacctcaacaattggtggagagagccaaaggagcaaatagtgagtgcgtaaggagttgacggccactatggtattcaagcaataattaatttaggagagcatattgagataccatattcaagaggtgaaattttgatactagacactttttgatatagctccagagatgcaagattttttagagctgagtattttcagctccacaaatctatggatatggatctacggttacgctgatagcatttagataaatcattttgttcacattttaaataaaattttaaattttaaaccactatagtttaacatacaaactttatatctatcataggtattagatttggagttatgccaaacatgacctactaattaagtcacaagttctaggcgagctcttacatttcgttgacctcacagcatgcatgcggatgcggataaatttcagtgatctcataaaataacatgaattaacagggcttgtactacgcgagcagcttaaacgggaataggagttccatgttcataaataatgatactaactaagaaataaccacaagcccacacgtatagatgtttgatcagcatttgaattggacctagattacatttctgcggatttgtagttatatcgttcaatttctcaatatgtgaaatcctggtatcaattaattgttctgttttagttattgaaccatcgactaaactcaaacagtacaagccggaccgaaccgttcctttttccttttctagaaaacctctcgaatatgtacatgagcgtcctgcatccaggcccacattgtgtagcccattcatcacgcagtggcggagctagccccgggcaggtcgggcgtcgtccaggctcctccgctaacgtcttcactgtaaattaatagccattcatgtctaaaaaaattagtcgaatattactggaaaatgttagtactcattcgggcttcacgatatcaatggctccaccaccgcattcatgtgtgtccgcgtctgtcccttccaagttccacaccacacgcatatattcagcttccatgttgtagaaaaaacattagatttttcttttcccagttaaaaacctgggacactactggagaaatgattttgctggatcgcttaaaaatcacattagtcccggtttgaaaacacacaataattttttttttatatttagtcccggttggtgttaccaatcaggactaagtattatttttactcccggttcaaagacatgtcagagtcctattattttttagtcccggttggtaacataaaaaaacgatgaaaatcctgcctcgagccgcgcgccgtgccttgatctccccgctcgtccttatcccctgcttctgtgctcctcctgccctgtctcatgctcttcttctcctactcccctccttttctccacctcctccccctctcccggcctctcctccccttcgtcccccttcccctctcctccccctctcctctccctggcggaggcagccaggcgaaggcggccgggcgatagcggctgaacagcggcggccgggcggcggaggccgggaggcggcacacggctgggtggccaacggcggcttgttttgtgattttcttttatttttggaatgatttgtaaatttcggtgtaaattattttagatttggggatgatttggtggatgattttgtgaatgacttgtggattgtggatgattttgtggatgggctgagaattgtggatgatttgttgtgcatgatttggggatgatttgtgtggatttgaaggtgacaataaatgcaagaagcaaaaaaataaaggaaaaaaaagcgcctaaccaaccagactaaaatggcgctgggaactttattcccggttggtgttaccaacggtgactaaagattcatttttactcccgtttatatctttagtcccggattggtcgtcctgatttgcaacccaggactaaaaggggttgtaaaccgggaataaagagcccttccccagtagtggtaacgtcaaccagtcaacgggtttggataagatcgatccccttaggacctgtttagttcacgaaaagaaaatttttgggtatcacatccgatgtttgaccggatgtcggaagggttttcggatacgaatgaagaaactaatttcataactcgcctgaaaactacgagacgaatcttttgagcctaattaattcgtcattagcacatatgggttactttagtatttatggctaattatggactaataggctcaaaaggttcgtctcgtgatttcccccctaaatgtgcatttagttttttaatctatatttaatgctccatgcatgtgtccaaagattcgatgtgatgtttttgggaaaaaagtttggggaaccaaaccaggctttgagcttaggtggtgtttggatgcagggagccagggactaaactttagtctctatcatatatgatgtttggacattaatttgaaggactaaacatagactacttacaaaactagttatataaatgagagctaattcgcgtgacatttttttaagcctaattaatccataaatgagagcacatgttttctgtagcatcactgttggcggctgttaaatgtcaattctataccgccaacatctacataaagttcagataatagagcatatattccacagtgttggtgtatatttgtatgcagatgataaaacctgatgttgggaggaaatctggactaaagtgaggagaattacgtatccatacaaggaggggttgtgaacttcatcaaaacattagtaaatcaacccaaaactccgaagaatggatagaggaggactaggagaggagccaggccaaaggccaggccaggagggaacttcatcaaaacatcagtaaatcaacccaaaactctgaagaatggatagatgaggaccaggagaggagccaggccaaaggccaggctaggggggcccagcccaggttcggccgaaccctggtgatcaccgttgatcccaggttttggcatggacgctccagatgcattcctgatggcggttagggggcacttcggataattccccttcctataaccgtcatacctgtcctataaatagacctcacttcattcactctcacacacacttccaagcttgagctgaattataagaggctctattgtactatattgtgtactagaataggaagagagtagaatagaagaagtcggaagaattccggagttgtcggtaatcttctcctatttcttttattctgtttattactctgagttcaatataatattcttcttgagtaatttagatttatctcatgagaattatctcttggttagttcctaaatagcatacaggattattgttcactataaccaactaaaatatagtgattgctttagtgagttataaaaactaaagtagatattaattgcttagacgtggtgtttaggtagttgttatccagtaattactgcgtatcccacagtacgtttgaggtgggtgtagaggtggtgacagccctcgagatcacttaagtcctccctatccgggtacgtagtagagcgatatctgggaacaacgggtttccagtgcctgaagtattgcgttacgattaaaattaagctttccctagatgtttctcactactaaatcctctctatcctagcctatcatctgcttggtgtccttggatgaactgaaggaagatctgatcacacacgttcccttggattcaatacccttggaatactccatagggaaagtactgcatcggtatatccgtgcgcttgcggattttatctgtgatcgtaagaactaccaacaagcatttctggcgccgtcaccggggaacggttgctgatcatttccgaacctagttcatcctcgtatcatttttaagttttttattatacctttacccctgctatcctagagaagtattcctgtcaaactcttctcgaccatggagcaacctcttttttagctgtctgctcctcggggcgaattctatgagccaccttcttcatcggagcccatttatacaactggctatgaaattcgtcccgaactaattagtatggttagggaaaaatcttttttctggctttgatctagaaaatccctaccatcatctgcgagactttgaacaagtctgctcgtgccttaagatgcgtggcatgagacaagaaactgtgcggtggaaattgttcatgttctctcttcaagagagagcaaagaaatggtacacctctaccgttggatgtgtaaacggtagctaggaaaagttgcgagacagattctgtcttgccttctttccagttactcgtattactgcccttcgagtagaaattctcagttttaaacagatcaagaacggatcaattggtgcagcatggtccagatttactaatttagtgcaatccggaccaaccctgtccttacccgagtatgtgcttcttcaacatttccatacgggtttggataaggagtctgcattctatctggacataaccgctggaggatcggtcatgcacaaaacaccgtcagaaggaaggacaattttggatcgcattctagaaaatacttccttcatgacgcaatccaatgaaccccagccggaggcatccgtgtccaagatagaggaacctctaacgatcgagccactcactgaaccatccacttctgctagctcgattgatgagaagtttcctgagcagctgtgaatcccgctccctcgctccgaattcctgccgggagacacggcgccgcgtcgctttgcgtcatctgttgttccgtcattgtcccatcccgagttctcgcggatgcgcgtccccttgccatcgtctcgtcgtcttgttgcccatccactccgggaagctgccaagaccgcgtctctccctctctcttgcgtcgtgtcgccaccaccgcgtgacgtcgctcccgtcgcctcgttctgagctctaccgtcccaactcttggctgtagctttcgtcgactgcgcgtcatcgttgtcccgtcgccattccctctctccgcgcgtcacctcgtgtcatgtcaccgtcgtttcgccgtcgcatcgccaccggtgcgtgacgccacgctgtcgcgtcgccatcccctcccggattcccgctgtagtggctagccagctacccacagttctcccgcgcctagacgccagctcaccgccacgtcccgccatgccacgccgcctataaaagggcccgagcccccatgctcaccacgccattcccatctctcctctctcttctctcctgatttgtctgtgccgctgctcaagccgccgcacctcgcctcccagcgccgccgtcgctggcatagctccaccggagttcgctgccgcctccccgaccgccggtcgccgagccgagcctcgctgccacgtcacgcctccgccccagagctgaaccgagcgagaggaggaagaagaaaaccccaccgctgatagccgggccccgtgcctccttctctctttcagtcactgacaggtgggcccctcttgctgtccgcattagcggaatattccctttccgttaataaatagatttccaaatattccaaaaaatccttttaatctttgaaaattcatagaaattcaaccgtaactccgtttgaccccttcaagttcctatatttttctaaaattgagatctacacagtggcatcattgtttctctgatttgagcttgttttattgccttttgttaattagttttgtttttcacgtttagagcctgagtacgaggaagctttggaggccgcttttgagggagaagaccccagccctgtgcaaggcaagcctctttgatcacattgcccctatatttgcaagatatgtttgtttgataagtgcattgcttagtatacacgataaacatgtttaggcctcggattgtttatacaaccgacggactgacatattagttgcagttagtttacatatgttgttgtttctttacctttgatagctccacaaatatttgcgccggtatcgttatgcgactaccgaggtagtttgcttagccatgctaacgttgatttaccgtgtaggaaactaggttattccaattacatgctaaaaaattcagtatgttgtaccgaggtgctgtgaaataaaatgtgctgtgtaaatagtgatgatgcaaagtcatgcctttgtggtttggccacgtattatcgttaaggaccgtttcctttggaaaatccatccaaacacattacagcgcgaccacacgggtgttgatgggatgcctctggctaagtaaattgttatcacataggagtgcggtgtgccaatggttgtgggatgccgagggtgaggagacgaagtttggatctttatagcccttttgggtgtttttattgcctctattgtggcacgcgatattagtaggagacatcctcgatatttcctgagtggatgaaggctgaccttgcctgatactcggctaagagacttagcccaactaggtggcatgctattttcatgggttagctttggaaaagccttatcacgaacttctgttaccgacgagtaaacagtgtcagtttcgtgccgtgtgggtaaatcgtacaacctctgcagagattaatgaactgttcgaacagccgtgcccacggtcaagggcgagtgtaaggtgtttctcatagtgtagattcatttgacaaatgattaaggaatagtggttattgggaaggaaaacatttccagagtccgcctatgtggcagacggctaacctttgtagttaggaatggatctgtgtgacccggggtgtcgtctaacaccgagatgtcgttaggggcgagaaggtgttgatgtgctgagatagctgggtgaactatgttgttgtgaaagtgaacagaaaataacagaggaagcaaattaattattgttagttaatcttgtgacaagttgttgcaaagcaacttgtggaatgggtcgaggcgtgagcctcctcccgacaactaacattttgactcactaggagttttgtgaaataaatcactttgccaaaaaggccgcttccgcaaataaaaccctagtctccttgtttaaaccgaacatgtcattctttcccctagctcgctgagtacgttaagtactcacccttacccttacattaatctatagagtacgaggatgaagatgtcgactcgaccgctgaggagtgtctctaggagcaagccgagtatgaagacttctagatgtttcgtgcctagcccaaagtctcgcctgtggaataagttagttttctaggtgctttgcctagtgcttagttgcttagtcgcttagtgtctccgcgctgttcgcttatatgccgtcgcttttatggttttctgtaatgttgtgttgcttatctatgggcctgtccatgatggcaacgtttgtaaggactactacctagtgatataataaaacagtttactgtgattcaacatttattctgtgtgtactagctagtgtatcctgggactggtactatctcacaggtaatgcataacaccctggtgtaagttgtcttgtgtttatagctaacgaatatcggggcgttacactccacttcctcaccaggcctcctctggttcctcatgaacctgtctcatcggtggggagatgccatcgagcttccgtccctcaccaaagccgtgcactgccgctcggagctcgacactgcaagtcaaagccaccttcatgaaattatgtcagatctcactaattgctatgtgtcttgcttgatttcttattgtagcaattgatatcccgtgcaatccttgttgtatttatggggttgattttatcactttttgagtccaaatcaaatccgtatccgactaccttttgtgttgaacttggtatccgctcagcctgtctttgtttaattttatttgaacacgggtggacgacgtgagcaaatggacgaagcgggcatgagctgcaaaggcgcaagacaacggacgaaaatgcatcggtgccgattagaaagttgccgattttttaagtaggtataagataacattagctgtaccttcgtctgttcaagccaaggccggaatttccactattaaaaaaaaaggaaggaaatgtacagattaaattccctttgttccatcataaacaagcatcgatcacacatgagttcttttcccagctttcaggtaaacctatcatgtatacaatatattcgttagtcagtcttggtcgtatataattctcatggcaccttttaccctcctgggcctcctgggtgctggcagcttcatgatgtacttcaactaattaacaagtccaattaactgatagtacaattcttcagccacctgaatagcctgaaaatccctttcttgtccatgtttcaagtatatatacaggactgcgcatatatgcacccttccgtcatcttcaccaaagataaagcagagcttttaaggttcttgggaggtacccaatgcaaggcacctctcaaactactccatccgtctcataatataagggattttgagtttttgcttgtaacgtttgacaactcgtcttattcaaaattttttgaaattattatttattttatttgtgacttactttattatctacagtattttaaacataactttttgttttttatatttgcaaaaaaaaaatgaataagacgagtggtcaaacgttgcaagaaaaattcaaaatcccttatattgtgggacggagggagtactcagcatcatcggcccttgatttgctaaagggcaacttagagataaaaaagcactacaatggtaatttagtaattgtttcagtcgtaacagcctctaactccttcctggttgtttgctgctacgccctaattaatttttagccggacacgaactggccactggacacaagccccaattcactaattctcatttccacttgttgcttgatcacatcgctatatatgttttcatccactatatcactgccacttacgtaggcttcatccactaaaccaaatctattttcttcttgcctctaatggttgatgtctaaaatttgacttttagtcattcttgtaaacccatttgtgcgaatgcaagatatatatttttctggggaaagcaagatatattctaattttaaccatgctttcttgcacagttacatatggcgttaactactaatcaattaccaatttattgtcatttacacaggttacgattaatggatgactgatcaattacatagctctatcagtatatgcaatcggccttctcttctacctctaaacgcatgtttgtttccctgtaatcgatgattggaacttcataatatgtccggggccatgcatccaccatacataactgctgtcacgtcctgataaattcatcccgaaataaaaatcattttccaaaaggaataatagaattaattaaaattcgaaaagaaattggcaaacactaaaatacgtacaagaaaaagtcgaatgtggcccggagaatttttggtaaattctccttggtctaaaaggagccctcaaattttagtggaattttcagagcacaaataataattattaagaaataaacaaagttaaaatggttttataaaaagaaaaagccctaaaaagtcctttttccccccttcccttcttgggccggctcggcccaactctccctccctctctctcctctccccccccgcggcccatcgggctcctcccccgcgcgcgcgccgctgacaggcgggcccgcccgccaccctcgctgacgggtggggcccacctgtcatcgcctaccttccgccgctcccgccgccgcccgtgccctagcgccgccgccgccgccgaatccgccgcatcccgccatccccgcgcgccataaagagggggaaatcactccccgcgattccctctccgttttcccccgcttttccctctctctctccctcggatccgtttggaatcgcttccgcaaacctcgccggcgccatcaatggcggccggatcctccgcgccggtttccttcccctccggccgctttctccccctcccggcgctatataattgttccccgtgcctctctcctccgtttccgccactcgccgctcactctccccgtcggaatcgtgcccgcaccgtcttcctctctctccgccgtcgccgccgagctccggttcatcgccgttgtcgctccggacttcctcccgactcggcgtcacctccttcggcttcgccgcgtcctcgccaacctcgtccaccccttcgtttcgcccgccgaccgtcggagcgccgccgtcctcgtcgatccgaaccgcgccgccgccttcctccgctccggttgtcgtttccgccgccctcgtcgtcccggggtgagccgtggaccgctccgttcgcttcccccttccctcctctctctcgggtgccgctccgccgcgccgttggtcgccggcggcgaccatcggggcgcgggtgcgccgccttccgtcggccgtgccggcgaggccgccttcgggcgcgccccgcggctgccaggtgggcccggccgtcagccgcccgcgcccgcgggtgcggctgacgcgtgggacccacggcgccggtcggcgtcagccgcgtgcacccggtccaccgtggaccgaggggctgacgcgtgggccccactcccgtggacccggtccgcgcgccctctctctcggctgacgcaataaacccgatttttaattaaaatttaaatgaagaaattcgcaaatatccatttaaagagcatataaatttcaaatggccatatcttggccatttgaactcggaattggaccgttcaagtctctaatttttccttaagaagtcaagaacccatttttgtgctttgtttctgcttgttatatggagtttagtagagtaaaagccttttcttttccgttggtcgtgtagacgctgcagcttcggaagattcgctcttcgtggaagtagaagccgacgtttgggaaagcaagcaaggcaagtcacatcatccttgaacatattgaatcccagtttatcaaattattttgatttaaattattgcattattgctttatttaaattcccgcgttatcactgttttattaagccatgcttatttacctttgttaagacattattattgccattgttattattaccttgttcaccctagaataaacaaaaccccaactagtgggtactctattcgtggttccactagtataaatttaggtagatgcttcgctgattaattaggcaacattaggtggttttataactttagactttgggaattctcatatcatttggacactatggaattgttggattatggtggaattggatatacacctctcttcctctttcaaaacccctaaaacctgttttcggtggggtttgggtgcatgccagttgtgggaagtagcaccccggccactataaggattaagctcgggcctctgttgcaaagcactaccgtactaaccacatgtctaatgggtaaggcttaactcggtgctcaggctagtcctgaacaaaaggacacggatagagatggatgaagtcgttgcgacgatggatatctctgaggcaaatgaaggctacgcgagctgcggctcggtaatcgagatgtctaggcaaatgaagactacacgggtcggtgcccgttagtcgagatgccatggcactggactagtacgcgggtggtctcacccctatgtgtgtggcgcacccggtctagatcttgttgctaggggctcaaccctggcctgcctgtcccgggataccggccgtaggcagggttgggtcggtacttttgttcacggctaggatgggtgaagggttatgtcacatgtttacgacgggttccaaggccatggaatgcggagtaaagatgtgtcttgtgggtaaagatgtacacctctgatcagagtaaatctattcgaatagccgagccctcggatatgggcaagcctagcaatgtacccaagttagtggtttaattcttaaaatttgcttaacaactaaaatgtggaaaggttggcctgggttggcttgggacgagctgggacccaggtcgggttgccagttcggtccgaatcatcgtaggccttgggttaaggcaggttcgtgtgggtccacggccttgattaataatattgtgtagctctaagatcgtctttataaaatagctttgggcaactaagtgacttttaaatgctgtttactgcaaaacctaacccctattattatccccttgtaccccccttgcattaatcatgcatctgccggtgtggcttgctgagtactgtggttgtactcattcttgctcaatcttttcccccttcagtaagagaagctttggagaagatgtcttaggtggagtcctggcttataccccagttgagcgcctgtggagatggagctgtaggcccgctagtccgctgctgtttatttttgattgtcaggcctgaagcgcctttgtaataatgtaaatattatcgatataataaagatgtgccttttgtatcatgtttgtttggtgcaccccggcttttcctgggacggggattaatgcactagcgttcgggaaaaggcaattttctcggtcgcgacaagctggtatcagagccatctcgactgtaggttaagccaagtggataaaacctaaggacatattttataaatgaaactatttgcgaaagttcctttttcctccttcccccaatgctatttggaaaaggtttattcccttcttcattcttcggatttcaactagtactagatggtcaggtcggcaaagaagaagacatcgtcagttgtctgccgaagctgcagaaggctgttggattcgttagcgaagcgaaggaagcagtgaagccagatgtgaagcaggagtgaagatctcggagaacccgtcgcagaacctaagccaccctctagggtagagtcgttagtcgtgtgtttccttgcttgtgtgtgtagcgcgtggtttgcatcagtggggtgtgatgtaaccatgctaggttgtttgcttaatcaacttgcagaataagcctaacatacatcataacagcaaaagacttagatctgttaaggtcctatccttagtttctaatctgtctctcccctttgttttccctctctccctctccaaacctttgcaacagatggctgacaatgagaaaggcaataaggtcagaagtcaggacattggtacctcaagctcccgagtgaatgaagcaccagacaccagttgtgtgacactagtccaacacctgattaaccagaaccgattgcttatagagatactacagcagcaccagacgccaatgctgaacttgagtcaaatacaacctcaagtgcagttggaggcagtccaagcactcacaccacaagtcagcatgccgccaacatcccgaaggacccatgatgacatgccacatgttgacccaaaagaagcaagtatcatctgttttatgtgtgatgagcaagtgcactatgcaagggagcgtcctcagcagaaaagaaaaacaccaatgcgaaccgaagatgaagtccgtaagatgatcattaccagcacagaatggcctccaccaggaatgacaagacgtcagagaagaaataccttccgaggtgcaccacagttgacagagcatcttttagctaatggaggtagagtatctgatagtgaagattcagatcaagtctcctcagatgatgaagatgaaatggaacgtaaggcatgctctcgttgtggagaaatcggtcatgtcgccagctcgtgtgccactatatgcgttcattgcgaggaagaccatccacccgacaggtgtccaacgagcaggatcacttgtttcttttgtgaaggaactgatcatgtaccaaaagattgtcaattcagttttctgctgacgaagaagatggctaaccaacccgccagttccaatggagagaagcatcaaggaagcaccaatcctcgccaagattacagtttcagcctaactccagtgccaggacagaggaatcaaaatgagaaaagaaaatgccgagtccgggaagatatctgttgcttcaattgtcaaggaatgggtcatttcgccgacaagtgcccaaaaccgagaaacatagctgccggcacgtcagtccacgcaaccccccgcaatcagaagcttgctcctcaacgaattgtcatccatgcatcccgaagcagtcctatagcccgcgttgcaacagctccaactccaatgagtgcactaccacaaggtgtcaatgctcaatttcagccccagccaccagctgacaagacagaggtcagtatctgcgttgtacctttggaagttccaatacagcagctgagaaatcaagtacaagatgaagaacccgagtgtaagaaagttattgtttgttacaactgcagtgaagaagggcattactccaaaaactgtccccaaccaaggcaaaatcggcctccacattttcgccaatttacaggaagcaaccatgccaatcaccaagtagtcagtggagcaaatgcagtacctgttaagcctagtgctagtcagaagcaaccataatactcttgtatcggtgttcaagtacttttgttttatagctgttccccgtcaatcatgtaataacagagaaacatgagataatgaatgagattggcaagtttatgtagggtccatattaagattgcaagtgttgtgtgatgggtacatttggttgatgattaaggagacctagggtctcatttccgtaagctcataatctattatgaatcaaataacctagcgattgatggcgaagaaaatcaagtgatcaaccaaagagacatttgtttggactaagagtttccgatgtgtcttcttcggatcaaaggcatgcacccgttgtggaaaaattggacatgttgctagcatgtgtctcatcagctagtcagctccaacagcaacattgtcacgcccggaatttctatccaaaattccaaacgcttacatgtgtgtgaaccctcgtccaggaatcagccgaggcacacaataacaaattgataatagagtacaaatattactctaattaataagcgaatagaatgtcattacagaggtagatagttcctctcaatcaataaagttctaagcagcggaaaataaataaacggcgcagacggctccactccacaggcagcttgaccaaggctacacctaatcctccacaccatcagcctcattgtagaactcttcctatgatgaatgattgcaaggtgagtatatgacatactcagcaagccacgcagcaaatatgcaagtgcacaggataacaaaggatggcataatagggtttcatttgcaaaagcagcatttagtaaacatttgagaatttaacaaaacagttaagtaataattaaacaatattaatccaacgctatacaacataccctgttgtataggcccaaccattctgaacaaccaccccggctgcacagttctatctccaaaccaggaatgtcccattccaaaccaggagctaatcaaattattaccagtttaagcatcttttactatgatgagaggtgtgagactaatcacgaaagacattgttagacccgcccataaccgcgggcatggctattcgaatagttttactctgatcagaggtgtaccactgtacccacaagacacaaccccacatcatgtcaccatgtgcctcaataccaccacggtatctcggaaaggagttgtgacaatacccctcgcataacacaattcactgcagcgcaccttcctggatcataatcacccccttataaacaaggcatggactccccagcgacccccgtgggcttatctccgccacttctcagtctggtgccccgcaatgaaccatgctatacaaaagataaagccgttgcccatgctggcttgtggttggcacgataaatgtttcacaaccgaaactcgtgaaccggtccttaattgtcatgagcacgaccatcaaaaccatgtgcccacaacccaccattatcaggttttagttggcacattaattaattaactaatcacgattgaccatcgtgaactatcaataagccatcatgaaataatagtgaatcattagttatcccataagtgtactaatgtttctaagcagggctaagcaattatatctaatatctagttgaaccaatataaataaagctcaactagtcaaattaatataacccaaggtatcaaggaataaggtaatcaatgtacaaaagggccataacaaagaataggtcaattccacccaatgacattcgaaaatagatgcaatagttgaatagaaacaatagctttaaataggatcaacatgctcaaagggttgtttgggatctgtgtgacttgccttgctggccttggaactcttcaaactcttcttccgcgaaaacggactctccggaaacgacggaatctaagcagaaaagagcaaaatcaccaaaacagcacaaaaacaagcatgaacagtacatgtggatatttttaatgtgtagatctcaattttagaaaaatttagagacttgaaccaactaaatcggagctaagatgaattagttatgaatttttaaagattaaatcggattaaaacacttaaatcggtttaaattgaattatgacgcaataatgaattatttttgaaaaggaaaaggggatttattgcgtcagcaactagggtttgggtggaccggcgcacgggcggcggttcacacgaacggacggccgagattgatccgatccaaatcggacggccaagatcgatcggtctacgaccggctcacgggataggatcccgatgacgtcagcgatgacgtcaccgacgacggcggcgactcggcgaagaagacggctcgggcggcggacactcgccggcgaacggcggcaccacggcaccaacggagggcaccagcacgtagaggacaacgcggcgaacacaccggtgaccaaaacggcggcggaaaaggaacggacggcgacggcgacgagaaggaagcggcggctaccttcgggttgacgacggcgacgatgctccggcgggttccgacggctgcgaaggggcggacgaggacggcggcgacttggcgagcacgacgacggtcttcccgagcggcggcgacagctggagcgacggcggagcacggctgaagcggcggcggcgacggcgaagctagggcacacggcgctagagctcttccgacgacgagaggcgaaggcgagggtggcggcggaaaaagaagggcatggggatccttttaaaggggctcggaggcgacggcgaaggcccacggcgacggcaacggcgaaggaaactcgcggcttggaaagagggaaaaccgatccgaatcgaactcgattccaacgctttccaaagcgatttagccgaagattccaaaggagaaaaggtagaggagatcccggagatcatttcccctctattgattcggccggagaaggaaagaggcggccggatttggaaggaaacagcggcggcggctcggcggcggcgcgctagggtttcggcccgaggaagacgacgggcctgacaggtgggacccacctgtcagcggctgcgagggcgcgcgcgcgcgcgggcggctgcggactgggccggctgggccgagaagagagagaaggcggttttgggccgactttcggcccaaagccaaaagaagactttttaaaactttttcaatttaaattatttcttaaatgcaattccatttattaaaaatacttccttagctcaaataaatcccagaaaaatctaggaattatagaattaagcaaagtatttaatgaaattttatctggcccaattttatattggaatttattaattagaattagattttcttttcaagacttttaaaataaattctagaaattccatttaaacaacaatttatatattttgaattttcagggtgtgacaaacctaccccccttaaacagaatctcgtcctcgagattcggaagaactggcgaacagaagcggatgagctgactttaattcatcttctcgttcccacgttgattcttcttccgagtgattactccattgaactttgcagaaacggataactcgattcctggttcttctctcatttgtttccagtatacggattggtttctcaccataagtcaaatcctcttggacttctatctggtcaatattagcttcttcggtaggtacccttaaacactttttcaattgcgacacatggaacacattatggactcctgccaaggattgaggtaactccaactgataagcaacctctcctcttctgctgacaatcttataaggtcccacaaaacgcggtgccaattttcctttggtctgaaaacgatgaactcctcgaagaggcgtgacacgaagatacacataatctccttcttcaaaactcaaatctctgcggcgattgtcggcataactcttataacgagattgagccactcgcaatctttcttgaatgatctttaccttttcttctgcttcccttaggatatccgtcccgaaaacctgacgttctcccgtttgatcccacaaaagcggagtgcggcacttccgaccatacaatgcttcgtaaggagccatctgtagactagcttgataactgttgttgtacgaaaattctgcatagggtagattcttatcccaacttccaccgaaatctagagcacaagctctcaacatgtcttccaaaatttgattcaccctttcggtttgcccgtctgtctgcggatgataagcagtactaaagttcagcttagaacccatctcttcctgaagtttcttccaaaaatttgaagtaaactgactgcctcgatcagacactatcttcttagggacgccatgcaaacacacaatccttgccatatacaattccgccaagcgacttccagaataggttgtctttaccggaatgaaatgagccactttggtaagtctgtcgactatcacccaaatagagtcatggcctgatgacgttctgggtaaaccagtgataaaatccatacctatttcttcccatttccattcaggaatcttcaaaggttgcaacaaaccggcgggtttctgatgttctgccttgactctctgacaaacatcacatactgctacgtattctgcgatttcacgcttcatacttgccctccaaaacctttccttgagatcctggtacatcttggtactaccagggtgaatggagtataaagtatcatgagcttctttcagaattgcatcctttagatctttgttgtcggggacactgtcgcgactgggaaaattgccttttcccgaacgctagtgtattaatccccgtcccaggaaaagccggggtacaccacacaaacatgatataaaagacacatctttattatatcgataatatttacattattacaaaggcacttaaggcctgacaatcaaaaataaacagcagcggactagcgggcctacggctccatcttcacaggcgctcaactggggtataagccaggactccacctaagacatcttctccaaagcttctcttactgaaggggggaaagattgagcaagaatgagtacaaccacagtactcagcaagccacaccggagatgcatgattaatgcaagggggtacaaggggataataatataggggttaagttttgcagtaaacagcatttaaaagtcacttagttgcccaaagctattttataaagacgatcctagagctacacaatattattaatcaaggccgtgaaccctcacgaacctgccttaacccaaggcctacgatgatttggaccgaactggcaacccgacctgggtcccagctcgtcccaagccaacccaggccaaccattccatattttagttgttgagcaaattttaagaattaaaacactgacttgggtacattgctaggcttgcccatatccgagggctcggctattcgaatagatttactctgatcagaggtgtacatctttacccacaagacacatcttcctcacgtgttgccacgtgccacataccaccacggtatacggacggaagacgtgacatagtttccaacccatcctagccttagacaagagtaccgacccaatcctacctacggccgggatacccgggacaggcaggcagaactgagcccctagcattgggcaccaaccctccgccgtatgacatctcgactaccgggccgcagctcgtgtagccttcatttgccctggagaatgtccatcgacgcccgacttcatccatctccaatccgtgtacttttgtttatgactagactgagccacaaactaagccttacccattagacatgtggaagtacggtagtgctttgcaacagaggcccgagcttaatccttatagtggccggggtgctacttcccacaactggcatgcacccaaaccccaccgaaaacaggttttaggggttttgaaaggggaagagaggtgtatgtccaattccaccataaaccaacaattccatagtgtccaaatgatatgagaattcccaaagtctaaagttgtaaaacctcctaatgttgcctattaatcagcgaagcatctacctaaattcatactagtggaaccatgaatagagtacccactagttggggttttgtttattctagggtgaacaaggtaataataacaatagcaataataatgtcataacaaaggtgaataggcatggctaaataaaacagtgataacgcgggaatttaaataaagcgataatgcaataatttaaatcaacataattttacaaactgggattcaatatgttcaaggatgatgtgacttgccttgctcagagataacggccttccgaaccttcggcgacgaccacgaaccacgcttcgggaacctccggaacgacagaagctacgcgaagcacacaagcaaagctaaaagcctataaagaagcaataacaacacataaaaagaaagcacagggttctttaggttataacaaacattaggagacttgaacgggtcgattcagagttcgtatgaccaagatatgatcatccgaagtttaatgctgttatatggagatttgcgaattattataattaagctttgcaattataaaacatgtgtaagcgctagcctggaaaagacaggaaggctgcgccgttgacatgcggaccccacatgtcaacctaaaggaccacggtagaccgggtacacagagacggtccacgggtcgacggaagcggaccccgtgtgtcaaccgaggcgagtggccgataaacggactccactagacaccacccgggttgcacacgtggaaaccacgcggctaccgagcgggcacactaacgcggacactacacggtcaccacccgcacgcgtgaacgactaccgacaccggtacacgggtaccggggtcgacgaccgcacaacgggtacggggcgacaccgaaaggacgagggcggggaagcgagaggaggaaaccttaccaccacgcgacgaggcgtgggaacgacaacgacgaacgggcgcggcggagacagacgggcacaacggagacgaacggcgaggggacggcttcggcggcgatccttgggcgaaggcgagacgcggccggcacgaggcttgacgacgcggagccgaggacgaacacgaggacggggctgcagcgatcttgacgaagcgaggacgacgaacgagaacggcttgacggagggacaaacgccacgacgaccgggaacgacgagaggacgaggacgacgacgaccggggccggcgagaaggcgacgagggcagccggcgaggagacgacgagggcagccggcaacggctgcacggaggcgaggacggcgtggaacacgccgcagcgatgacgatgacggaggcggcgccgcaagacgacgagccgggcgagagggaacggtgaaggcgacgacgggcacccgcggtgttcggtcggaggggaggcgaggccgaggactacgtctcagctgcgatgccgaagatgatgggggtgtggccgaccggtgcacggcgtggagggacgggcggccgaacaactccggcgaggcggatggaggggctcgcggcgatggcgttccggcgaaaccgaggagtggacgaggtggagggctacgtcaccatgccgagggaggggacggcagcgtcggctgatgcacgggcatggcgaaaggggcagccggagcagatgtcgacgagtagaagtgagccgggcggccacggtgttccggcgatgttcgggcgaggaggaggtgatgccggggatgagaccggcatcgtgaacccgagggaggtggtggcgacgtcgaccggcgtgcaggcagggagatgaaggcgactggaggcggccggcgcggaggaaatggatgggcgacggcggaaacgcagctccgggggtcacctcgcgaaacggagggcaggccggcgtggaggaggtggcggcgacgctggaggaggcgacggcgcggccggccggcgcacggtcgaggcggcacaggcggctggaggcggccggcaacgtgggagagagagggcgacggtggggaggtggctagagaccacgggagaccgcgggagggggctaaagcgatagaacggagtgcgggggttgcattttataggatgggggagggagccgggcacgggagagggcggaatgtcacgtcctgataaattcatcccgaaataaaaatcatcttctaacaggaataatagaattaattaaaattcgaaaagaaattggcaaacactaaaatacgtacaagaaaaattcaaatatggcccggagaatttttgttaaattctccttggtctaaaaagagccctcaaattttagtggaattttcagagcacaaataataattgaaaagaaataaacaaagttgaaaaggtttataaaaagaaaaaccctaaaagaagtcctcttttcccccccttccttcttgggccggctcggcccagtccctccctctctctctcttcccccgcggcccatcggctcccccgcgcgcgcgcgccgctgacaggcgggcccgcccgccactctcgctgacgggtgggacccacctgtcatcgccttcctcccgccgcgcccgccgcccgcccgtgccctagcgccgccgccgccgctgaatccgccgcatcccgcctccccccgcgccttaatgaggggggaattactccccgcgtttccctctcccgtttccccctcttttccctctctctctccctcggattcgtccggattcatcccgcgaagttcgccggcgtcttcaatggcgcccgagatctccgcgcgcggtttcctctctccccggccgcgctctccccctcccgttgctatatattcgatccccgtgcttcgctcttccgtttccgccgctcgccgctcgctctcgccgtcggtttcgtgcccgcgccgtgctcctctctctccgccgtcgccgccgaccttcggttcgccgccgacgtcgctccggtcctccgcccgactcggcgccacctccttcggcttcgccgagtggttgccgaccccgtccgccgctccgcttcgcccgccgactgccggagcaccgtcgccctcggcatcccgaaccgcgccgtcgccttcctccgctccggttcgccgccgccgtcgctccggtcttcctcccggctcggcgccacctccctcggcatcgccgcatcgccgtcgacctcgtccgcgccttcgtttcgctcgccgaccgtcggagcgccgccgtcatcgtcatcccgagccgcgccgccgcctttttccgctccggccgccgttctcgtcgtcgtcgttgtcccggggtgagccgtggaccgtcccttccgtttccccctcctctccgctctctcgggcgctgctccgccgcgccgatggtcgccggcggtgaccatcggggcgcgggcgcgttccctcccgtcggccgtgccggcgaggccgccttcgggcgcgccctcgcggctgccatgtggggcccggctgtcagccgcccgcgcccgcgggtgcggctgacgcgtgggacccacggcgccgaccgccgccagccgcgtgcgcccggtccaccgtggaccgagcggctgacgcgtgggcccccacccccgtggacccggtccgcgcgtcccctccctcggctgacgcaataaataggttttttaattaaaatttaaatgaagaaattcgcaaatatccatttaaagagcatataaacttcaaatggccatatcttggccatttgaactcggaattggaccgttcaagtctctaatttttccttaagatgtaaagaacccatttttgtgctttgttcctgctgttatgtggagtttattagagtaaaagcctttttcttttccgttggtcgtgtagacgctgcagcttcggaagatccgctcttcgtggaagttgaagccgtcgtttgggaaaacgagcaaggcaagacacatcatcttgatcatattgaatcccattttataaaattatgttgatttaaattattgcattatcgctttatttaaattcccgcgttgtcactgttttatttagccatgcctatttacctttgttacgaccatattattattgttattgttattgttattaccttgttcaccctagattaaacaaaacctcaactagtggacactctactcatggttccactagtatgaacttaggtagatgcttcgctggttaattaggcaacattaggtggtttttataactttagacttgggaaattctcatatcatttggacactatggaattgttggattatgatggaattggacatacacctctcttcctctttcaaaacccctaaaacctgttttcggtggggtttgggtgcatgccaattgtgggaagtagcaccccggccactataaggactaaagctccggccctctggtgcaaagcactaccgtactttcacatgtctaatgggtaaggcttaatttgtggctcagtctagtcataaacaaaagttccccgatttggaaatggatgaagtccggcgtccatggacattcttccaggccaaatg

SEQ ID NO: 25950 - DNA, 11581 bp, Oryza sativa
acggcgcgagcacgattccgacggcgagagtgagcggcgagcggcggaaacgaaagagcggagctcgggaagggtttaaatagcgccgggggaaggaaagagcggccggagagggaggaatcgcgcgcggaagattcggctccattgattgcgccggcgacgattacgggcttgattcgaacgaatccgagggagagagagaggggaaagagggggaaacgggggaggggaacgcggggattaattcccccctcttgattgcacgcggggcggacgggagcggcgggattcgcggcggcggcggcgctagggcacgggcgctggcggcgggcgcggcgagaggagggagatgacaggtgggtcccacctgtcagcgagagtggcgggcgggcccgcctgtcatcggcgcgcgcgcgcgcggggagccgatgggccgcgggagaggagagagagagagggagtgttgggccgagccggcccaagagaggaaggggggggaaagaagacttcttttagggtttttctttttataaaccttttcaactttgtttatttcttttcaattattatttgtgctctgaaaattccactaaaatttgagggctccttttagaccaaggagaatttaacaaaaattctccgggtcacatttgaatttttcttgtacgtattttaaggtttgccaatttcttttcgaattttaattaattctattattccttttagaagatgatttttattttgggatgaatttatcaggacgtgacaaatccaccccccttacaagaatctcgtccccgagattcgaggaggctagcaagaagataggttgggcggtcttctcttcttgtctgacttcttccgttgcgtcttgacgaacttccagcaaaactttaccactcggaactgcttggcttgacctcctgttgcggatggaatcttctcttcacctgacttggaccaggatgcaccttttggctgactcagactaggttgcggtagttcagtgatgcttccgttccagaacttctcatgattcatatcttcggagtcaacctcagacaagttaccacttcacgtcatgcgtcaacactagcttgtcattactaggatactatgtttgtcatcataagaatatcatgcttgtcattcacttctaacttgccatcaactgtctcatattagctttcctggtctccagtgctaggtacttctgctattcgatgccagggtcaaccactctaactataagttatgcttcccaagagaaccatcttatcccacttgatatacttttgacgtcttcccaaataggtttactgctggacttcttattgtctgatcgttatccggccaaatttgaagcttcgttgttaggtgtgattttactctgacctctgtagactaccttcgaacatatcacttggttcataactgggaatagctcccacgaacaagcaactccgattcactttctttatgttcagtttactttccgctattctcttcatgttgtcatcagttagcactcaacgtattcctttacacctttaaccttgatgagttctttcccgttggatcatctcccaggacgtggcgttgcctggtaaccggtgcttgcatttttcactccgggtagcatctgataccgagtggaagatttcactctttgccttcatagaaacacttttacctaggtcatcttgcttacttaatgacaaggtgactgttgcgggggggggcaattactatcaggggtcttccttgagcgatgcagagcatgtttctgtttatcaatcacctttcggcctacttctttcatgctagagagcatctttgccaatcccttttatcaatcttctttcggcttatctctaacaggtggtattctttaatgtggattgcggacgcttctggggacgatgaggtcctttggcttgctgcctttcggtgaaaccttgatgtggttcgtcaaaaagctgcactgactaccttcagggaaatacattgcctgctatctgtatctataccactagggtttaattgccgatggtcatctttagtgcttcctcgagatggggagcatccaaattgttcttctgccacatcacctttgacctttttctgataccaggtaaactaattaccaaccatcgactattatgttctcaaatattgatgtctcctggatctccttaactgttggcaggtatatccgatcttatcaatgtagaggcatgacgggtacccttaggggtttcctccaacactccttatcttgatctgtgaaaggcgtatccaaactcctatcctcaactactgtctcgttggctttttaacccaacacagtttaattgtttttcttttccattcacaggttggttattaactcgaggttagaatatagttcctctgacatgagaccctaggtctcctttgtcagtaaacaattatacacatgatcacatatccgcatctttcaaacgaatcctcatggaacttgtctgtattacacatttctcccttattacatgaatacgaggcactgccttaaccaaaaagggacggtgcttaacatcggtacattgtatcctcaacatgaatcatctctaaacatagcgagctcactgtttacagacatgattatatttatgaattacatgattgctgcaaactttcgattacaccatgataagtagcgaactgaaaaccacaaacatggctgctcattttgattctggagagatatagctggcattgttctagtgactgcatccttgattggttctgtgatgatgtgataggactgcataatgctatcattcacaggagaagcttccttctgattgctggttgaagcggatgacggtcttctgcttggtatcgccctccggaggttgattgcccttggctcggcctggagtaggtcggggagagacacaacttcttccatctacgacaattctttgctgaggctgtcgatgcagagagtggttgctatgatttattgccgagtcaggtgcagcaggaggagcattggtgcattgtttctgctatgggttctgattaacacgaggccttacgggtacggcgtttgctccagtgaccacaatacgattggaatgtctgcttcgtgtaaattggcggtaatgtggaggtcgattttgccttggttggggacagttttcggagtaatgcccttcttcactgcagttgtaacaaacaataactttcttacactcgggttcttcatcttgtacttgatttctcagctgctgtattggaacttccaaaggtacaacacagatactggcctctgtcttgtcagctggtggctggggctgaaattgagcattgacaccttgtggtagtgcattcattggaattggagctgttgcaacgcgggctataggactgcttcgggatgcatggatgacaattcgttgaggagcaagcttctgattgcagggagttgcgtggactgacgtgccggcagctatgtttctcggttttgggcacttgtcggcgaaatgacccattccttgacaattgaagcaacagatatcttcccggactcggcattttcttttctcattttgattcctctgtcctggcactggagttaggctgaaactgtaatcttggcgaggattggtgttgccttgatgcttctctccgttggaactggcgggttggttggccatcttcttcgtcagcagaaaactgaattgacaatcttttggtacatgatcagttccttcacaaaagaaacaagtgatcctgctcgttggacacctgtcgggtggatggtcttcctcacaatgaacgcatgtagaggcacacgagctggcaacatgaccgatttctccacaacgagagcatgccttaagttctattttattctggttaaaaccttggggagacttctcatcttcatcatctgaggagacttgatctgaatcttcactatcagacactctacctccattagctaaaagatgctctgtcaactgtggtgcacctcggaaggtatttcttctctgacgtcttgtcattcctggtgtaggccattctgtgctggtaatgatcatcttacggacttcatcttcggttcgcattggtgcttttcttttctgctgaggacagttccttgcatagtgcccttgctcatcacacataaaacagatgatacttgcttcttttgggtcaacatgtggtatggcatgaggggccttctgggatgttggcggtgcgctgacttgtggtgtgaatgcttggactgcctccaactgcacttgaggttgcatctgactcgggttcaaaattggcatccgatgctgctgtagtatctctataagcaatttgttctggttaatcaggtgttggaccactgccgcacaactggtgtctggtgcttcattcactcgggagcttgaggtaccaatgtcctgacttctgaccttattgcctttctcattgtcagccatctgttgcaaaggtttggagagggagagagggaaaacaaaggggagagacagattagaaactaaggataggaccttaacagatctaagtcttttgctgttatgatgtatgttaggcttattctgcaagttgattaagcaaacaacctagcatggttacatcaccacccaccgatgcaaaccacgcgctacacacacaagcaaggaaacacacgacaaacgaaacactagagggtggcttaggttctgcgacgggttctccaagatcttcactcctgcttcacagccggcttcactgcttcctccacttcactcgcagatcctgcagtcttctggaacttcggcaaacaactgacgatgtcctcttcttcactgacctgaccatctagtactagttgaaaatccgaagaaggaagaacggagtaaaccttttgcaaaaagcattgggggaaggagaaaagaggaactttcgcaaataatttttatttataaaatatgtccttaggttttatccacttggcttttcctacagtcgagatggctctgataccagcttgtcgcgaccgggaaaattgccttttcccgaacgctagtgtattaatccccgtcccaggaaaagccggggtacaccatacaaacatgatataaaagacacatctttattatatcgataatatttacattattacaaaggcacttaaggcctgaccatcaaaaataaacagcagcggactagcgggcctacggctccatcttcacaggcgctcaactggggtataagccaggactccacctaagacatctcctccaaagcttctcttactgaaggggggaaaagattgagcaagaatgagtacaaccacagtactcagcaagtcacaccggcagaatgcatggttaatgcaagggggtacaaggagataataattaggggttaggttttgcagtaaacagcatttaaaagtcacttagttgcccaaagccgttttgtaaagacgatcctagagctacacagtattattaaacaaggccgtgaaccctcacgaacctgccttaacccaaggcctacgatgattcagaccgaactggcaacccgaccctgggtcccagctcgtcccaagccaacccaggccaaccattccatattttagtcgttgagcaaattttaagaattaaaacactgacttgggtacattgctaggcttgcccatatccgagggctcggctattcgaatagatttactctgatcagaggtgtacatctttacccacaagacacatctttactccgcattccatggccttggaacccgtcgtaaagatgtgacataacccttcacccatcctagccgtgaacaaaagtaccgacccaatcctacctacggccgggatacccgggacaggcaggtagaactgagcccctagcattgggcaccaaccctccgccgtatgacatctcgactaccgggccgcagctcgtgtagccttcatttgccctggagaatgtccatcgacgcccgacttcatccatctccaatccgtgtccttttgttcaggactagactgagcaccgagttaagccttacccattagacatgtggttagtacggtagtgctttgcaacagaggcccgagcttaatccttatagtggccggggtgctacttcccataactggcatgcacccaaaccccaccgaaaacaggttttaggggttttgaaagaggaagagaggtgtatgtccaattccaacataagccaaccattccatggtgtccaaatgatatgagaatttcccaagtctaaagttatgaaatccaactaatgttgtcctattaaattgcgaagcatctacctaaatttaaactagggataccacgagtagagtgtccactagttgaggttttgtttactctagggtgaacaaggtaataatcataacaataacaataataaggtcataacaaaggtaaataggcatggctaaataaaacagtgataacgcgggaatttaaataaagcggtaatgcaataatttaaatcaacataattttacaaactgggattcaatatgttcaaggatgatgtgacttgccttgctcgctttcccaaacgacggcttcgacttccacgaagagcggatcttccgaaactgcagcgtctacacgaccaacggaaaagaaaaaggcttttactctaataaactccaaataacaagcaggaacaaagcacaaaaatgggttctttacttcttaaggaaaaattagagacttgaacggtccaattccgagttcaaatggccaagatatggccatttgaagtttatatgctctttaaatggatacttgcgaattcttcatttaaattttaattaaaaaaaaacggattattgcgtcagccgagggaggggacgcgcggaccgggtccacggggagtggggcccacgcgtcagccccacggtccacggtggaccgggcgcacgcggctggcggcggtcggcgccgtgggtcccgcgcgtcagccgcacccgcgggcgcgggcggctgacggccgggcccacttggcagccgcgagggcgcgcccgagggcggcctcgccggcgcggccgacgggagcgacgcgcccgcgccccgatggtcaccgccggcgaccatcggcgcggcggagcggcgcccgagagagaggagggaagggggaaggcgaacggcggtcctcggctcaccccgggacaacgacgacgacgagaacggcggccggagcggagggagacggcggcgcggctcgggatgacgatgacgacggtgctccgacggtcggcgagcgaaacggaggcgcggacgaggtcgacggcgatgcggcgatgccgagggaggtgtcgccgagtcgggaggaggaccggagcgacgtcggcggcgaaccggagcggagggagacgacggcgcggttcgggatgacgacgacgacggtgctccggcggtcggcgggcgaaacggagacgcggacgaggtcgacggcgatgcggcgatgccgagggaggtggcgccgagccgggaggaagaccggagcgacggcggcggcgaaccggagctcgtcggcgacggcggagagaagatgcgacggcgcgagcgcgattccgacggcgagagcaagcggcgaacggcggaaacggaagagaagggcacgggggacgattttatagcgccaagagggaaagagggcggccggggaggaaggaaaccgcgcgcggaggtctcgggcgccattgaagacgccggcgaacttcgcgggatgaatccggacgaatccgagggagagagagagggaaaagagggggaatcgggagagggaaacgcggggaataattcccccctcattaaggcgcgcgggaaaggcgggatgcggcggattcggcggcggcggcggcgctagggcacgggcggcgacggacgcggcgggaggaggaagatgacaggtgggccccacccgtcagcgagagtggcgggcgggcccgcctgtcagcggcgcgcgcgcgcggggaggccgatgggccgcgggggaggagagagagggagggagaagtgggccgagccggcccaagagggaaggagggggagaaaaagaacttcttttaggatttttctttttataaaccttttcaactttgtttatttcttttcaattattatttgtgctctgaaaattccactaaaatttgagggctccttttagaccaaggagaatttaacaaaaattctccgggtcacatttgaatttttcttgtacgtattttagtgtttgccaatttcttttcgaattttaattaattctattattccttttagaagatgatttttattttcgggatgaatttatcaggacgtgacagcggcctgggccgagcaggccgggagggaagaggggggggaaaggcagcccgggagagagagggaggagggagtgggccgagggaaaggggagcccaagagaaggagggagagaaggagagggagagaaaaagagggaggaaagggagatttttgggctgggcttggcccaaaggaggaagagagattatttttaggttttctttttttaaataaactttgataattgtttttgttgcttaataattatttccggtgctctgaaaattcaagtaaaatttgagggctccttttagaccaaggagaatttaacaaaaattctccgggccacatttgaatttttcttgcacgtattttagtgtttgccaatttctttttcgaattttaattaattctattattccttttagcgaatgaattttaattttgggatgaatttatcaggacgtgacaaatccaccccccttacaagaatctcgtccccgagattcgaggaggctagcaagaagataggttgggcggtcttctcttcttgtctgacttcttccgctccgtcttctataacaaacttgcctaacaaaacttcttcactctggactgcttggctcgatctcctgttgcagatggaatcttctcttcacctgacttgtccctggttgaacctttagctgactttgactgggttgcggcacttgaagatggggcttcagttccagaactttgcatagttcatatctttggagtcaacctcatacaagttacccacttcatgtcatgcgtcgagatcagctcgtcattactaagataccatgcttgtcatcatttagcattcaaagtattcctttgcacattcagccctgacgtattctttttagatttctcttatcaatcacctttcgacctacttctttgttcgataataaacacctttgctggtatcttctatcaatcacctcttaaactttgtcaaccaagtactcttcactccgagagttgtggatgcttctggtgacgatgaggtcctttggcttgctgcctttccgtgaaaccttgaagtgtttcgccaaaagctatactaactgtcgttgcctttgatccgaaaaggacgcatctgtaactcttagtccaaacaaatgtctctttggttaatcacttgatttttcttttccatcctcaggttggttattagctcgaggttagaatatagttcctctggcacgagaccctaggtctcctttgtcagtaaacaattatacacatgatcacatatccgcatcttccaaaagaatcctcttagaacttgtttttattaccaatttctcccatattacatgaatacaaggcactgtcttaaacaaaaagggaaggtgcttaacatcggtacattgtttctactatgggttagaattaacatgaggcctcacaggtacggcgtttgctccagtgaccacaaggcgagtgacttgtcttcttcttgcataatggccggagtgatgacgcaggttacgcttcggctgtggacaatctctggagaaatgacctggttctttgctctgataccagcttgtcgcgaccgggaaaattgccttttcccgaacgctagtgtattaatccccgtcccaggaaaagccggggtacaccacacaaacatgatataaaagacacatctttattatatcgataatatttacattattacaaaggcgcttcaggcctgacaatcaaaaataaacagcagcggactagcgggcctacggctccatcttcacaggcgctcaactggggtataagccaggactccgcctaagacatcttctccaaagcttctcttactgaaggggggaaagattgagcaagaatgagtacaaccacagtactcagcaagtcacaccggcagatgcatggttaatgcaagggggtacaaggagtaataatataggggttaagttttgcagaaaagcagcatttataagtcacttagttgcccaaagctattttataaagacgatcctagagctacacagtattattaaacaaggccgggaaccctcacgaacctggcttaacccaaggcctacgatgattcaaaccgaactggcaacccgaccctgggtcccaagctcgtccaaggcaacccagggcaaccattccatattttagttgttgagcaaattttaagaattaaaacactgacttgggtacattggtcggcttgcccatatccgagggcgcggctattcgaatagattatactctgatcagaggtgtacatctttacccacaagacacatctccctcacgtgttgccacgtgccacataccaccacggtatacggacgaaagacgtgacatagtttccaacccatcctagccttagacaagagtaccgacccaatcctacctacggccgggatacccgggacaggcaggcagaactgagcccctagcattgggcaccaaccctccgccgtatgacatctcgactaccgggccgcagctcgtgtagccttcatttgccctggagaatgtccatcgacgcccgacttcatccatctccaatccgtgtacttttgtttatgactagactgagccacaaactaagccttacccattagacatgtggaagtacggtagtgctttgcaacagaggcccgagctttagtccttatagtggccggggtgctacttcccacaactggcatgcacccaaaccccaccgaaaacaggttttaggggttttgaaagaggaagagaggtgtgtgtccaattccaacataagccaaccattccatggtgtccaaatgatatgagaatttcccaagtctaaagttataaaaccacctaatgttgcctaattaatcagcgaagcatctacctaaattcatacttgtggaaccatgaatagagtgtccactagttgaggttttgtttaatctagggtgaacaaggtaataataataacaataacaataataatatggtcataacaaaggtaaataggcatggctaaataaaacagtgacaacgcgggaatttaaataaagcgataatgcaataatttaaatcaacataattttataaaatgggattcaatatgatcaagatgatgtgtcttgccttgctcgttttcccactcgacggcttcgacttccacgaagagcggatcttccgaagctgcagcgtctactcgaccaacggaaaagaaaaaggcttt

SEQ ID NO: 25951 - DNA, 2750 bp, Oryza sativa
tgtttttagattttctttttaatagactttgataattgggggtgttgtttaataattatttccagtgctctgaaaattcaagtaaaatttgagggctccttttagaccaaggagaatttaacaaaaaatctccgggccacatttgaatttttcttgcacgtattttagtgtttgccaatttctttccgaattttaattaattctattattccttttagaaaatgaattttatttcgggatgaatttatcaggacgtgacagcaaccgattattttaccaagtgggtagaggctattcctttaaagaaagttgattctggggatgctatacagttcgttcaagagcatataatctatcgatttggtatccctcaaactattacgactgatcaaggttcaatttttgtatccaatgaatttgttcagtttgtcgatagtatgggaattaaaatgttgaattcttcaccgtattatgcacaagttaatgggcaggccgaggcatctaataagagtttgatcaagttgattaagaggaagatttctgattatcctcggcaatggcatactcgactggctgaagcattgtggtcttatcggatgtcttgtcatggatcgatacaggttcctccttatgaacttgtttatggtcatgaggctgttttaccatgggaagttcggatcggctcgaggagaacagagttgcaaaatactttaacagccaatgagtattataaccttatggccgatgaaagggaagatctggttcaatcacggctacgagcccttgcaaaggttactagggataaggagcgagttgcccggcattataataagaaagtagtacctaaggacttttcggaaggtgaacttgtatggaagttgattctgccgattgggactcgggatagcaaattcggcaagtggtcgccgaattgggaaggaccgttccaaattcataaggtggtgtttaagggagcatacatgttgcaaggactagatggagaagtttatggccgagctctaaatggcaaatacttgaagaagtattatcccagtgtttgggttaatgcatgatcggctagtgttgccgatgcatgatagccgatgtgtttgcatcgccttgggatggtcgatattgttatatcgcccttagttgcttttcactattgtaatcggttgtggtttgccgatgtacgaatggccgatattgttatatcgcccttagtcatttctataattttgtcaatgttttcaacattgtaaaattacgggggcacatacatagaaaattgcaaatttttgcaaatttttgtgtcttagccgattacaacagtttcttacagactattacatggaaatcactgagacaagtatcgctggatagccgatatagccctttgcctaatctgatttatttcttcgatggcttgggcgtcttgagcatcggttccaggaatgactttcaaggatttagtcatctcagcaacgttcttgattgccgattttagccttgccttctgctcttcgacagcttgcaggagatcggctaacttcctgtgctctagatccagttcagcattgcattcttgaagttgtgccaagagttcaatcttgcgagcttcaagccgatcaatattggatttgatcaggccttcagataactgatcaagcttggctttctcttcatgaacaagctgtcgattggtttggattgtagcctcgatgtccttgtgttcccggagatcggctaacctctgcctggctttctccagtttgaattgatgctgctcgaggtagacagctggagtaagagcatcgactaattcgtccggaagagaggcttggatatctgcaaatcttgcccggatcgagccacagttggtcaccaggttatctagtgatgctcctagccgatgggagatgtcttcgagtgttttcttcacatcatcagacaggagagctgttgctttactggtggtgtcttcttctgtttcatcgaggtaatctttgatgtcaaaggagaatagatcggctaagacctgcaagagacaatatcatggatgattaaggatcaagatatgattggccgatctcaagtttatgttaataaaacttactggaatagtaggtgcagctaattgttcctcctcttcaacatgatgactacctgcagccgatggagtgcggccgcctgattctacctgcataagaggggaagaaggaggaggaggctgccaaagggataaatgttagatataatcagcccaagtcagttaatgagatgatagaagtatcttactggtggagctggtttaggggttggagtaaccgatttcttcctcacggcaattttctttctctatatttattaaaattgtgaggaatcggctataaagtaaatgactgcaaaagtggacagagaaagttgcttacccttgccaattgagctggagcagaagggaatggaggagcctgcttaggtgaagccgatggtgttttttcagtatcgcttatttcggctgcggcttggtcgatgtcttcctcgatttcttcttcatccagagcttgttcgatggatggatctagggcgggtagatcgtcagctggcttagctttctttgtcttagccttcttcttcggagccggggctgaagtatctgcagccgatgatctggttctccgcttcttgccggcatcggctggttctctgatgagtccttggagaagtgctgaggtctttggggcattgta

SEQ ID NO: 25952 - DNA, 1939 bp, Oryza sativa
caactcaagtctagatacctcaatttctgcaaactgaccaaagagtagctcatctcacctctgagtttgtctccatagaagctgagacagtcgtctgtgttcccacggagtctcagcttgatgacatggccggttctgttgctgcacctgacaccccaccagctgcaacaatcctcgccctgccatgatgcgaggcggctgttcgggtcgaaaaaggttgcctttatggcgagaagtgcggccctctcatcggcgatgcagctccggtccgacgacgtcgatgcagcaaaagggatggatgctgtggctggtgagaacaaggggaggagaaggcacagcaatgctatcttcagagtttcaggaggaggaaacctgggctcagccattctggttttcttctttttctgggggaatgaatggatgcaaatgtaatatgcaaaaatatatatttgctcatgaatgacacttcggatcatgttatatagtgactactgttagaagaaaatactgatcctcttttccttttttctttttggcagtagtattatgttatctctgtcattcgagtcatgatgaagtgtctggtccagttgatttgaatgtgatatttgcgtcctcttcatggaattcccctgcacccggtcatacggcaatgaaatcttactagtcaacaaaagcaacaagtttttgcttgcatttcgacctcacgcctggtattgtaagaactcagatgtgggtgatctgctgctcatttccagtgtgaaagtcagcaggagctactgatagtctgccctactgaagacggtgtgatttgtgcttgcaaattggggcatattttctgtggctgttcctggtcagacgccaagcacaacggctgtagatgggtttccacgcttttaccatgacttgccacatatgatgccatgtctgacagggagcagcaactgagtggcctgaaaggggattctagatcaaccaaagttgaattctgtgaaatcttgtctgttattttgtacacatgtttgatgttattttcctgctggatttaattttcttaccattcatttccaccacttatctatgtagacgagaaatataacaagagggtgcaaaagtttataccttaagtgaaacctacgtgtgtttccaatgtatatcataatatttcatctacaaaaaggtaaatcatatttcacataaaaaaggtacatcatttttaatcctgcttagctgctgcctgttatagcattttatccttaaaattatttcttcatcactgttgtcaaacctataaacaataataaaccgtttatgaaggcacaaaacttgcactgcagaaaacatctgctatggctggtttcctgaattcgataagcaacaaacatcatctgatattacacatggatacagatagaggaagattgatccaacaaaacaatcgcactgaacaaatctgacgatgccgattgtgacgacagttgcatcccccataagcacagttgaattttcatggagctcttcttccatccgtctctttacatcttccttctcttacttgggtttctgccactctcatcagaacttgattctgacttctgttgttgcattgcaggcattggtactctctcagcgtctcagtgataccaccaagaccgatggaggtgaagaaattgatccagaatcttgtgttcttcggatgatccattagaaagattgaatcaaaataatctttcattttaggatcgctcagtctcttattgagttggcgaattccaaggtgatctgataactcatggaacagtatttttatgaaaattcttgaagacgacgtggtatcctcctctgtcaaacggatgtaaaccaaaacatgccatggaagcgcgtcggtggccaacaaatgcgcgaaaaagttggcaacattccccagcttatttgtgtc

SEQ ID NO: 25953 - DNA, 4332 bp, Oryza sativa
gtttactttatttacttacctttttattctgattttctacctttattcaaattaatccaaaaacttgtgctattaattggatagatgtcttaactccctcctttcacttgtctttagatgccgtgttacaagcctgagtacctgtttggcgttgagggttttgtccaggagttgcgtacgatgtcctttgtcattggatttgggaatgctcctttttatgcccagattcgtcatgatcgtcatgaagaaaagtgccgagtcaaagtcaccttgaacagcaatagtgaagatatcccctcagtaatgtttgaagctggaggaagaaactacatccatgcatgtcaggaggtggcaaggatcgccataggagagctccgtgatcgctacagtgatcagttggtcgacactgagtatcgctatcatcctcgccaaccccagggaagtgaccgtggcagttaccttgagactgaaggaattgagaatgatgttaccacaagacatttggttgagatgttgtgggctatggatgaaagtcgtgcggagactgtgttagcagctcaagatcgtgaagatcggaatcgtggtaagatttgcaagctagaagacaaggtggatcgtttggagaaggaattagccgcattgaagggagaagcaccgccgcagaaggccaggattcgtcttaccgcaaggaagagagctttatttgtccctcgctatcaactggcgccaaaggttcgtgtggtggagaaagaagttgccccagctcaagcggatcctccggtcatcatcataagtagtgatgaagaagaagaatccaagcgcatcaattccaagattgagtgggtagcaactcaagatgatgaagatgagccttcaatcgacctcctatgctcggaagaactagagtgacttgttaagtcgttgtcttagatcgttgtgttagtttgcttgttttaagtttgtttgtgtgtgtgggtctcgcatgtgatttacatcagtggtgggatgtaattgcatgtgtttgtttgcttttgagtgttaggaagttggagagtttagtggtgtgggagtcttcagtttgtaataatgaaactcagttaagatcaataaaagttaaagtaattctctgtcctaagtagtttcccccgttttctcttcttatcctatccataccagatggtgaacactcgtagcaatgggaatggtcccaacaaccccaataataacatcaatggagagaatcccactctggcccaagttcttgctcagcagacacagcttatgaacatgatgatgcaacaatttcagaatcagcaaaaccaagggaataatcatgcacctccacagaacaagttagcagaatttcttcgtgtgaggccgcctgttttctctagtaccactaatcctgttgaagctagtgattggctacatgccatagagaagaagttggatttacttcagtgtactgatcaggagaaggtctcatttgcatcacatcagttgcatggccctgcctctgaatggtgggatcacttccgtcttaacaggactactgctgaacctatcacttggcttgaattcaccgctgctttccggaagacgcatataccatcgggggtagtgtctctcaagaagaaggagttcaggtcgcttacccagggatctcgctctgttacggagtatctgcacgagttcaatcgtcttgctcgttatgctccggaagatgtgcgcaatgatgaagagcgccaggagaagtttttgggaggacttaatgatgagctttcttacccacttatggttggagattaccctgatttccagaaattagtggataaggctattcgtcaggaagacaagtacaatcgcatggagcagaagaaacgtcggattgctcaattcaagacacaacagggaaataatcagaagccgcgtcttactttaggaccccagtccatgccacagggaggttcttcgtctgttgttcgtccgcaacgtcagttcttcaacaacaatgctggcaacaacatccgtaatcaagctccacgtcctgttgcagctccagcacagcaacaacctgccaagagggagcaaggcagcaagcccgtggtgtgtttcaactgtggagatccaggacattatgctgacaagtgtccgaagccccaacgcgtgaaggttgtccctgcccagagtaactctgctgtaccagcatcaaaggcccgtgtcaatcatattgctgctgcagaagctcaaggtgctccagatgtgattttgggtacgttccttgttaactcagttcctgcaacagtacttttcgattctggtgctacacattcattcttatctatgagttttgcgggaaatcatgggatggaagtagaagatcttagacgtcctttgatggttagtaccccaagtaatcaagcactctttttgcaacgtagcccctctgtcagaatagaaattcaaggagtaccatttctggccaatcttatcttgttagaatccaaagaccttgatgtcatcctagggatggactggttagccagacataaaggtgtgatagactgtgccaacagaaaagtaactctcaacagctatgatggtcgagttgtaaccgttcatgcattgtcttctgagtctttaaggtcaagactgaatcaaataactttggaagagattcctatagtccgggagtatcctgatgtgttcccagatgatttaccgggtatgccgcctaaaagggatatagagttcagaatagatttggtacctggaacaactccgatccataagagaccttatcgaatggcagccaatgagttggcagaagttaagaggcaagtagatgatttgctacagaaaggatacatcagaccgagttcatcaccatggggagctccggtaatttttgtggaaaagaaagaccatactcagagaatgtgtgtggactatcgtgcactaaacgatgtgactatcaagaataagtatccactacccaggattgatgatttgtttgatcagcttaaaggtgccactgttttctccaagatagatcttcgatcagggtatcatcagttgagaatcaaagaggaagatataccttagacagcttttaccactaggtatgggttgttagaatgtactgttatgtcttttggacttaccaatgcccctgctttcttcatgaacttgatgaataaggtgtttatggaatacttagacaagttcgtggtggtctttattgatgatattcttatctactctcgaaccaaagaagagcatgaggaacatcttcgccttgcattggagaagctacgagaacatcaactgtatgctaagtttagcaagtgtgaattttggttgtccgaagtgaaattccttggtcacgtcatctcagccggaggagttgccgttgatcctagtaacgtggaatccgtaaccaattggaagcaaccaaagacagtttcagagattcgcagtttcctaggccttgcaggatattatcggaggtttatagagaatttttctaagattgctaagcccatgacacgactgcttcagaaagatgtgaagtacaaatggtcggaagaatgtgagcggagttttcaagagttgaaaagtcgcttaatatcagctcctattttgattttgcctgatccaaagaagggtttccaagtatattgcgatgcatccaaacttgggttaggttgtgttctgatgcaagatgggaaggtggttgcctatgcatctcgtcagttacgtccgcatgagaagaactaccctactcatgatattgagttagctgcagtcgttcatgcattaaagatttggcgtcattatcttttcggtactcgtacagaagtgtacaccgatcacaagagtttaaagtatatctttactcagccggatctgaatatgagacaacggagatggttggaattaattaaggattatgacatgggaattcattatcatccgggaaaggctaatgttgtagcagacgctcttagcagaaaaggttattgcaatgctacagaaggacgacagttgccattggaattatgcaaggaatttgaaagattaaatttgggaattgtcggtagaggtttcgttgcagctttagaagcgaagcccactctaattgatcaagttagagaagcccaaattaatgatcctgatattcaagagatcaagaagaatatgagaagaggaaaagctattggtttcttggaagatgagcacggaactgtatggttgggtgaaagaatctgtgtctgtcacgtcctgataaattcatcccaaaattaaaattcattcgctaaaaggaataat

SEQ ID NO: 25954 - DNA, 1016 bp, Oryza sativa
ccaaaatttaaattttggccaaaattcagactggaatttcgggtctatcggtacaccgagagcacattctcttcggttgaaaagtttggattcagcaaaattagtttaattaaattcagacaaattttgctgaaattttaaaattaattttgtccggaaatttccaacatctccaaaaccgattgtattactcctcaaaatattggtggtttccgtaatattgaaccgtggtcattaattattactagctacatgatcaacatgtctgaattaacgttggcacgtccgtactgtacagtacgtactactcccttaccaggttgttgccggtctcgggcctgatcccggcggccccggaggcgaagttgaggccgcgggcgaagtcgccgggctgcgccatggcgtacgccgggatgagcggcgggcggaggccgagcatgtcggcgagcatgtccaccacggtgaggccgttggtgaagcgccccggcggcgccgcgccggagaagtcgatcccgtagggctggtagttggcgcgcgccaggctcaggatgttgttgttgttgccgctgtccaccagcgagtcgccgaagatgtacatgcacggcaccagctgctgctgctgcgccgccgccgccaccaacgccggcgacgccgccatggcgacgacgagaagcacgagtgctacaggtgatctagctttagtgtgcattgtgggggcgctagctgcgctgtggcgtcgatggattatttatattggtctttgtgaatggaggagtgtgggtgtgtgtgtatatatagatatagaggtaatataatatggttggttggaagatgatcgatccgtcgtggatgcatgcacatgcatgccggctcgtgaaatttctgactgatcacgggaaaacgcaagcagactgtattgtgttgtgtggctgggccggtgactggtggaggttaaagtaaatgactcggggtgcctcagccgaaaaaggcgttgcgatcaacatagcggcgacaac

SEQ ID NO: 25955 - DNA, 809 bp, Oryza sativa
gtgataattctgtagctcatgtttagcaagtttgagtatgacggaaagctgaacccaacatttacagaaggttcatttgagctccccttttcaagtattagagcatacataaacgagccaatcactccaaggtttgttctttgtactagttttactatatgacatcatcagaataaatgagcactgtaatcgtccgattgtttggaagtcatcaagactcactagaataaatgacaattctacttgcaggtttgtccatgttagttctgcaggagttacaagacctgagagaccaggcctggatttaagtaaacaacctcctgctgttcgcatgaacaaagagctgggctccattctaacttacaagttgaaggtatgcgccatttttcctttattattgtgcatttgtgcttattgattcacatcatgtctaaatgcttatcgcatgtcctttcagggtgaggatttaatccgggaaagtggcattccatatactattgtgcggccatgtgctctaacagaggaaccagctggagctgacctcatatttgaccagggagataatatcacagtatgtagaggcagcatttgtttgttggctttataagatgccacgccattctttcttctccataagatcaaataaagcatcagtttcatataagtttcctgtattttttttttcagggaaagatatcaagggaagaaattgctttcatttgtgttgcagctctggcaagtccaaatgcagtagagaaaacctttgaggttaaaattctgcaactcattgcaagacactacttgggaca

SEQ ID NO: 25956 - DNA, 538 bp, Oryza sativa
ctaaaccgcacatggaacatgaatctaaatccagctaaacaagtggcttaccaagtctacatcgggccccagcatgctcctcgccttctcttcatttctagcctgaattgaaatttgaaatgttagatcaacattaagagcagcaaagatccaacaaaagagggagaagttggactatccatgtaataatgaatgaaaacagagaagccaaaagtagataagcttgacaagtattgtaccaatactcgaacgggtattcccttattccgcaggatatcaaccactcttcgtccaacgccaccggtagctccagtgaccagcaccacatcagaagattccattttctttggcacctcaccaggagcagagccagtgaaactgctaagaatggactctacaatctacagattgaacagacaaaacatgagcacaatgccaaatgtgaaataactgtaacgagaagaggtgaaaaaaaatcccaatacagtgagtaaaccttgagaggattcggtggcccgttgaagaaatacagcgtcct

SEQ ID NO: 25957 - DNA, 531 bp, Oryza sativa
cgctgttgggcgtctacgacttcaccgccggcctgcctccgtcgccgccgattggtgcctccgcctacacggctggcctattatgccaccgctgttgggcgtctacgacttcaccgccggcctgcctccgtcgccgccgactggtgtcctcgcctatacggttggttggtcacaccaccgttcatgggcgtctacgacttcaccgccggcctgcctccatcgccgccgactgatgcctccgcctacacggctggcctattatgccaccgctgttgggcgtctacgacttcaccgccggcctgcctccgtcgccgccgattggtgcctccgcctacacggctggcctattatgccgccgctgttgggcgtctacgacttcaccgccggcctgcctccgtcgccgccgactggtgtcctcgcctatacggttggttggtcacaccaccgttcatgggcgtctacgacttcatcgccggcctgcctccgtcgccgcggactggtgcctccgcctacacggctggcctattatgc

SEQ ID NO: 25958 - DNA, 706 bp, Oryza sativa
ggaacagacattctacttcaacaacttcaaatatttcggtttagacgagttgggcaacaacatcaactctcctccaattatttgtcttcacggttggcctactacgcaactgccgatagaggatctcatcgttatcatcggctgctacatcgctattgactggatcaccgacatcgtcatcttcatcaacatcttgtcaagcctcatcaacatagcccactctgctgccgttgatgggaaacttcgtcatcatagtcggctatctctgttgccgccaatcatcattaccgtcggatgcgtttgtcgccgccgattattttcttcatcttcatgattggtggatttcgccatcaccgttgatgcgcgtctacgtcttcatcgtcggtttgcttttgtcaccaccgactgttctttcgttgttgttgggcgcctacatcttcactgctagctgacctgactgttgccgactggtttcttcacctccatggttatgcaacttcattacatttgattggtggcatctttactaccactgacatcttccgttacttctgatgagcaatttcgtcttcatgttggtcatttcatctccatgccgactgcgtcagttattgccaatagacaattttgactatgacacaaggacaagctatatgctcaggggctcatcaactcaagcgtgaggattatatctccaatttggact

SEQ ID NO: 25959 - DNA, 1928 bp, Oryza sativa
  unsure (1)..(1928): unsure at all n locations
gtgggaaccgtgtaagagaaagaatatttaggctctacattatgatttaaaggcaggggctgacccggccttggtcaaggcctatgctagcccattgcactttgggttaagattgaacttacatgatggaattttgtactacgtagtgagatttcaatccaaatcctagcattgacccgtggcctgggtctgcccctgtccaaaagtatgcatatgcacatgaaagcatcgaggtgatctcaattatatggaatatatatgcacgtacatgcatcactgcacatgcacatacctacgagtacatccttttaacatacaactggagagatgaaagcctgttgatacatccacaatctcagttaagtatccacacatgcataattatgaacatcagaatttagaccttgtgagtgaagtcatgcaccacatctaaggtttttctccattgtaatgattttctagtctggtttctagaatgaaatgccgttataactagcggcggcaatgcgagaaaatctaaaatttatcttgcgactagttaagctaatatgattgaaatgtactcgagctacaataattacaactagcggatattttcgtgtaattttttcgtagagcaagatttcaaaaagttgagttgtattttgagatacaactcttaggtccctcaaatatttggattgcaatcaaaatctataataatataatttgattttgattttgagattattctttgttggtcatatctctttttatgattgctcatacaaataaaattacgagtaaattttataaaactacagtactttgatcgaagtattataaaagtacagatttaaggcgtcgtattataaaactacatatttaacacaaaatttatcacaaaactatagatttaatactagagtatcacaaaactacatattttacagcttaaattcctaccactactgctatgttagagtgataaatgtgtagttttgtacttaacatgatgcaaaacatgaactgttgtgataattttattactaaatttatagtttggtgatcttccaccttaaatatgtagttctttgatgaattcggtcctaaatctgtagttttgtgatacacctttttaaatctatagttttataatagtttgtcaaagtatatgtagttttttgaaatttactcaaaaataccgaataaaatgttcttaccattagaacatttaaaatcccaaaaataatccaaaactcatcaagcgggcacatttgtacgtggtagaatttgggcttttggcccattttgtggttgcatcgaagcattgggccattcttttcgctgtcgttcaaaaggccacttaccacaattgggcccatccagaaacctcttggtcgcagccaccgcctanggttgcgctctctcttttatcccagcgccgncacgccacctttccttcttcctcctcgncgncgacgaactcccggccatctnncgcatggtcgcctcctccctcccttncttccgactcatcgctgttcatctcctcaacctaacaccccttttncgcgtgcgtgtggtgagttgtggtgcagggtcgagaaaagcagtgacccgatcggagatcaaggtgcagaaggggnccttttcgggtttccccccttccccaaaaanccaatttctcccagtncggcgagaagcggcgaccgcctaacccgcgcctccaaggtcaccaacccccctccccccaaaattctcccaaccctcctctcgccaacctccatttcaacccccctctctctccggttcttgcaggtgctggagcagctcagcgggcagaccccggtgttctccaagggtaggttaagctctccgccattgccgtctctctactctagtttactcttagcttcgttgtggtgatgacgagagtttgcgggggg

SEQ ID NO: 25960 - DNA, 583 bp, Oryza sativa
gccattgccgtctctctactctagtttactcttagcttcgttgtggtgatgacgagagtttgcggggggcgctttctttgcagcgaggtacaccgtgcggtcgttcggaatcaggcgtaacgagaagatcgcgtgctacgtgacggtgagaggggagaaggcgatgcagctgctggagagcgggctcaaggtcaaggagtacgagctgctcaggaggaacttcagtgacaccggatgcttcggcttcggtatccaggagcacattgatcttggcatcaagtaaaggccccgttactctttctcggatgaaacatttcgcttttcgtatctgcctgtttatgttagtcctgtgcctagaagattttaaagcattcattgtctccattcccttttgtgacctaggatagcgcttccaatatttgcttgaaattgcctcattcaatagatttgttttggattgatgtttacaagtgatagaattttattagttgtaagttgctaaacctgaagatggtttttttaagtgttctcgggtcattgacaattcatttggtacctaggaattgttagcatactgctaatg

SEQ ID NO: 25961 - DNA, 3609 bp, Oryza sativa
  unsure (1)..(3609): unsure at all n locations
catccgattcaactcgggggaatttgggccatccatgtggcctcccggtgccacctcactatgcccgcccaaagtaatagctcaagtaggctcaaatatgtgctaaatgaatagcaaatgctcaaatcagataatgtaaagttgaaaaatcattcaaagtcagtaccatgttggtcctaggctagaaaatactatacgcgcaagcctagatacaaacggtaccacaagatagcacttgtaggagatgacaataacaagcacacgatagcggcgatgacagtgttagtgaccctatcaaatgtaaaattgacagcgatccacttgtaggagattattaggtagttgtgagggcaataaggttaaaaaagagacgacggagacattctcaaagaatataagcatttctaacaatgaatctggacatatctatatcaagattcatagctagaagttgttatattttggaacgaaggtagtaaacacaaccattacttcatttgaaacgaaaataatctatatagcacatacaagggaaacattacggattaacaattgtcaaccttcctaatataggagaacagctgtattttgttaatcatatgtgtcggacatatatcgcatcagttagtatggctgttgtcggcatttagctttcttttgaacccttgacactaatgaactagagatccaagacttgttcatctgagcaatttcaccagagcgccaacaacacagacgaccatcttcgccacctgtccatccaaaaatgcccctgttttgcccagtatgagtgtttgcggctggatatacggttctaacaacgtctgtatggcctccttcaaggatagcttccgcggaactattgccccttcaagaccagctcttacagggaagtaacctattgtccctgcagttgtgccgccaatcacccataacttgtcgtcgggcagagagtagtgacaatcaacaaaatagtccacctacaaaatatagtaaacagaattagacgttgagaataaattgtctaggtaatttgcctccctggactgctatattgcattgccaaccacgctaattaaacaatgaagcatcatgggcagccacatcgtgtagtttcacattgtggcagcaatccctctgtttcgccacatcaaccaatctagagagcaggaaaagctgagttgacgtttagactaagtaggtggacagcaatggaggcgtagtgagcatagttgaaaaaaccggaccggtggatgacccggtgaacacctcggttcaccggtccagcggtcgaaccgacgggttggacggttgaaccgcggtttaataaggtcatctagtttatatgttttgaacttttgatacttgcacataagggcacgtggtgggatggtcagcgcagccggcttacaacctggtgaccaaaggtcgaatctcctccgtgagcgatttggcattttttcaaaaaaaacaaaaaatcgtcttggtaggctgaagaactaaatgggccttcgtgtggcccatttacactctcgcatgtcttagcccggttcaaccgatagcagtttattgtccgtttcacctcaaaaccagccggttcaagcggtccaaaccggttcgattacatggccggtctttctattgaaccgaaccgagctaacctctggtttcggttatttccggttcaaacgctaggccggtccggtttttcactatggtagtgaggtcccgtaaacgggaatgtaacacttgcaacaacagtgacaaggcatctagaggagatagtcagttcagtaagctgtgaaaaataaagatcaagcaaattttgggttcatatgagaaaatgacaagagggtgcaacataaaatgatgcatgaggatattggattggctccatgattggagagaataggtttctgtagccagcaagaatggtgactggaatggagagttccctatagtgtctccacagtggaactgtgcaaggagtaaagaaagacggtcacgcactctatataccctaaacaagtgcattggagattatgtcaatgtcctaagcaacaagtaaaaaagaatagagggagtatatctaaaatttggctagttctggagttagttgatgaagacgattacagatataaggtgctacaatatcattcatttcgtgaagttctgtaatctttttgtaccatgagccaaatgaagaaagcaatgaactaatgaggtgtgattgtttgaatatcataactctctaatattaatataaaaaaaactgtcaattaccaaataccacactacatgccaacaaatgctgagtagctagaatgtataaaggcaaatattagaaactcacatggtcaaggttccacctatcagttgccaaggaacgagcatcatctatattcagttctctactcccatcattccagtcccaggtactgtgagaattcaacagcaaaaatcacaattagacttttgtccttatttatttattagaagcttggaatataagtcagatgacatggcattgtcaaaccagagaaagcaaaccgaataaactaccttaatgtttcaatgtggctcaagcaccaaatcttctggtatgtgttgccaaaaaatcccacttttgcaacacaagtctccacattcataacctatggaagatcatatatcagagaactatcacccaaaattgacatcttcatacaaataacctcatgcanaaccattaaaattaaaaaaaaaatacttcaaaagggaaatattgtaataccacaattaaatactactaacaaccaaaaaaagaatatgcaaaactacaactgcatccataacatacaataattgtaagctctattgtataagaattaacaaacaactatggagattaacagtagcattgttataagaatctgtgaggaataaaattgtaagctctatcatgtacttcacgaacaaataacagcatattacacacatgcccagttattgaagttacaaaaagggaaaaaaacatcatgcgcatttatcatcgtcatatgaaacaacaaaggaacataacttgaagtactaatgggatacttcagtaaacaacaaacatcaaagtatcaaaccataacctgacatagcaagatatgtaagacaaggcatttgggcacaggaaaccaactaaacatacagatagcaaatgattgtcctcgttcatgtcaccatcagtgtcaaaaacacatattaatccatcaactgctgcagaaatgagtttgctatgctgatgtggtgcaaattttacctgtccaaaaaaggtgacaacataaaaatttataatcacccagaatacagaaatagtatgagaggaacagtagcaaatacaagatattttcacaataaaatgcattcaagtgattcagtaagcacattatcaaaatgtttagagtagtgatgaaagtagttgtctcctgtgatataaaaatagttgtctccatgaagagtagaaaacatacaaaaccatccaagcatcactttgtaaaatataatggtgcatatttgatatctagtccatcaatctaaatgctgataatgcatggtacggagacagcagatcattagatc

SEQ ID NO: 25962 - DNA, 594 bp, Oryza sativa
gcagccctccggcggtgattcgcggcaatgaagcggcggccgaggtgcgggcgggctcggtgagcgcgacggcggcgactgcgcggcgcggcggtggctatagtggcggcggcgcgtgggcggagacggcggtaggcgggggcgcaaggggcgagcggcgcggcgacgataggaagcacgggagggcgcggcgagggcgagaaacgagagaggaagacgcggggagcgatttataggtgcgggagggggcggacgtggccggggaggtggccgatttggccggcgacgtggggaggagagagagtgagagaggtggattcgaaatcgaatcccgccctctcgagcgcgcgcgcggccgggagatgcgggggaagaggcggcgacgtggggaggacgcgggagcggcgcggcgtgggcacgggaagagcggaggaggcagcggcgacatgggcggttggagcttcggctctagcggccggaggtgggagacgaccgacaggtggggcccacctgtcggcgtcccgagagagaggagggaggggcggctttggcccgcccaccaggaggggggaccgcgggagagggatgggccga

SEQ ID NO: 25963 - DNA, 1692 bp, Oryza sativa
  unsure (1)..(1692): unsure at all n locations
gcattgtgtttagagacacatcggtttagttaggactgtctcggtaaggtatgatcttctgtcttagccgatataaagacacaactagctcggatataaccatgactaccttatgtattaatcaactaaaggtgcatatgttttatattagatttacttgttatatatttgaacaaacgttgctacacaatgagtttcatgtgtttttgtttgcagaggtactcgcttgggcgaaggaaaagagactgagcgtaacgaattcatggatgatcaaagaagttgattgggaccaaaccaagaccttcttcaagtccacttccatcttaacatgtcacttttggtccatagaagacaagagataaagttctacatgttttgaattcggattcgggcctcctgacagcatcaacttcaaacggatctagccgctaatctagaaggaatttcggggcccatgagtacttgttggaaagcttatggagtctactttcatatggatttggtcccacgtcaaaattcctaccgagctgtcgagaatttgcaaaacaagccacgtatctcatccagtccgaatctgatttgggttttgggccttgtaattatgtcgtgggcttagcccaagcgggtgtgcgccctaggccaaccctaggacgtccctaatcacatttattcagtagccgtcatcgtttagagtcaggttttgcttagattattcagtcaagaacagttttgccgctagatcggtttgtggaaccccaaattcgagcgcttaatcattcatatgcaattgtgttgcaatctatcttggtattgattgtgttcttcgattcgcatgcaaggattagccttctcggcgaggtcaaccgggttttcgcatggttgataactangaggagacgtgtgctgtgattgcagggctcagtagcgtgtttgttcagaagctggatcgagttgtgtcgcactcccgcccaaatcattgttantcagancctttcgaaagatcnggacntgacatcccctcatcaatagatttgttatatccatcacattagcaagatctatcagcttatcgaggattagattatcatatccattctcgtgctgcatcggttagtttcgacctactagattgttgttgataatataaaccttgttaagctgacagattcatgctaatgttttatcggggtgctagccgataaattatctggacgttgcatcggcttacaaggattacatacaagttggcttatccaattgcagcaaaactttcactgtttatctaatcgtttggattttacgacatcggaccttcagccgatgtatgctttaaccttcggatctttacatgttctatcatatcattgttagccgattggtttctactggactatattattgttatattatattatcaacagtcgattgcctttatatgttatttatatcaagcgttagaatctacatcagaattatagccgatagctcaaaaccctatcccaatcggctagtatcggcatcggccggaattaatctatcggcttgttagctgatcggctatttgatccgttgtttacatatcttgtcagttgcagggtcaaactgactggcatgcccgcatctcatcaacctttggacctgtactaaagctaagcagatctctcaggccagtgtgtgtttttcgcatcaaca

SEQ ID NO: 25964 - DNA, 1477 bp, Oryza sativa
atgggtgcgactagcaaaaccatgcacccacagccaccattcagtcgcattttagttggataattacgaccatgaagcatggccagatgtctcgagcacgcagctcattctgatactaaaaggtctaaaactgtaattaccccatcaactgagctagtggtaattaagcatggctaagcatatagttctagctatgtcatcaaagtaacacaagctaggcgatttattacccaaggttgacaaagaacagatatcaagtaaacatggcacaagcgagcagataggtaaaaccctgaccccatgtaattagcaaaacatgcatatttatttgcaaacagtaaaacatttgtaaattgggatcaacatgctcaaggggaatgtgtgacttgccttgcttcttcactttgatcttccgaactcttttcctcgcgaccgcggacttccgaaacgacggattctacatgctggcacacaaaacgaggaacaactctaataaaaaccaaggaaacagtacataaaaactaaacaaacatgtagagctcaattttagatgaattttgcaagttgaccggttcaattcggagttcgaatgaattagatatgaattttagaagttttgagccatttaaatgaatttctagaattattaacgaattatgacgcaattattatttatttttccaaaggaaaagagggttgctgacgtcatcaaaggggaggggcggcgccggcaagcgggccccaccggtcagtggcacaagggagccggtccaccgtggacgggaccaccgagccggtccaccgccggtccacgggaaccgacggcctggattggcctaagccgatcggacggccacggggcgcgcggctggggcacggtcacggctcaaagccggccagccgagtgatggcgcacggcagcgcggccaccggtgatgacggccgacgacgacgcggggagcggcagcgcatcggacggtgccggcgcacgctagggagcgccggcgcggcgcggtaaggtgaggcggcagccgactgcccggcacagccggcagcggcgcggagcgcggcggcggcgacccggtcggacggccaccggcgacggcggcgcgttgtgagcaggcacaggaggtggccgacgaagggcaggaaggggagagggaggggagtgctcaccgaccggcacgacggcaaacgggcggccgacggcaaggaacggtggcagcggggctcctcggaaagacggcggcgacggagctccggcgacgggcgtcgctcaggaaggggcggacgggctcggcctcggtctgaggaaaatcaaggaggggctaggaggtcagaactggtgcgaggtaaatggaaacgactgccgaccaccacaatacgaggaggagctcaccggcgacgagggaggtggagctcgggcggatttccggcgaagagggccagtggccaaggatctccccgtccctgcgga

SEQ ID NO: 25965 - DNA, 724 bp, Oryza sativa
  unsure (1)..(724): unsure at all n locations
cttttaattaaaccaaactaatggcacatgcacttcataatctcttttaatggttctcattcaaaatttattccagtgttattagtactgtacatctattactgtactaatggctcatttaccagcaaaagttgtacaatactgttttatttaatcttgctgcaataaaataaatttagtatgttgatgttatgactttcttttgaaaccagttattcaaaattacaaaatttgtgacctcgtttccaactgttttaatttatttcgcaaagcttggtttactttatttacttacctctttactctgattttctaactttattcaaattaatccaaaaacttgtgctattaattggataaaggtcttaactccctcctttcacttgtctttagatgccgcgttacaagcctgagtacctgtttggtgttgagggttttgtccaggagttgcgcacgatgtcctttgtcattggatttgggactgcccctttttatgcccagattcctcatgatcgtcatgaagagaagtgccgagtcagagtcaccttgaacagcaatagtgaagaggtcccctcagtgatgtttgaagctggaggaagaaactacatccatgcatgtcaggaggtggcaaggatcgcatangagagctccgtgatcgctacagtgatcaattggccgacactgagtatcgctaccatcctcgccaacctcagggaagtgaccg

SEQ ID NO: 25966 - DNA, 688 bp, Oryza sativa
tggagctgcaacaggacgtggagcttgattacggatgttgttgccagcattgttgttgaagaactgacgttgcggacgaacaacagacgaagaacctccctgtggcatgggctggggtcctaaagtaagacgcggcttctgattatttccctgttgtgtcttgaattgagcaatccgacgtttcttctgctccatgcgattgtacttgtcctcctgacgaatagccttatccactaatttctggaaatcaggataatctccaaccatgagtgggtaagaaagctcatcattaagtcctcccaaaaacttctcctggcgctcttcatcattgcgcacatcttccggagcataacgagcaagacgattgaactcgtgcagatactccgtaacagagcgagatccctgggaaagcgacctgaactccttcttcttgagagacactactcccgatggtatatgcgtcttccggaaagcagcggtgaattcaagccaagtgataggttcagcagtagtcctgttaaggcggaagtgatcccaccattcagaggcagggccatgcaactgatgtgatgcaaatgagaccttctcctgatcagtacactgaagtaaatccaacttcttctctatggcatgcagccaatcactagcttcaacaggattagtggtactagagaaaacagccggcctc

SEQ ID NO: 25967 - DNA, 610 bp, Oryza sativa
tgcagcccttcctgcaacttcttcttgtcctcctgaggttgaatcttcttgattgcattaatactcctttgagttacctcaatccccctctcatgaacaagaaatcccaaaaactgaccagccgatactccaaaagcacactttgtcggattcatcttcaggccatattttctagtcctctcaaaaaccttcctcaaatcggctatgtggttttctacctccttggacttaacgaccatgtcatcaatataaacttcaactaaccagccgatcagatcatagaatatgtagttcatggccctctgatatgtagctccagcactcttcaagccaaaagtcatcacaacccactcaaacaagccaattgcaccaggacacctgaaagctgtcttatgaatgtcttcttctgccataaagatctgattgtaacccgcattgccatccataaaacttaatatcttaagccctgaagcagcatcaaccaatttatcggcaaccggcattgggtacttgtcctttggggtagccttgtttagatcccgaaaatcagtgcacactctgaccttgccatttttcttgataactggaactatattagaaacccactcag

SEQ ID NO: 25968 - DNA, 750 bp, Oryza sativa
  unsure (1)..(750): unsure at all n locations
tataccgcaactgtgctttttgattccggtgctacacattcctttttgtctaaaagttntgcgagcaaacatggatggaagttgttagtttgggagcctttactagttaatacgcccccccccaaaaaaggggggnnccaanatnccaaaggtattttcgacatagtattgtccttctgttactatagaaatagaagaagttcttttcccatcctcgcttatcttgctagaatccaaagatctagatgttatcttagggatggactggttatctcgtcacagaggagttatagattgtgccaaccgtaaggtgactttaaccagtagcaattgggaaaccgtttctttctttgtgtcctcccctaaatatcatggtgtgaacttaaaccaagttgctctacaagagattcctatagtacaagactacccagacgtgtttcccgaggatttgccaggtatgccacctaagagagacatagagtttcggatagacttggtgtcacaccctgaaaattcaaaatatataaattgttgtttaaatggaatttttagaaataattttaaaagtcttgaaaagaaaatctagttttaattaatacaattccaatataaaatgggcccagataaaatttcactaaatactttgcttaattctataattcctagatttttctgggatttatttgagctaagaaagtatttgtaataaatggaattgcatttaagaaataatttaaataaaaaggtttt

SEQ ID NO: 25969 - DNA, 1340 bp, Oryza sativa
  unsure (1)..(1340): unsure at all n locations
taggtaaacgccccatagtaagaggggtagttatgaaccctgtgcaccacccccatgggggtggtgaagggaaagcccccattggtagaaaaaaacccacaacaccttggggttatcctgcgcttggaagaagagctaggaaaaggaaaaaatatagtgatagttttattcttcgtcgttgtaagtaaatacgtaactaggaatatggaaaattgcatttttggaatttgcaataatgggatgggcgaacgacgggaattaaacccgcgcatggtggattcacaatccactgccttgatccacttggctacatccgccccttatccagctaaaggattttctcttttttccattcatcattattctatttattctgacctccatacttcgatcgagatattggacatcgaatgccactctttaaaatggaaaaaaaaggagtaatcagctgtgacacgaaaaaaaaagaattcttttgtagctcatcatttattggcaaaaatagaaaaggtcaatatgaaggaggagaaagaaacaatagtaacatggtcccgggcatctagcattctacccgcaatggttggccatacaatcacgattcataatggaaaggaacatatacctatttacataacaaatcttatgataggtcgcaaattgggggaattcgtaccaactcggcatttcacgagttatgaaagtgcaagaaaggatactaaatctcgtcgttaactgaattcagaatagaaagattcaaaataaaaaatacccagcaagatattgggtatttctagctttcctttcttcaaaaattgctatatgttagcagaaaagccttatccattaagagatggaacttcaagagcagctaggtctagagggaagttgtgagtattacgttcgtgtattactcccataccaagattagcacgattgatgatatcagcccaagtattaataacgcgaccttggctatcaactacacgatagttgaaattgaatccgtttagattgaaagccatagtactaatacctaaagcagtgaaccaaatccctactacaggccaagcagccaagaagaagtgtaaagaacgagaggtgttaaaactagcatattggaagattaatcggccaaaataaccatgagcggncacaatattataagtcttttgctgtgaccaaatctgtaaccctcattaacaaattcagtttcagtggtttcccctgatcaaactagaggttaccaagaaaccatgcatagcactgaatagggaggcgccaaatacaccagctacacctaacatgtgaaatggatgcataaggatgttatgctctgcctg

SEQ ID NO: 25970 - DNA, 617 bp, Oryza sativa
gcacaggaatggtctacggaatggacggttgagatctaatcctatccaaaacggatggccgagatcaacttgatctaccgcggtctacggctgacgtcgacgatgacatcggcgatgacgtcaccaccgggggcggctcggcacgcacgctcgccgcgaacgatggcgcggcggcgcaaacggagggcacctacgggtagcgggcgacgcggcgaactcaccgcaagcacggacggcggcggacggcaaccagacggcgacggcgacgaggttgaagtgacggcggcgttcggttcgactgacgacggcggtgctccggtgatcttcgacggaaacagaggggtggacgaggacggtgacgacttgtcgaacctgacggtggcctttccgagcgacgacgacgacctaagcgacggtatgatccttttgcttcaatgccctgaactcacgcttcttcaaagcaacaactcctacaggtatgtgtgtcttattgaatgcctcagagaactccgcccaagtgattggttgtccttctgctctgatcacccggaaatgatcccaccattctgatgcaggtccttgcaactgatgtgaagcgaaaacaactttctcctgat

SEQ ID NO: 25971 - DNA, 643 bp, Oryza sativa
cgtggtgggttcaaacgtctacaccaaggatacagtagatgatctcgatgacaagcaaggacagggtttcatgtcagctgatgatttggaagaaattgatataggtccaggtgatagacccaggccgacattcatcagcaataacttatctccagaattcagagccaagctgatagagcttttaaaggaatataaagattgcttcgcttgggagtattatgagatgccaggactcagccgatcgattgttgaacatcggcttcctattaaaccgggggttagaccataccagcagttgccgaggagatgcaaagccgatatgctcgatgctgtcaaggctaaggttacacgtttatatgatgctggttttatccgtccatgccgatatgctgagtgggtttctaatatagttccagttatcaagaaaaatggcaaggtcagagtgtgcactgattttcgggatctaaacaaggctaccccaaaggacaagtacccaatgccggttgccgataaattggttgatgctgcttcagggcttaagatattaagttttatggatggcaatgcgggttacaatcagatctttatggcagaagaagacattcataagacagctttcaggtgtcctggtgcagggctgcag

SEQ ID NO: 25972 - DNA, 1494 bp, Oryza sativa
acactctactcatggtaccactagtatgaatttaggtagatgcttcgccgcttaattaggaaacattaggtggttttacaactctagactttgggaatattcatatcacctggacattatggaatggtttgattattgtggaattggattcacacctccccctctattgaaaacccttaaaatggttttaggctgggctcggggtgcatggttttgatagtatcacctcggccatataaggaccggtcttcgggcctctgttgcaaagcactaccgtacttccacatatctagtgggtaaggcttagtttgtggctcagtctggttataaacaaaagtatacggatggagatggacgaagtcgggggtcgatggacatctctagggcaaatgaaggctactcgagctgtggcccggtagtcgagatgtcatggcacagggctggtgtcctgctgctaggggctcagtcctgcctacctgtcccggaggttccggccgtaggtggggttgggtcggtactcttttctatggctaggatgggttggaaactatgtcacgtctcccgtccgtataccgtgatggtatgtggcacgtggttacacataaggaagatgtgtcttgtgggtaaagatgtgcacctctgatcagagtataacctattcaaatagccgcgccctcggttatgggcaagccaagcaatgtacccaagttagtgttttaattcttaaaacctgcttaactactaaaatgtggaatggctggcctgggttggcttgagacgagctgggacccagggtcgggttgccagttcggtctgaatcatcgtaggccttgggttaaggcaggttcgtgtgggttcatggccttgattaataatattgtatagctctagggtcgtatttacaaaatagctttgagcaaccaagtgtcttttaatgctgtttactgcaaaccctaacccctatattatggctcccttgtactcccttgcatttattctgcacttatgggtgtgtcttgttgagtacggtggttgtactcagtcttgctcaatttttcccaaacccagaagaggagttcctggaagatgaaggctttggtgtctagctcatgcctgccgtcaagcgcctgtggtcgtcgccctagtcttccgctgttttttgtttgtcttcttgtgtgctgggccttcgccgcccatgtaataaattaactatttacgcttccgcttgataaactctgaaatgtatcaacttttggtgtactttgcctcctgggacaaggaataatacacgcacgtaaggaacgcccgttgggttatttccggtcgtgacagatcatcacttgatggtatcagaacctccttgaccctagaacgagctttagatcccaagccttagcaatattttcgaaataaaaatccttccttatttgtgaaaatcctctagtctctctctgtcctgctgcttcatttatcgtcaaaatctgatctttaaaa

SEQ ID NO: 25973 - DNA, 19108 bp, Oryza sativa
aggattcgagctcgattcggattcgtttttcctcccgaaccctaagctttccttcgccttcgccggccgccgtgggcctccgtcgccgccccctagcccctataaaaggacccccgggacctcctctatccgccgccaccctcgctttagctcgccaccgcttgtagtgccgattccgcgtcaagtcgtgcgccgccgccgccgaagggagaccagccgtgcaccgccgccgctctggtcattgttgtcgctcaggaaggccaccgtcgggatcgccaagtcgtcgtcgtcctcgtccagccctccgtttccgccgaagaccgcaggagcaccgccgtcgtacgccggcgagcgtgagttgccaagccgccgttggtgatgacgtcatcgccgacgtcagcattgcgttacccgtagacccacggtagaccgattagatctcggccatccgttttggattagattagatctcggccgtccgtttcgtaggccgtccgttttttggtgattttgctcttttctgcttagattccgaccttcccggagagtctgattttgcaggagaagactttgaagagttccaatgccagcaaggcaagtcacatagatcccaaacaaccctttgagcatgttgatcctgtttaaagctattgtttctatttaactattgcatatatttttgaatgtcattgggtgggaatgacctattgcctttgttatagcctttttgattattgattatctattctttgtcacttggttaataattggattagctagaacattatatggttttagctaaagtgctagaatgcttagccatgcttagagacactagctcgtataaatggggtatcttatgattcactattatttaatgatggcttaatgatagctcacgatggttgatcgtgattggttaattaatcaatttgccaactaaaacctgacaatggtgggttgtgagcacatggttttgatggtcgtgctcatgacatttaaggaccggttcacgattttcggttgtgaaacattaaccgtgccaaccattagccagcgtgggcaacggctttactttttgtataatatggttcattgtagagcaccagactatgaagtggcggagataagcccacgggggtcgctggggagtccatgccttgtttataagggggtgattatgatctaggaacggtgcactgctttgaattgtgttatgcagagggtattgtcaccatctctattcgggtacttggtaagtatcgcgacgcatggttgacatgttgtggggctgtgtcttgtgggtacagtggtacacctctggccagagtaaaactattcgaatagccgtgcccgcggttatgggcgggtctaacaatgtctttcgtgattagtttcacacttctcatcataataaaagatgctataactggtaataatttgattagctcctggtttggaatagtatattcctggtttggagatagatctgtacagccgggtatggttgttcgggatggttgggcctgagcagcatgggtgtgctgtttagtgttgattaaaattgatgattaattactctactgttttataattctcaaatgtttgctaaatgctgcttttgcaaatgagccctatattatgccattctttggtatccttgtgcacttgcatatttgctgcgtggcttgctgagtatgtcatatactcaccttgcaatcattcatcagaggaagagttctacagtgatgctgatggtgtggaggattaggtgtagccctggtcaagctgcctgtggagtggagtcgtctgcgccgtttatcttattttttttccgctgcttagatctttattgattgagaggaactatctacctctgtaatgacattttattcgcttattaattagagtaataattgtattctattatcaatttcttattgtgtgcctcggctgattcctggacgagggttcacacacatgtaagcgtttggaattttggatagaaattccgggcgtgacatcagtcctgcctacctctcccggaggttccggccgtaggtggggttgggtcggtactcttgtctatggctaggatgggttggaaactatgtcacgtctcccgtctgtataccgtggtggtatgtggcacgtggttacacgtgaggaagatgtgtcttgtgggtaaagatgtacacctctgatcagagtataacctattcaaatagccgcgccctcggttatgggcaagccaagcaatgtacccaagttagtgttttaattcttaaaacctgcttaactactaaaatgtggaatggctggcctgggttggcttgagacgagctgggacccagggtcgggttgccagttcggtctgaatcatcgtaggccttgggttaaggcaggttcgtgtgggttcatggccttgattaataatattgtatagctctagggtcgtatttacaaaatagctttgagcaaccaagtgtcttttaatgctgtttactacaaaccctaacccctatattatggctcccttgtactcccttgcatttattctgcacttatgggtgtgtcttgttgagtacggtggttgtactcagtcttgctcaatttttcccaaacccagaagaggagttcctggaagatgaaggctttggtgtctagctcgtgcctgccgtcaagcgcctgtggtcgtcgccctagtcttccgctgttttttgtttgtcttcttgtgtgctgggccttcgccgcccatgtaataaattaactatttacgcttccgcttgataaactctgaaatgtatcaacttttggtgtactttgcctcctgggacaaggaataatacacgcacgtaaggaacgcccgttgggttatttccggtcgtgacagatcatcacttgaccgacgcgctgctccacagcctcgctgctcagacatgttaaacgggaaccaactttcgccaagatgaatacgaaaaagataccccgaggagaaacccgggtcgcgtcatccgacccgaaatagttataggctggatgggcccgagcctggagcggctggatccgcctaccgacgaagtctgcagcgacttcatatcccgacaagccccgttctcggagatcatcgatgatgtcaataaatgactgaagagagggggtcaaagggggtttggctttccaggtcggaatcttgtccggttgatcctcgggaacaacgaagacagggttcgagtccttgatctcaagatagaaccacctgttccgccacttactacgggaagaaggacactggaaggggatataacgcgacttcatgccatcacaaagtcggaacctgacgcaaccagataccctattggattccatccaacgcagttcatagtagaaacggaagagatcgagaaaaggctctaccccaatgtaggcctaacagagatgaacaaagatactaagaaaggtgatggaattaggattcaaatggagaagagaaagaccatagaaattcaacaccaggagaagaaactcggaaggtggaggaagaaaaccgcagagaacgtaatcttcgatcgcaactatgcgacccaagaggggctgaggatcagtacctcctacttctctctccatgtctccacggctgggaagggcgccgtcctcctgaaggttcttcaacgtcgtgccggtggaagacgacttgtcaagatccattgctgttccaagatcgccggaaaacaagcctgagttggcgaactagggtttcttgcggcggcggagaaggcaaggagcgctggcaggcggtgtgtgttcaacaaggttggtagacttcaaaatgagctcccaaaattcctttaaataagcgcactaccgacggtgcaaattccaaggaacgaagagagatccccgccggaaatctctgggcccgttacgcgcggcagttttctagacttcagttcaaaattcactcgtgaccgttgtgcttcaaacggcatgctcgactatgttctatctccgcggtcctcgcaccaggaatgacaacgttctcgacacccgaagtcgtaaatggttgcacgagttcattttaagcagaagtcgggggctactgtcagggttacgggtcaggcataccctctacccttcgatatacgttacatatcgacatggcatacccacgcgcacgcagatgttttctacatatcctaaggaaacctttcacgaaatctacagatgggaagagtcattctcggacagaactgggtcgtcgatgtatcgtattgggtctgatatctccgagtcctacttagagacctccagatctgtgatataagagggacccccccggggagggcatagatcatcgaatctcagagccaacacaatccacacagcctacaaagccgaagtctacaaggagccaagtcatcgagagctagtcgaatccactcgactacgatctcgccggatccgacaagttccatcgttccctttgtaatctgtgttttccaccatataatcccatatctactggattagggctattacctaccaaggggcctgaaccagtataattcttgtcttttgattgttcgatgtcgtactacgtagatccttgtaccaacgtaccccaataccctctatatccggtctacgggtatcacccgtcgacagtctccaaactctcaaaatgcatatacagatcctagaacttgtcaaagtgtatcatctagatcccaaatcgacacatcccctcttggatcctacgtggcgctgatgtgacctgccacatggacgtgacgtgtccttttttttcttcttttttttcttttccgttttcttctcattatttttttcctctctcctactcgggtcacagagaaaagagaagaaaggaaaatacaacagaagaaaaaaaaagaaaaaagaaaatttttaaatgagtcccatttgtcagtcaaaattatgccatgtcatgttcgtgtgacatgccacatcagcggcacgtaggatcctgaaggagctgtggcgatttggtatctagatgacacactatgacaagtgttgggacttgaatatgtattttgagagtttaaggacctagataacacaccgctacaaatttaaggaccgcccatgcactttactcttctagaaataaatttatacttaaaaatataattttagagtactacttttttctgtaaccaccttcattcaaatttctcaaagtcttattcaaaccctcccaccgtagccacagggtaatctatgtcatttttttcctattaaattatcttttgagtgcgacattccttttaatttgtcattttagtgtgacatgtttattcttttaggatggagggagtaggtgatgagtatatcactagcttggatatgaccatggctacttttttattcaccaaccgtaggtgcatgcttattatttaagttttatgtattatatatttgaacaaacgttgctgcactatgagtcctgtatcctctcatttgcagaaatacttgcatgggaaaaggaaagaagagcgggctcacaaagtgtttggatgatcaaagaagttgattgggaccaaaccaagatcttccccaagtctactcctaactcaccccgtcacttttggttcatatatagaaagcaaaagatgaagttctatatgttttagattcggatttaggcttcctaacaacatcaatttcaaatggacctagctaataatatagaacaaatcttgagaccccatgagtacttgttggaaagcttatggagtctaatttcataaggttttagtcttacgtcaaaattcctactaagttattgggaatctgcaaaacaagctacgtagcttatccagtctgagtctattttgaatcttgggctttttaactgtgtcgtgtgctaagcccaaggcggtgtgcgccctagggtaaccctattcagtggtcgtcaagtttagagtgaggttttgcttagattatttctgctattgcagtttcgccactagttcggtttgtagaaccctaactttgagattttaatcattcatctgcaaattgagttgcaatctacctttttcttcctcgtgttcttcgattcgcatgcagagattagccttctcagcgaggtcaactgggcggcacacagttaataaccagaggagacatggtgctgcaattgcagggttcggatcatgttgatcagaagctagatcgtgcgtgttaagtttttgtcaaatcaagagttatcaatacatatcagaagatcgggatctacttcctcatcggtaagttttaagagcggataacgaattttctagatacataaatttagatagaataagtttgcattatgttttaataagtgcgaagaaaaatgtctaatgacgataaatctgcatcccatccgatggaggggcccactttcacatagcacatcacttatacttttgtttttgctttgtgtaaacggattagctggggagtgctatggttggagggataacatgttaattgattcttactcttagctctactagcaaggtggcagtaatcaagtacacaaaacactcatgaacatgccacactctaattgggctaagatgtcataatttttcaaatgataatatttattattttcgcttatattagcggtcaaagtttaaaaggctgcgcagtccttttaggaagtagcagcgcacaataaaatatggaaaaggctgaagtgtggaaatgtccctgtcttctaaagggtattgcattagaaaagcaaatgtatgtaactttgtcttacattttatttatccagtatgttccccacaaagaaaaggcttgttaaaaacaacctataaaactacagtagatatgatactctcttgttcactactgctttttttttccctttttgactggtttaatacagctttctttgaatgactataaataaagtgtccttatcagagaaagcatgtatacatgcattgtaactggttcacggaaaaaaattaccattcatgcatggataacaagaggcgacaataagttgttgtctcctagcaccctggcactttattcctttcaaaaagaatattttatgaaccatcatgtgcattgtactccactaacccattttcacttcacgagcctagtaaaaaaaccggaccggcccagctgttgaaccggaaaaaaccggaaccagctcaaccggacggtctttggtgaaaaccggcgaatcggacgcctctgaaccggcggttctggcgagcacgtggaccaggctacaaaggcccactaggcccaagtcatgcatgcgtcgtttttagtgaataaatgaaaaaaggatgggcagttgaggatcgaacccgggttgccgtaataaagctcaacaaataagccagctagaccacttgtaaatgctgttgaatggagaatatacacgtaatatgactgctccggttctgcagttgaaccggtcgacccagcggtcagaccggtgagccggtgaaccagatgcttgaccggttcgatggccggtccagctttttgcactatgttcacgaggctgtgttccggatggaaggatgggaatttctctaccatacatatataaaatgggctgactagttagcacattattaattacgtattagctatacaaacttaaaaatacattaatatgatttttaaaatgattttttatatatttttttttaaatagacacacctgttaacgacgaaatttgctaagcccaaaatcatcctcggtttagagtcagtttctgctttagagttatggaatcagccgatgggaatcgtcaaatcaccagcaaccgtgttttcgatggagtcggatcaactaaagggaatttatccagaagagtccgagttcaagaaggatgcagcatggcagtttatctattaattaagaatagtttgttagtttacttttatccttaggaaagtgtgtttagtgtccgataaggactttatgttttccttttatttttaggaaagtttctttcttattcgacaaggacttgcatcaacccatggatataaatatgtacacccggggtcattgtaatggatcaatctcacgatcaatataattcggtgcatcgccaccttttaccttttctactttattttatcgtccggcaggacttggcacctgacgcggagctgcatcggtgttcgatctctggctaaggggtaagtccaatgttccgccggctcaggcagttgtatcgtttacgtcggcgtcgttcaaggctgcatcagtacattcgacctcttggattactctggtttggatggtatatttgccaacctatttatcatatgtctctgttaatctagtcttagcatatcaatttagctctatcggctgcttctcgttttagggtttctgccggtatcggctacatcgcgttgctagattagattagcttagacatctaccaccctgaaaactcagtcaacggcttgattgtctagatattatgtttcttttcatacttagtgttgcatcagttaagtttgatctactaagtcgtgcttagaaccataatctctagcctgcttcttgattgccaataagggtttcatcggggtttaagcagatgagttatctggacgttgcatcggcttacaaggattgcatacgtattggatttagccgattgcgataaaggtttcattgattaatctaatcgttttgattttatgacatcgaacctccacccgatgtatgctttaaccttcggatcagtgcttattctatcatattgttagccgattggtttatactggattatattgctatattgtattatcatcagccgattgccttcatatcattatatacattggacatatagccgatagctcaaaatcctattgctatcggctggcattggcatcggctggaactactacatcggcttgtcagccgatcggctatttgatctagtgtttacatatctcgtcagttgcaggatcaaactgactggcacgcccgcatctcaccaacctttggacctgcactggagctaagtagatctcctaggccagtgtgtgtttttcgcatcaacaataccgtttagcagtttgaaaacatacatatagtaaacgatatagtaaacgagagagtaaaagttagaaaagtgtagtttagaacatagcgtgtgtgttttcttccttttttccaaattctacccactcattttttttttgcacgtttcccaaactattaaaggtgtgttttctaaaacataaatctatagaaaaattgattttttctaaaagatcatattaatctatttttaaagtttttttaagctaatattcttggatcaaagcttcgtttcacgcgagtgggggattagctctcaacatagtacaccatttttatcaagcccagcccattaccctgccactgtcttcttagttaggccttgtgtcgaggcccaaatctctatcccgtcgctagggttaattttagctctgatttctggctcatccacaaagatggcccagggtttcaggctttttaaacctggccgaaaggtgtgattaattttcttggcctaaggtctgacaaagtccatttgatgtgcaatttggaataagtttacttttgtgtcccttaaataatgtcctcaaaccggatatctcgaactacaaactattgaaaccggtgcaatttgattcccttgatggttttggatggcggttttgctgacgtggcatcccagtcattaaataaattaaaaaataaagcgggcccacctatcatctctctctactaacatatctcacccagtcaaccatctctctctccccttcttctcgacgtgacagtcgtagggtgctagggtgatgatgggcggcggcggggctctcctcccacctcggccctttccgcctcagcgctggtggcagactggtcggccgagcagggatgagaggcgttggaggagattcggatatgcagcttcctcgccagaagtcttcaatgggccgcggcggcgagagggggttgaggcaggtggacagcttgccaaggtcgcccatggcactggcatcgagggtgtcgctagccaagaccgagtcggcagtcgacacgtaggagctcggcgtcgtggaccgggcgtcgattattcatcttcaatgcgaggacgtcaggaggagggggtagcgtaggcagtatgccccgcccacagaggcggtcctcaaggggtgggcaatgaggaggggtctcgggcgcggtgcggaggcgagcggccacggccggggcgacgctccgtgtggtgggtcgtggcatggtcggctcgcgcgtcccaatccgtagtggcggtggtgctcaataggggcccgaccatctgctgccgcacctgcgccgcttggttttaaggtggctgggcagccgaccatgcatgcctacgcccatcgacacggccttccctaaccttcaggagctcggcatctatagcatcggcatggaaaaggagggccgtgagatcgagttgctcgtggcgacatcaacatccaaggagggtcacccaccgccaccgctccggccatctctctcactcaccaccgccgtcgccggggggggcttgtagtaggcagagatggggaagaggcggagctggcggagacatgaggtggagcggcaacagcacaacctcaaagtggagtgcggccgccatcacgggagccgccactgctatctcgggcgtcgcaggctgcttcgcccttggctacttcctcaccctcagccggtctactcccgctagctctgaatctattgttccatggggagagaaaggggagtgagtaagagaaagagagagaacaaggagagaggggtgaggaagaagggaagggaaaaggaggactgacatgtgggtcccacaatattctttttgtgaatgagaaatgggtcccacacattttttctaattccaataccacataagcaccacgttaacgccacataggatgaagaccaggtcaacgccgtcacgtagtcaccatgtcagcgaaaccgccctccaaaacagctgacggagtcaatcgcactggttttaatagttgaggggtcgagatatccggtattgtggttcagggatacgaatcagatttggcccagtagttaagggagtcaaagtgaacttattccgtgcagttttcgcacgcttgtggtttgccttacccaccatggctagttatttagtgggctatatatacaaagacatgagtttggatggtttggttattgctcctactagtcgaaatctcacgctttgctgcaaagcacatagatgattattacctatatgttacataaataatgtatatatgttgaaataatgtgaaaataatgagagaatgatgatttgacatgcttggagtaataaattatagataataagttatgtttgcacgagtcttaaaataccccaaataataattgctagtgattgatgatgtatcatatttatatttgtatgttgagattaagaggtaatggataccaagtatgcagaaggtatagattggaggtataaacatgagaggacagctcggactacggttacacattgcaccaaactcatatgcatcaaactcatatgcatgacacgtatatatattgcaccagccaccaggcatgggtccagtccattactccctccatcccaaaatataagatattttagatggatgtgaccatatcctaatactatgaatctggacagaagcctgtccagattcacagtattagaatatgttccatcctcccaaaatctcttatatattttgggacggagagaatatatcgtaatgcaatgcagctgtaagatgtacctactccgtttcattgctatatagaggttgtgttagatgtacctactccgtttgattgcaatatagaggccgtgtttagatttagagatgtaaagttttgatgtgtcacatcggatatacgaatatatatttaaagtattaaatgtagtctaataacaaaacaaattatagaatccacctgtaaaccgcgagacaaatttattaagcttaattaatctgttattagcaaatatttactgtagcatcacattgtcaaattatggcacaattagacttaaaagattcgtcttgtaatttacacataatctatgtaattaattttttttatttatatttaatactttatgtatatattcaaacattcgatgtgacagagtaaagtttgtctggagttctaaagagacccagagtacaagttggcttgcatccatgcctcctagagtcccagtacacccgcatgccacacccatatcctgagttcctgacaccaatgtcatgtcgtcatcactagaagctaaatctcattcataaaatatttttttcagtttccgtgtctattgtgtatatgatttgggctatatcacttgccatgaattgaaataaaaaaacacgcggctaatatttttacagatatatgtcattctaaaatatgatttagttacaatctacatagaaaatatatcaaaacgaatatccaccaaaatatgatatttgtggaagaaatgacattgtgcaaagtgatgtaaaaatgatattgcaaaatgatatatcacttgacatttattaaaaactaaaaaagtacataactgatatttctacatatatatgccagtacatcataaaatctactttttccaattgtaatttttttgcgaggaattttccaattgtaattattatagtaatgtaatatatgcgaacacatcagaaaatctaagtttaggagaaaatctaagtttaggagagtatatagactttttccaattgtaattaacacagtaatgtaatcagaccaagttatatgcccagggcaaagagccaatttcaagatttgataatagcacttgaacatacaaatagatttgaaactaactagcaatattcactcacttaaatatataaatagatttgtaaaataatttttcgagagtgaatgtcaggtccttcggcggagcagtctttcggaaggctttcaacagtgtcttcacatttctgtgcatctgaggtgaatattgctataatcaaagtaaagaaaaaaaacaaattaaattactagtacacgaactaaaccccgatcacatccacatccttatttatggaggaatcagtgtaattccctgtttctagttggtcaaaaatatcagtgacacttgtccaggctttagtaggatgaaagtgtgagaaaagaaaattgacacctctatactaccctaacaagtggctagaacaattaaggaataaaactgtcaaacagtagcacttatggggtgttttttttaggggtcctagaatccacaatctccctgggctaaattctataacaatctgtagaagctagctgagaaaataaagttgggtgggaattacccaccaatgccaccggtatacccccaaagcccgaagcctctagcattcatctctccacccatggaacaagcaagcacgggagacgggaagaggcaacgggggaaacgggggtcgcgccccctctagcacggcaaccatcgccagatctggccatccctcgccggaaaccgggatcccttgccagatccggtccttccccgtaggaggcgaccgattttagcacgcgagggagcttgggcaggaggcgctaggtggctagggttttggggctgttctaggaagagggagctcgcactggcctacttcctcatcaactctggcgctctgctgcttcatcgtcaccaactcttgcggtgtcctgctccatccccatcaactccggctagtaggatttgtgcaaggaaacaaatcctttgaaaaaattgcacaaatcaaacacaaatgagacatgattttttttcccgaagtttggattacaagaatcctactctcaattgaggaactccgaagagctgggtctcaattaaccccttgcctcaccgtgaaaagccctaggaggaagtcctcggtcttgaatccaacatttctaagtccatcactagaattcaagtgacaccaagatccataacttgaactcctagagaatacaagtgaggattactctaccaagacaacctctgatagctcagtatggatctttactcaattacctcatttccttgtgtaggtgaggaagaccttaacaaacttcctgggtcaatccacaaatcgatggaagctcgtggacgacacctatccatctaagaggtcaccctccaagagtaatgtcagggttgcggataaggcataccttctatcctacgaattatggaatatgccgataaggtataccttcacgtacacagattgtttccatgcacaccgtttgggatttgtctcaaattatggaaaatatctctacaagtcaagcgatttccatagtcctactcggaagggatagaacttctgttataccgtatcgaatcaaatatcctcggatctttcttgggggtcaagatgatctacggtataaaagggacccccaggaaggggttcaaggcatccaattctatcgccgacacacccaccatagtttactgaagccggagtaccgaagccaaatcgccgggagatctcgtcgaactcatcgactacgatctcatcggtatcgtctatttcgactactctctttgtaatcttttctcaccatcatcaattccatataaactggactagggctattacctgataaggggcctgaaccagtataatccttgtcttttgtttgcttgatgtcatgctacgtagaccctcgttccaacgtaccacaatactcaactcatctggtccacgactatcactcgtcgacaagtaataagcaccaaatagcggcccaacgagaatcacgacgtgctcaagtcatcctagccctcacaccatcaccaatcctcactgccaccctcaatactcacttatctcacttgggagactcaagaacagggtggaggaagcaagaacaccatgagagaggctagaggaagttaggagaaaaaaaacggaagtggaattgccaaaaattgagctggggccagtgacgaagccaccgtgggggctggggaggcctggcaccccccatgccgccatgcgacaaccccccaaggtgattatttactaatgggactaactatatagctgcctaggttttagcttaaattgttacgtgggttaactaactgaaagttatatgtggttgcaaacctcaaattaaaatgatgaaaagacgtgatgttgaatcatccatatactaaatatattatattattgtatttaaaatagatgctatttaatgatctaatttaaaattagtgatcatccatatattagtagacatatacttgtaaaaccacatcaacaatcataatttccataactataaaggagcgattaaacatatcatacgtaattgcacatattaatataaacaagagacgattgggtatatctttctcttctggctaattgctatcatatgcatgataccgaccacacattacactctacagcattgtccatcgagccgcaagtgagctctctcatctcatagagggcacccccaatctctaaatcttggcttcgcccttggctagggcgagctggagaatatataacggctatatgacatcatgcagccgttactcacatttttgaattggaaaggtgttatgaacttctaggccggggtgctaggaacttccggccaacgcttaggaaaattctataggagtgactggctaggaagttccgggcaatgtgccaagaacttccggccagcccttgctgtcccgaaaagcacttttcccaaaatttgcttttaaaaattttcttctatggatatttactaggggtggcaatttccccattgggccggggacccgcccctacgaggctagggatgggggataattctcacccatggatgagcgggggtggggacgaggatgggagttgacccgcggggccccagaggtatgagttacaaatcaaaaaatagcacattctaagatccatttggtccattaggtgaaggactacataagcaaaaccctatattttccaaaatattaccaaacttgcgcgccattctctcctctctgactcacgtatctccctcctagcgcgctacccctagccaacctacctcttcgtcgcgcaccgtccctagctatcactgccccgagccggagctacctcttcgtcgtcgtccccggccggtgttgcctcttagcgctgcatctggacggtgccgcctcatcgcagcacgccacccccaaccgttgttgccttctcactgttcaccaccctcggctggtgttgcctcctcgcaacacgctacccatagtcgacaccacctcttcatcgcagctcctagccggtgccaccacgtcgccatcatcctcggttgtagacaccttgtcgctgccctcaatcatcaccttgttgtggtgcaccgcctctagccgccgcagtaggtgccctagagttgctacccatgtgggtggtacggggccccgcttacccgtcgggtcccctactggggcgagggtaagggcgggggcgggggcaggtgaggttttccacccggtggacaatgcggggagcgggggcaggggcattcctgtccaacctaatcctgccccgctgccacccctaatattcattttaagcacttagatcatctcaggcaactagagataacaatgaggacccataacccgagacccgacaggtttttactctattaagagctaattgtgttctaactcttatacccatgggtctactggcgggcgaaaactcttacccattgggtacgtggatatgggtctattctagctttatccacccgtatccaccaacccgtgggtgaaaaaaaaactcgttgattagcaaaaaactatgagcaagtctcaacgactactatatcatagcataaaactcctttcacatcttaacattgttctagtctagttatatgaaattatttttcgatttcttgattatgtaatgtgtttgtataattttttttactcgcctttgaacgctaatgttaatagcattgttgctaaagaaaatactgatgatttacaactctaatatggctaattacagtaaaaaactataaatgctacaaggcaattatataggtatgggtacccgttggatacccgttacccgcacaggtgtgggtatggggacgattttgtacccacgacgggtgtgggtatttaagtgggaatatttagacatcacgggtgtgggtatggggcaagggaacccaatgggtatgcacccattgccatctcaacaggaaaccatttgaacccctcttgatattacggtttttcctaaaactcaagatcaaaatgcaaacagttttaaatagctctccgagtctttgtgcatcttgcagttgttgttgggggggtgtcctcctttgcacattatcgcacacctcagcaccaggggactaattgcctgcacttatctcaataaacacattagtcccttaaccgttttattattaatcaccgaaacccacttatgggactagatgcactttcaatggtccctcccacactcacagggagtggtatccagtggcggtcagggccatgcagatcgattgtcgatgccaccattggctggttgcttcccaaaaaagaaggcatacccggctccacctaatcatggtcgatgctagcacttgccgtgccccgcggtaacgaaatccacggcctcaacatcctcgaccctggatcgcaccgagtgttgtgtggatccaggatgtaggacgaggtccaagtagtcatcttcccaacgccgccgctcatcgccaaaaacgacttcctgtgtcttccagtcaaatacatgaaaagtggatgcaaagggtgcatgcaaattaatcgagtgccaggagaaccacctgctactggtgggggagtgtttatacctccaaccaccaaaactagccattggggccaaaaccccaacttaagaagcctgcaggtcacattgcaaaggggtggccagtcagatcggcctccaaggcaatagttagaaaactagtcgttgtcgtgcatttaatgcatcaccaaaggcgttggctggtcaaaccgctgggcaccggtggctctggtcagaccaccgtcggctctagatcacaagccatggccatccaccctgctccccaagcgctcggttggcctggcttgggcagattgaccaagacatgttgatcagatcggctttattccacggtcagaccgggtgtagatagtgaatatagataaaaatgaattgaacaaagtgaccttatgcaaatgtgctaatgtggaaattttgatcatatctttaccatagctattacccttgttgatagtacggcaaagctagaaaaaaaacctagcaaaatcgatcacccaacacctcgatcgatgaagacgaaaacctagattaatcaccttcacctcattgttttgcgccattaattttaaatccatggtaatcatccttggcatacacatcatgtggttctaactcatattacatcactcaaacaaaatagtctgtccacaattagcgcttgtcattaaataccaaaatcaacgccaggaatctaaatgcttcagaaaccgagtccacctagtttgaaggcgagtgtgcgagtggggaggccaaatttcacagtggagtggggtgataatagttagccggtctcccgaccggagaaggaaaaaggcttgacagatggacccacccccacctgtcggctgcacaatggggaggagatgccaagcgggctagcatgagcgagctaggctgtgcagagagttgggccgcggaggaacaagatggcgactagctggaggaaggagggagagaaaacgggttggactagctaggccgacgcggaaaaagaaaatgaagagaggccggaccaaaggagggagtaggaagcaggccttgcacgtcaaaggagaaggctgacgggagagaagacgatggaacttgggttggattccgcacggattgaggagaaggattt

SEQ ID NO: 25974 - DNA, 47531 bp, Oryza sativa
cagagcgtgcagcaggaggagaaagaaacctagttttcaaggccgcaatgaagagcaagtaccatctagaaaaattcaaagagtaagtaaatgactgttaggttgtactcctaccatgcatcagttaacgttgtcattgcaagcacatttctactccatacaacatacagggttgaagggtgttacactgtcaaaagtgtccattcgcaaattctgtcaaaagtttatcaatgaaaagattaagatatagattttacctcaatttctgttagaatgtttttcaaactgctaaacaatatattttttgtgaaaactttctatatataagttgttttaaaatatcaagtaagttagtttttcaagtttatataattaaaatttaatcaatcattttgcatgtcctaacttcatctttatcttcattagggaaaaaaaaacctccacctaatgctgatgggagagaagactatgggacttgggttggattccgcccggacatacgagaaggattttaatttgtttttccgttgaaataataactgaaataaaatttatattaataaaattagattcttagctctcaaaattccaaagagtattttaggacatgttgagaaaaacttcagccatgatttattaaacaaaattttatttcccatctttaattaactttttaattgatataaatttcaaatcagagtgtgacagcaggagaaagaaacctggttttcaaggccacaatgaagagcaagtaccatctagaaaaattcaaagagtaagtaaatgattgttaggttgtactcctaccatgcatcagttaacgttgtcattgcaagcacatgcatttcttctccatacaataggacagggttgaaaggtgttacactgtcaaaagtgtccttcgtaaattttatcaaaagtttatcaatgaaaagatgaagatatagattttacctcaatttctgttagaatgtttttcaggctgctaaacgatacattttctgtgaaaactttctatatataaattgttttaaaatatcaagttaattaatttttcaagtttataataattaaaatttaatcaatcattttacatgtcctaacttcatcttcatctttattagggaaaaaaatccccacctaatgcagtttaagaattagttatgtattatttatgtgttttacaatcttggtagccatcttggattgatttggatcattactggtgtctcgctatcaacgaatattttggattgatactagtaatgatttcgtacatcagctcaattttttgaaaatgctcactgagctaggtcgacgtgtatatgtttaaatggatgagtgacaactagggatgcaggtgggccgggttaacccactgacccagtgacctagcccaagaatcatgggacaaaaatcagatgggtcgacccatgatttttcgccggtcaacataggtcgtggtccccttgacccaatcaacataagtgggccgacccattgagtaggcatttgactaatcgccggtcatctccgcccccgccgccgatcctgcattcttgctgtgctccgcccccgccgccatcgccctcacgagctcggcgctctgcgatcgctgtcccgtctccgagacgagccctactggcaggcatcctgcccattcatcttctcctcgctcggcgccagctactgcacgacaggcagcggcgacgcggcagacacacgcaaggccgagagacctgcagacccgccgccgacggagcttaccggcggtgccacagccggcggacgcgcggaggtagcggcgccatggatgattaataattctgtgcgtgttcctttcttctgtccatgctaaaactagaaaagaatcaaagatattggattctcggtggattggatgcagatgtagctcatggatttcacttttcaggcatagcatgatgtctaaattcaaaagcagttgcttcctcgtctttgcttacataatagttacatatggtttaagcgatttggttaatctctcgttcctcgggcctcagttctgcagttttctcgtatttgtttgatttcagctgatgtcaaatgattaatataatcatctatgaattttaggtttgatgctgtctgctatctgttcgatttctgctgatgtcaaatgcttaatcttccagtatgattttttttggtttgatgatccgtgctgctgttgatctgtttagacgatctggctgttgtgcgtactagtcgttgctttgtgaattgccactccacggcgtgattggccaatctgaatccggtcgccccatggacagctcgtgggtcagtggtccatgcatgttttgtgggtcggaaatcaccgccttgggtatcgtgggtcagactttgggtcgacccagcccgacccccccagcacattacgagtgtagaggaaataaataaataaggaaccacctatatatttatcgataaattttcttctaaaattgacagtgtaatttttgtaggagaaaatttatcgacaaatatatagcaaatatatagcaaaattgataaataaaatataggagtatctatcaaagaaaataaaatttgtgttagaaaatcgagcggtttgataagaaaaaaaaggtgagatatagcaaaatcaataaaatattgcgccacctgtccgtcgtctcgtctccagtagacgggcccctgtggtggctgtgtgcgagcaaaatactagcagcaagaagcaatcatcctctcctcgccccgcaccatctctccagtctccatccttgatggtctccttgctcccccgcgcgccctgcctcgcctcctccatccccaagcccaccgcccttcggccgccgtgcatggcgtccacatccgccgcggcccctgccgctgcagcggcgacggcaggaggcgtccgcgtcccggccgccgaggaagctgccggtgctgctgttcgacgtcatggacaccgtcgtccgcgaccccttctaccaccacataccggccttcttccagttcagtgcatctcccgtcccttgtgatcggtgttggtgtgggtttgcagttgaggtgttcgacggaatgcctgcttgggggttcttgggggcttactgttgctcgtattagaggggctatgaatgttaatgatcttgcgtttttgtctggatccggcttaggctatgtggtggttttgtagtaatggcttggatttccctgtgggattgcaatggtttcattggtactggaatgctcagactcccaataaatcatatataagtgcacaattgtgaattcaatattcgtttatgaactagcaccacacaagtacctaaaactgtttcagaaatcctgtgttgaatattttattacttattacctcaatgattcggttaatttaagcgtgaagtctattttatttttcttgctttaactcttctcagattccattttgtcattataaatacttgggtttatatcagtgaaaccatcccaatcaaaaccatgatggaatagagttttgggcgttgtttacctgtaatatgggggtgaagccaaccgttttttgagtttggtgtgaaattttgattccaataagagtttgagggccaaactagactttacccttaaattaatatcttctcctatatgttttactatgatttgtatatctattttgtgttactttctggattataaatatccaatatttgcctgcagaatgtcaatgaaggaactcctcgaaaacaagcatccaacagcatggtctgaatttgagatgggtctaattgatgaggtgtgagttattacttttcatatattggtgagatattggccacggtagtaggatcctagttttgacttttgaattgtttttgcgaaatatttttctcgaaaacgcaagagaattgcgtttcatttcattaaggggaagaaaataaaggaaaaatacaaagtaggagagaccaaagccctcctacacacccacgccccggccaaccccggccaactagctgcctatgtttctgtgaaatataccactaattattgacagttacttactttgctaatggacattaaaggttgccaagttgtgcttgccacgcttgaaatgacttcagttcatcaataacatatgtggttccttcattatcttagtcattgttcttacttcctgtaatcctatttcttgtatcgagaaattcattactccactaggtcattgatcactgctttctggacttggtggacacttactagctcaacattttaggtgtttaaacaaggaaagtaagttttatatgtttgtcctatagataacaagcacaaaaggttatgtgcatttgaggatagacaagtgacgaaaatgctgaaattaatctgtatcaggaaaattgtttccgagagtgattcgtgatggcactggcaccggggtaggattaatgaatgccattgtatgatccacttggtcttacagtgtatgacttcttcactacggtccacatgttaggaggaagaaaaaataatgggtttgggaattatagaaatttgtatgcatcttaaaatacatctacctagtttgagtgtttgactattggcgattgctaagcaccctgatgattcacatgctactgaactctataacctacatatggtcaaagttctaatgctatgtaattaatatatcgttccgttacagataactaagattcttctttttatcttattattttgcatggtgtgtgttgtctttaggaaaaaggtctatttttggccctcaaactctgctagaagcccatttcacctgaacttaaaaatcaattttcacccaaaacatccaaaccggacaaacaacacccctaatgctattccaaagtggttttgtttacttggatgtagttttcagtgacaaaaacctgctacttgtaaagtatcgctttatgtggataccacttagatgaatccaagtcagtgaaatttgcctaataggatccatgctagtgaaatcaccttcatatcgaccaaaaccatggcggaatagtgtctagtgtgttatttgtctgcatatggaagtaggggtgaaatttttagtcagggtcagtgaacttcaggctgatttcgggagtcaaaaatagatgccttctctttatgatttttttcagctgaaattggaatattctgttctactctgatcagagatcaagtcaccattttgtgattttttttcttctacttccagaatgaactggccaaaaagttcttcaatgatggcaggtcttttgatttggaaggtgagaagatcagatcaggtgttttaccggggatacagattgttccattttataaactggcatcaaataatcattgtttgaagatacttgattttgttcattgcttcatttactcagaattgttaattaacttaatatcctacttcaatggattttcaatagtaaaatatagactcaaagctttgtacttgtctaattattaatagctattgtcttttgtgacgtaggtttttctcaaacctaatctgttagctttttttatatcttagaagatgtttattattattgtgttttttcctataggtttgaaagcatgcatggtgagggcatatgagtacatcgatggtgttgaagacattctttacagtttgaagcaaaataactatgaagtgcatgcatttacaaattatccagtgtggtgggtttcaacttatcttgacacatttgtacacatgtgcttgttcggttgttcctgaaatatgttctgtaggtaccagttagttgaggagaagttaaagctctcaaagtatttgtcctggacattctgttcatgcacagttggtaatactatttctcagattttatttttctttttaaatggagtaatatattaatatatatgttaacagatcgatgtctatggatcaaatggacttctttatgtcataaaatggttagatatagtatgttggttctttagtgcataaaaccaatatgagctgaacacattgtcaccaactttaatatctttgtaggataacgttttcctactcctcaaacttacatcatgctcaattctatacacacaattttataatcgaatataatatttacacatagttgaccaacgttgagcatgcattgctgtgctgacacagcataaaatcgcctttccagagcaggggtgcactctatctgttaccggaagttgagggggaggtttttatccaattgacagttggggtgaaaattaaactttagaaatagttgagggatgaaaaatagacttttttcctttttgtggtacccttttttaggcaatttagtgttaatatgttctgtaatgtacatgagcccgactagtttgtactaggtgtggcattagcttctatcttgagttggaacagactgatgtagtagcttagtagttttgttattatgtgttaaatgatgaagcataagggaacttgttaagttgtggtgtcttcatgatgggtcattatgatgttgtgtggtcatcaatgatcaaaatgaccaaacttgaatgcaaatactatctctaatttgttgttacaatttcattcttcaggtaagcgcaaaccttcgcctgatttttatctacatgctgtggaccacctaaacgttgatccagcaagctgcatattcattgatgacaggttcattatgatcaattcatgtctggcatggctatgtagttacattgatatcttaactgttttatttcttctctttccactgtcaggatgacaaacattgaagcagcccttagtgtaggaatggttggtttgcaatttaaaaatgctgaggtgctcaagaaggatttatgctcgcttggagttgaatttgcacctgtgcatgaaggtgaaatacaagtccaataaggttgcactttgttaactcttctgctcatgtgtataaaattcatatatctgacccttctgtcttctgaaccttgtcaataacatgaagacccctgattgttgcagatataaactactaatatattttgtttattcaagtgtgcgtattctcaaagcattcattagcttccatgtttccaacaagtaaaggtgaacaaaataccaatggcttggaatacatgccagtgcttaatcaatagaactttaccacaatctctgttcaggataaaaataaatcatcttgaactaactttaggttaaattatttatctatctaatactagactaatccagacaaacttgtgcttggatcaggtgtagctcatgcacacgttgttagcgcttaaaaaatggaaacatagttagctcttaaaaaatccagagttaattaaatgagcaccagattcaagcatagtaatttgcttaaagctaggtaaagaacagcctgagctagctggcttgagccaaaaaaggatagttttgaggaacaagaacaaacaggctcaatcatgtgttaactgttaactcaaagcttgatcaataatccgtcaactcaaagctgtgactgcattttattggttcaataatcaagatcctaagtaactatgttttgtcagagtgatcgccaattaatattcaaggtcttgcattaaattataatggatgatcatatgtatctgttatgctttcataattaagagtatctctgaaactccatgttcctctcaaaaaaaaaaaaagaaagtccacattccattgagtcagagttaattcatggccggtgttcgttgttaattggctatgtatatgctccttgtggttttgtgctttttactgtgtggtgcagatggtaagtggtagtttgaagtaaaccattttctgtttatttgtcacatagctatgagggatcttgtgaaattgattgctattgcaaccattaaattgtctagctctattttggctgtgtagtttccaataaatatttgtgattgatgccaattaatgatcgagagaagagtggattttacaaaaagacaagtaacggatgcctgggactattaagttagcattctctccatttgtgctcctggcttcaggatgtcacaatagttacataaccagttcacttttactcaaactgtaactaaagttgaagtttcttgtgatttgtcatgaccactgcaatagatattataccagctggaaacctgtagctcatgatggaaacctgtggctagagccaaggctgactagttttgtatggatggggacctggggaaaacagcagtcaggaggtgtctgtcaagggttcaaggcctggccaggtacaaagagtttgttgatgttatgactaattgttagtagttaccctcccctttgttggtgctttttttttcctttggcctgttctttgttggtgtttccatttgttcatgttgatcagtcttcctaaatgggtgcctcccatcatatccaaatatgggtccagtgcttattgtagcaatttgagtaatcgtttagtgctgccgttttgatgttaaatagattttatggctccctatggctgatcctttatttgcttgatgttgctgaatttgaacacattttactaggttaacctgctcatgttttgcatatatgtcaccaagtaggttaaaagatcgtaaatacattatttatgaaaatatggcaagtgctgaaaatttcaaatctattaaaacctatatgtacaagttttaagaactcacaaaagtctcagctgaatctgtgttttgagtccaggtaaatttttactaaaaaaaatcaatcctatttaacaagataaaaaaaggacaaattgaagctcttcactatgcactcatttgacatttgtcaagaaatattgactatacctggacctgttatacctatattatgtgtaaattacaaagaaaaactaatatatggctgtaattaccaaagaacaggaacacccacatatggcgagttctgtaaccgtctgacttaaatctcggattactgccaatctactgccacgaaagcttaagctttttttttgtaacaatagccgtaaaaacatttgcttttgttaacaattacccacactttgcatttcaacattttatttgtatggaatggccacaatttatttcttggtcctatgattttcatttaattcaggaatcgagattgcttccagtttatagcttgagtgtgtacttagcttgatttgcatcctattgttgttcaactactgccaatcaatacatcgaattcaagctcattagttggcaaattatggtatatcatacctcaccatgcgtgaatatttttgtcttcttctaaagatgttcttctcaagttgcatgctggcggcaaaataattgtccacttatttatgcccgatctcatatacttcatatactgtttattcctcttcaacatctcgtggtatggtacaaatgatgagcaagatggctgatatcccaatctgtttacctctatcctttttgccaacttgtgctttctacaacttgacatatgagttggattgctgtcaatttactctttataatggtgccaatgatgtcattatcttaggactcatggactctctgtaccaccctatcatttgaatccatgaacttatctccctttaaaagttggtattatatatttggagtcctagttgtgaggacggctaaaggggtagcaatggatgcttagcttccactttaaccaacttacttaggctgcaatattgtcagaaactgagtattaacagaatgttgtcatagcgatgcagatgtgactaacagtgatttagttgtaaaaattgcccacagcgtgtatctctcacctattttctcaaggtaacatggctggctgtgtcgcatttttatcaaaacatatagcgtgatgtctacgggcatcctaagcctattttgtagattttagacttcatttaggagatttttatttcattatttcacttcgagaagagtagaagcgtacaagtcctgctcatataattttttgtgtcattaacttatgtgctgcaatgaaaaagaagaatagtatttatggcaccatatttttttaagaaaataaactggttttatgttgtaaattaccgacacttacatttacattatatttacattacattgtaaattttaaaacttatattgtaattacattttagctttcaattattacattgtagtttctctaactaatacttcatccgtttcacaatgtaagattttctagcgttgtccatattcatatagatgtgtctagattcattgacatctatatgaatataggcaatgctagaaagtcttacattgtgaatgagatgtctagattcattaatatttatataaatataggcaatgctagaaagtcttacattgtgaaacgaagggagtacatgcatgtccattgtaatgggctatgcctatataattagggataagttagtatggtgattgagaataaaacaataaatctggtgggaccgtacgctcccatatagacgcgcagtgtgctagtaggaggggatagaaggagaacgactctgctttttcatattataggtacatactatatatgagaattaagaattaaggttaagtaatcgattatctacttagaataggagagatgaaaatatacttacatataacagatatcaatcacgtaggaaagtgactgaaatcaagtaaatatatgtcatcatatttttagcaaaactgaaaaaaaaaaagaagtcttctataagtaggtccaacatagatactgataattcttatcaggtgtaccaatcaatcacatgctaattctcttaacaagcagacgtgctctgtttttgtaatgtcaatatatcatcgacttaacaattaatatctgtacgtagttaatcaacacggagagctggaccgaagccgtctgcgcaattgcattcatataagcaaaacatgtgatccttggattataaatgggcaaaatttgctacaggacacttaaagattgtggtctttgctgtgagacacccgaagattgtgtatttgctcttggacaccgaaaaaatgtggtaatctgctggcggacactcctcccattattttataatttccagctgaaacggtgaaagaaactttcacaaaagacaattttgcccatgggccatttgtataagccgaccaagtccggctgcaaccagatgtgagaggaggaggaggcagagcagccatggctccctggacgtgctctgccatggcggcggcgcggcggcgtttgtcggtgacggcgcatggctgccgcgacgagcgtcagcgtcggcaagaggagatggaggcgaacccggtggcgcggcatggggctctgggatggcgtggaggtggcgctgcggcaacggacggcattggccggaattggggaagagagagagaggcagtggcgcgagggaaagaaggcttcggccttggagctcaccggcgacggcggcacaggaaggagacggcgatgtccatggcgcagcacccggccgtgatggcctccacgacgcggtagctcgccgcggccacgccctcatcatcgccggtcgggcacaggcagaaccgcgctctgcccatgagctcgccatggtccacccctgccaagaggagaccgtacaccagcacctcccgcacggcgccgccatgcgcgacgcctcctgcagcgaagaacgcgaccagtgtcaggggcaggaaagagagaagaaagaaaatactacaaagaagcacagtgtcaggggtattttggtactttaacactctttctctctctgttttcaccgaaaataataaaataatacatcgagtgtccagcagctaattaccatatttttccagtgtccacaagcaaatacatgatttttgggtgtctcatagcaaatgccacaatctttaagtgtcctatagcaaatgggcaaaatttgatacacatcccccatttggttacatatagtggtaagtactgtacatatcaatcatacgtgcagctgtgcgaccttgcaacaaggacaatgtcaacaagcatgcataacggttttctggtgaagtgaaatcttgtgcccattcctcgcggtctaaccagaatgccatcctgaatgttcattgtttatccttgctcatgaaaaagagaggaaaaaattgattggtgttgatcaggacctagattggtcatatggcaccatgcttgctctccactcttcaatcagtgattgtcaagagatgtaattacattttgaccggtagacacaagtatttttttttcggggaccagtacgagtcattgagggtttataaatgtcggtttcaactaaatgaactaaatcttaatccgcaaagtaacacatgccaatccctatgcagattgtgaagaaatagccaatatttgcgagatcttttcgagaactaactccttttgagatcacgctccggccgaaaatgggttctcacttgtatatagtgtaacatgccaactcctcgcacaaaactccactcgattgcgcacgaattagtctactactccttaggttctccgcaacaccccccctcaagtcatgagccatcatcaacaattcatcatcatcattccctttccacttcgctctcactccaaaaaacacaactcgctcacacttccaaaaaacacgcacctcatcagctttcctttgcttcccttctactcccatccaccactccccctgcctgccctgctcatgtttgcaacaaccaggcccatggccccccaccacaactaactcctcactactgaaacaaaaagaaaaagaaaattacatctcatattctcactcccctctagcatctcagtctatatgcacactgttctctgccacgcggcggcggtgtgggacccacatgtcattcacccataaagacagtttgtgatgttgcttaatcacaagttccaaacgaatgcttgtgtagatcacccccttaaatactctctccaccactccaaccctcaccactcttccagtgtgacacaataattatcttaatttttttttccaatctgtatcgaatttgtagatgaggaacctactgctgctgccgctgctcgtggcggtggcggcgacggtgcccttggcggcggcgctgtcggccgacggggtggcgctgctggcgttcaagacggcggtgaccgacgacccgtcgggggcgctgtcgtcgtggtcggacgccgacgacgacccgtgccggtgggccggcgtgacgtgcgccaacacgtcgtcgtcggggccacgcgtcgtcggcgtcgccgtcgccgggaagaacctgtccgggtacgtgccgtccgtgctcggctcgctcgcgctcctccgccgcctcaacctgcacggcaaccgcctctccggcaccgtcccaccggcgctggcgaacgccacctcgctccactcgctcttcctctacggcaacagcctcaccggcggcctcccgccggagctctgcgacctgccgcgcctgcagaaccttgacctgtcggataactcgctcaccggcagcctcccgccggagctccggcggtgcaagcagctgcagcggctgatgctctccgggaacggattctccggcgagataccggccggcgtctggccggagatggtgagtttgcagctgctcgacctgtgcggataacatcggtcacgcggcggccatcccgccggagactcgggaaagctggctcgcgctcgccggcacgctgaatctctcgcggaaccacctctccggcggggtgccaccggagctcgggcatctcccggcgaccgtcaccctcgacctccgcttcaacaacctctccggcgagatcccgcagtccgggtcgctcgccagccagggccccaccgccttcctcaacaacccgggcctctgcggcttcccgctccaggtcccctgccgcgcggcgccgccgtcgtcgttcaccccgccgccgccgtacgccgccggctccatcagcggcgccggcgggccgcgccagccggtcaagaccagcctcatcgtgctcatctcggtcgccgacgccgccggagtagcgctcatcggcgtcatcgtggtctacatctactggaagctccgcgaccgccgcggcgacggctgcggcggcgacggcgacgacgacgaggaaaggaagcgaggcctcttccccttcccgtgcatgcgcgccgacgactcgtcggacgacgggtcggacgccggcgacgacgtcaagcgcaacaacaccaccaccaccaccaccgccagcggcggcggcggcggcggcgaggaggggcagctggtggcgatcgacaaggggttcaagatggagctggacgagctgctgcgttcgtcggcgtacgtgctggggaagggcgggaaggggatcgtgtacaaggtggtggtcggcaacggcacgacgccggtggccgtgcggcggctgggcggcggcgcggcggcggcggagaggtacaaggagttcgcggcggaggcgggggccatcggccgcgtccgccaccccaacgtggtgcgcctgcgcgcctactactggtccgccgacgagaagctcgtcgtcaccgacttcgtcaacaacggcaacctcgccacggcgctgcggggtgagcacacaccttccccttccccttccccttcacaattcgtgaatttgtttggaaagcgggaaacgtattttctcaaaaaatggagcaaactttggctggattataacaaactttggtaaaacaaaaaactggaattgttttggcccaaagaatatccttcttgcgtggggttcgaaatacattcaattcgaaacatagaaccctggctgtcgcaaacttgcaatcgacacgtccttctcaatcggcaacacctgctctgtttttggtttgcactgtacatgccatggatgcatcatgcaaactatatatttttggtacaatagtttgtaacccccgtaggacccatatgtcaatgatataggtatgcttgtcttatatatcacaatatagaataaggtgagaaagtacccatacctagttaacttggaaattggataatatgaattctaaatttacttaggacaacctaattttatcccctccggtcaataatgttttactttggatagagtatttcttattagaatctgaaaaaggaaattatttgcgggtattgaccatccaatcagaaatatgaggaccatccaatcaaagtatgagtatcatataacagcaccttaccctaccacaagaggaatccaaccagaattttcaccataaacatgaggaaaactccaaccaacccctgcaccaagtgacctagagaaacatgaatacacaagatacccagtgaacaggagactagatgacaaagacatacctagtggctcttccggtactgcaaaactgccactgctgctgttgtttacagtgcatcagtgataaaagcttccaagaaggccaggtaggagtgtgcatggactgttctgcatgcatgcctatttttccatggaccacataaatcagtcacagcatcacagatcagtcctctgccagtgtttgggcactgatgtactgtagtgctgtaccacagtggatgatggtccagttttttctttgtttgccctgcttcatcagtcagagacactgggctcgctgccatcatgaaccatcggcatgcatgcatggttggggttgggtgagctaattttggacaggctttttggtggacaagattaggacgagaggaacatgtgaactttgatgggtagctgtctggatggttaagtatggtgcttagattcataaattcgtatattgacagaaaaattggtccaattttaggcgtctaacgtaggtgatctttatcttcaaacataagcgaagcagactaattcttgaaatgatttgtttgcaaaatcgactatattttcttcatattgtacataataattgaaccgtcttgtatgacatcctaatgttcaaaaacttgtgccgtaataagttagggcttaaaatcgacgagatgataagactgcactaatataagttcacaagtcaatgataattcacatataatttgcatcaataaaaagtcactacattatctttcctagtggcaggaacagggtagggcagctagggctgctgtcctactcctaagcttaaatatctattaaaagttacatttaaaacttcaaaacatggacaataaaggtaagttatgtatattatactagttgagccctaggcttgaaaaaattctggctacgccactgatctttcccaataatacattaaatttgaattatctttccactaagtgagagtctaggccgcatgattggtgttagtaatcaactatagcagctcatgccaaatgctcatcagcttggcacataaccgacagagacaaaagagagaaaaaaatggggctcaacacaaaaggctcaaccaaccgagggggaaaaggtgccttgcgacctctgtctggctgacctttagacaggggaagccaaaaggccctttttaagcctgaaacgctacgcagctacgctgctctgctgtggtcactgcaggcaacactcgcgcagtgcagctctagaacctaaaaaaagttgctctttgggtgcagaaagttgcagagaaaaaggcactacggcaagttattcgtcacacccaagagagaagaaaagtactacgagtagtgcatttcttttgcttccaattcttttgcattttactagtactagactactggcttggtgttgttgcctggctgctctacggcgattgcaacacttttggaggttttaggctcaaggaatggaaattgcagtacaaaatatattttggtgaatcctcatgcattctcattatagtcgtacctagggttgttttgctttagagccaaattttacacaatcgaattgatggcattttaaacagtgattttgcaacgtttcgtttgttaccaaaatttgctatatatgcatattcatggttaaaatattagtagtgccaaaatttaggtaggttttcatttctaagtgaaatgaaatgggcattattgtattgttactgtagcgattgatttgaacgatttgtcctatcatgagttagctaactcataatactgtacacactcactgtagcagcagaggatccatcactgcataacacatcacatcacattaccttaattaccggctatagtaccattattgtactccccaatcagggtgtccattgtcctataggatatataccattgtcctataggatatataccatttaaattcatgaacaggagcttaatatacttcctctgtttcataaatgtaagttattctagcatttctcatattcatattaatgttaatgaatctagatagatatatatgtctaaatttattaacttcaatatgaatgtgtgaaatgctagaacgacttataatatgaaacggaggaagtaccattcagtgaagaaagactattttgttttgaagactatgaagaaaacatcgggcattgatctagaccaacaacttgaaagtcttgaaactaagataggagaagtttttactccctccagtcgaaaaaatatatgaagattggtacttcttatggtcagctgcgttcagctttgaacataactagaaataaaggcgcactacactgtgcctggcagacgatgaatttgaatctgtaggaacaacattgttaatagctataggcatgtttactttgacgttcaataatagcttaagcagaataaaaaatcatgtatataatatatttatgcacatagatgtattaaatcaaagtcgatttccaattacattggtgttagaataggcagaatgaacatgtgtgtccaactcccttatttagccatgaccagggcaccgtaagaaccaaaaggtttagctctattatccttttcattgtgccagcatcatttatcaaatcatgatctgccataccattcagtacacaaatatatcatcgacaaccccaattagatcaaggatattgtcaataggaagaagggatagataagtgcggtgcagggtttactgtgtaagcaaagaaaatatagacctactaaaaaaggcaccagatagcaatatagtcaacaaaagagagggaactcaacagagcaaccagtccgtcagtgaataaatataattcttcttttgtgcgagttaacatccaacaaaaaacccattggatatgctcatcaagctatttatacaaagattaaatcaaatgtaggaactgcaccaatagttgttttagttgatccacgtaccaggaagatgcatagcatggaggcataacatggcataatggtgtaaccaccttatgagaacgtgaacaggaaagaatagaacccgattacaccggttgtttgggaacttcgcccaagaactaattattaccaaatgataaattcatcctttgtaagttgaaatcaactaaatctaacattaatcgataatatggatgggtaattatgtaaatggttggctcagctattttaggtgtagttgaattgtgaaatgcaataaaaagaattgactttttgtagagtgaccatactagttgcctttactaatttcggttggtaaagagttaaattggttttttcctcttcaaacactaacattaggattctgtgccttaggaaatatccacataagctacttcaattggttgtgatcaaatggaagcattgttgaatcaaatagctgttgcacataataaaggaattaagacctcattttatatttaggatacattttatatttaggataaccgacatatctaaatggtatggtacaggtgagttgtgggtcctgctatactaaaattaagctatagtatctgtggttgatgtgctccttataagccttagtttggtcaattaattgattcaatcaaataaccacaactttttggctaagcttatgtgattgtaactaattaagcttgattttctattatccatgtccaactggatcactgtctaccttatctttatttaggccaaatgaaacattgctacatcatacgcatagataggaaaaaataaaactggaggcttattaaacttactttgagtactccagtttaatagcacgctcattggcaacgatctactcaatatgaaattaagatggaatttatgagaagtcaattcttataaatcggcaatacttcttctgacagcagcagaacacacctcttggaataagaccccgtgttaaatcttctcaacaacggctatttttctgcaacatattagtgcaggataatgattaatgtaatgaaatttaaaaccttaaaacaacaaaaaatgcagcgtacaaaatgaactttcaatacattatttccatcatggatcaatggtagatatggtttatttaaatgtgcctattcggtagagaaaagggagatgcaaacatttttgtaatgaataagcataactgaaattcaaggaaaaaaataagtcaatgaacatatacagataaatatagtattttgtttcacaatactgttggcaagcaaacttgagttggtattcccagagtcgataacctgcagagatcatgtacagacctatttgcctcttcagatataacatggtggagaagatctgctcagtttgtctgcatcctatttcctctaaccgcaggaagaaatatatgagaagctatatccaaatgtaggggaaacaatagatctcacttggctaattgggagggggaaaagcaagaaacacaaacacacatacaaccattagtttgaagcccataccatccacatcgaataaaccagaaaaagacagttagcagccattaaaaccaagatcgaggtagccatgcactattttgagcggtggtatctgtaattaaaattatatgtgcaacatacaaattagaatatcaaacatagcacaacaccataattatcaagagatggaatttgataccgacaaaagcagaatgtgtgagtaaaggaagatacggccaaacaatgggtccaatcgcatcaatatgcatgcacaataggaggggtagaaagccccaacctcaccttcggtcctctcacagaagcagtggtcgctgccgactcccgtgaaacctcttatcatgtgtgactcccatgccggcgagctgaggaagatggagagggatcctctaacatgcgaagatgaaagaggagaaaagggtggtaacggctgtcatcctcattcgggtttctggatccgcctgtgaggaggacggggtcgctagacctggtggtcccgggctcctcgctgggagatgtggcggctgaataggagggaagaacgatctcgtcgtggcgacgactggtgaaggatcgtgaggcgacgacacctacccacatgaggcaagcggcggcggcggcgacggtgacaccaaaggagacggcaacggaggtgaaatagggagagccggcagaatagagggaggtggtgacaacggtgaagatgacgtggcggcgacgctggcggagagagcgagagggcagcgaagagagcgagatagctcaagcagttgacgccgtcacggtcgtcggggtcgcggaagaacacctccgacaccagcagcgcgcacacgatgtgcgcccaccgcgcgttcgtcgtgcgcttcacagtgccgcccctcgccgggcagaggcagcagcgtggccacggagagagcgagagggcggcggagagagcgagaggcgacgccgtcgcggccgttggggtcgcggaagaatgcctccggcaccagcagcgcgtacacgatgtgcgcccaccgcgcgtccatcgtgcgcttcatcgcgccgcccctcgccgggcagaggcagcagagagggcggcgaagagagctacagggcggcggaatgggctggagctagggttttgtttggtggctagggttcttggcaaatccaggccatccgttcctgatccaacgatctcatgatggtggaagagcagccacgctgggacacgtggacggccagatcgtccctcgcacgtgatcgaacggacgatagcggcgggagccgacgcacgattaacaggaagtggggggttttcttagcaaaaaaaaacaatggagtggcgcacctagttctccagaacgtgattagccagaggtgaggggtgtttccgaaaaatttgatgacgtggcgagctaattctcagccattaccacggcatttaagtaaacctatattaattgtttactaaaaataggtttaagtttataaactgcaataggtttatacaattctaaagaaaactttttaaaaacaattatatacatacttaatactactatgttttgaaaccaagtgtttagaacttatcaataaagtttcgtaatttttccttctacgtatatcgtgggcatattttctaaacctctaaatgttattttttttacaaaaccctattatatgaattgcttacaatatttttctggaacaacttttaaagctggatattaatacattcatttgtataaagtattataaaaaattgaataacacattatccatttgtccattcaaccctttagaattacgtttagtggtatgttgcctttgagactgaagcggtggcaagcctagggtagctagtttgggcttgagacctaggcttgccttcataatcatacttaaattctcttaatttatcatgtaatttttaagaaaattaatattatattagttaagccctactcagtccttaattttaatttctggtttcgccgctatgtgagaccaattctgctaaccactggtggtaactgatgactgatgagcatccaactacaatagaagtgaatatgcatggtacggctagccacagtgaaaagcgtcccaaacatgtctgtgattagcacgatacccagggcaatgatcagaggccagttccctgtccttgtggtagctatggttgaatgggcagctttctgcctgtgctacaacaactacaagagggtctcctctcacctttctgatgtagctgcactgtacaactattacggtaaattggccgccacattttaattggtaggaacccacaggtttgacttctgattgtaggattacctactgctacccacttttattgttcaggttaggcctccgagagatattaggtgaatattggtgaattagaccatgcatgagaatgttcttccgctatcaattggcttactgccgattataaatcgtacagcttatcagaaaaaaatatatttgtaggtaaaaactttttttatatatacattgttagtgatttaaagtcaaatgctgaaaaataaattataacaaaataacttcggaatcaacttcaaaaattaagtttttaaaatttaaattttgacaatgacttgtaagctagcttatgaagaaaacgatgggagttttatgtgctgaatttgtagtattacggtatagttccatgtagtactagtattgtttaagcactttatatgtttaaatagagagagagatagagagagagagagttatggtgactgatacatgtagttgtgtgtttcacgatctgattttatataggtattaatccggtttaatatgtacatgtagttgtgtttagcgagaagaactaaaaaaagacacgaatattagagaaacatctaatatcaaataattataaggggtgaggcttcgaatccaggtcgtctagcccaccaccctgtggagacccctgagtgtttctcaagcaagaagaacttaatttgttaggttttcagattacccaactttgttatgctcccttcaattttttctgttggaattgtggtaaggatgcacatttgtaattaattgtctgtgtatgatgttgggtgccgtctccagttcgaattaaagaatatcgaacgaaattttaattcaaacagaatgttagtagcctacaacaaaatcagtcattatgtatgcatcgaactgctccattttttattataattagctttgattttttttttctacaagtcgatttctatatgtttggtcaaatatttcaaaataaaaaaatatatattagcaaaatatattcaacactaggtttaataaattaatttggtataacagatgttgcaatgtatttctatacatttagttaaactttaaataaatcaaaatgatttataatataaaattaaggatgtaattaagaagaaggtaattcgagaagctacaaaatgttggttaaatctgatgttttttcgaagtagtttaatgatcctaagaatttttcttcttctttgggacggtgggatgatgtggttgtgcactgcagggcggtcggggcaggcggcgacgctgtcgtggtcggtgcggctgcggatcgccaagggcgcggcgcgcgggctggcgcacctccacgagtgcagcccgcggcggttcgtccacggcgaggtcaagccatccaacgtcctcctcgacgccgactacaacgccgtcctcgccgacttcggcctcgcccgcctcctcaccatcgccggctgcgccgacccttcctccgcctcgggcggcggcctcatgggctgcgcgctcccaccctacgccgtcaagcccgcctccgccgccgcggaccaccaccaccgccccagcgcgtaccgcgccccggaggcccgcgccgtgggcgcgcgccccagccagaagtccgacgtctactccttcggcgtcgtgctgctggagctgctcaccgggcgcccgccggagcaccacgcctcgccgtccgcgtcgacctcctcgtccgcgtcgttctcggggaccaccaccacggtctgcggcggcggcggcggcggcgaccaggcgcaggcggtgccggaggtggtgaggtgggtgcggcaggggttcgaggacgcgcggccgctgtcggagctggccgacgcgggggtgctgcgcgacggcggcgcgcggaaggaggtggtggcggcgttccacgtggctctcgggtgcgtggaggcggacccggagcggcggccgcggatgaaggccgtcgccgagagcctcgacaagattgggtcgtgaggaaagtcgctcagagctgggggggatgatgtgcatggttggtttctctgtttttcttttttttttcttttaattttaattttttatgttttatttttttgccctattattttttttgtcttccttttgcaccattgtaattcctgataaaaatgcaattgttgtagtataatataatatagaatgagaacaagtttatcttctttgtgaaataggaatctgcttgtgaaatctaccaccacactgttgtcctaaattcaatgctacttgtcgggctccttgttcaaaatattactccatccatccataaaagtaaaagtagacatatttcatatttgagatttttcaaataagttattcttattcgtagtttctatgtatccaagacttaaataaaaaggtaaattaaatgtttaatcagagccagatgagctattttaatacttattggttgcatgcgtacatacactccttgatatttgttccatgcaagatgagttttttttttgttggtgacaaaagttatatttgtaatttttatggaacgagggagtactacaacatttagatggtcactgaacaatgcttccttggataatgtaatctcgaccattccaatttgttccccattaaaccaacatcattggctttcaatcttcctcgatcaaattttattgtagccatgtaaaccaagctggccttgcttggacttactgtttattatctgacaatggccaatacttgacaacccatgaatgctgacggaagaccacagtatgaaagctatatatatagccttagagctcatctgtgccacaaatcacagagtactatctatattcgcgaccacattttaggcacattaattgccacaacattttttgccattcaaatcccaattttgcaggtgaaaaataattttagatattttgctagagttgcttccaaaaatttgctaactacttgaagctgaagaagctgcaatatatatgttcagattcacattaccggatgtgacactgaagaagctaaagaagctgaggccgcttcacctgagatctttgggaagtagttgaaaatcttgctgacgccttcggtatgtgattgaaattcttgccggtagaaaatttgaccgagtagcctaaagaaaaaaaatatggccttgccaacaaatactttcttccccttctgttaaacgagagacgaagagagtgcagatgttgaccaatgaaaggatcctctgcacacaattgaagagaaaatgagtggtttttcccttcgatttgtcctcaatgctggtcacctcgtcgatgagcatgttgtagttgtttgaggactattgactgcgtacgcgtttcaccagcgagagatcgtgcgatagtggcggacggcggtgatggtggccgaagatcctgactgctgagcgccgcgaatccgtgatgcaagtgggctggacatcgagtcacaaagaattatgggcatgcgactaaggacggagtggaagagttactgcccatcggatgcacaaaaggatggtgtttcaggactagacgtttctatgacgtagaattcactattgttttctactatagcaacaaactcatttcactgtgcatctccacctttttcctgaaaggcagagggtccggatccatggcaatgcgagatttggggcacggccaagcatcgggaaagggaaaagatttagaaaatcacggagttgcactactctctcgtcttatataaaagaaacctacaacgaatctagataaaaataaagaaacctacaacgaatctagataaaaatatgtccagattcacagttatcaggatgtgtcgcacatggccctaaaacggtattggatccatctcatggagttggatcacaaacactacaactcactatgtttttcgtcctcactttaatgcaaaatttccgaaaattccaaaatggagttaacagtctgcgggctgtcctcctatttatgttgggttgaatggagctggctaagcgaggtggtattattcggtaaacactaactggcgatgctacagtgccacgctggcactgtgggctgctgctactgctctgctgctgttgggccggcttgctgctgctttgctgggctgcacagctagctagctttgcttttcttttttttttctcaattatttgctgggggtgttacacaggatgtatcaaatcccgtactacttggttttctatgggacggagagagtactgtataaacgtttcctatgttcgagggatgattgcacgtggaccgtaattggtcgcgcctccaaaaatcgacttcaattttcacatatggctcattagggcatgcaaaaatctatttttataggcgaatctcttaacgagccatatgccaaaataagcctatttttctaggtagatctattaaacagacgcatgggaaaatgtattttcgtaggttgccctcttaaaaatctacctaaaagtctgacttacctctatttttagtctcagcactgcaattttttcaagttatcatccttatttctcatcctgtctctcacctcctctcctcctcatattatttcaaactcccctctctctcatttctcacctcctctcctctcgctcggcctctcctctctctcccgagcgatggcggcgagctcggcgacggcgactgcaacgcgcaatggccggatccaccgccgccggccctgcgactaccaaccctgcgacggcaacagagatgacggatccggatgggagctagctagggtttcgattttttatttatttttggggattttatttttgcgtgcggacagcataggcacttgcaagcaaaaatgcgattaccgcgtacaagcatgccacccatataaaaaaatagtgattttttcgcacatactttcgggcagacggacggtttaacaacatataaaaataggttttggccgtataaaaaaacagtgcattgcggatcggcgacaatcacgcccaatcatggggaggccgcgctcacctcctcgcagggtgtgtccttaccatggtgagttcgacgttagatcacaatataaccgtttagagcattggatcagccgatcaaatggttgagaaaaagatgtaagctttgggtgattgctagtacaaacttccttttatattaacatatagatagatagataaaaactaatcttatttctgaactctttccttggcgacggctgctatttgtgttgcacgacggtgatggtggtaaacccggcctcacacgacaaaagaccacagcatgaaagctaatatctatggcacatcccctgtggatcttttaaatactgtaagtttatccttttgttcaaccatagttccacagtcgaactatggcacatcctcagcatgaaaaaatagtgaaattgatcgacagacaatggatcttttaaatatctgaaatacacctacaagttctatatatatgtttccaaactaaggatttagttattatgaactgcaaaatcaggatgtacagtctttagttttatttcatttttgaaacgagactttcatgaaaaaaaatgtttggaaaaatattatgctaaatactacatacggactatttgtattaaacagtaccaaatcatcaatttctggttccatcaagaaaaggcatacttttgttgtgtatttgataaaaggttccagataaattaactatgtttaccagattattttactacgaaagcaaatcagccgagtgtatatatatatatatatatccaaatagtcgaaaatacattcaatccattatttcattcaaattgcaaaacacatcatagaaggataaaataacattgatcttgatcatctctaggagttcacaatgaaacatcaatactgaagttccaacaacgcatcaaagttatcaagacggaagatttccgttctatgttttgattattattgctagggagagttcagactaaggataaaccaacattcacccttgtttaattacaatcttttgagcctcgggaagatgttggaccattgtcacctgctggcatatccttcctggaccggacatttcgcttatagaccaaggtgggtttttcctcgctgaaaagttacagtaggcatcaattaagcaatatgaaatgctgcatggattttagcaattacagcaggcatcggtttgggaatatgttgttaccatgcaaattgtgatgtaagaatagcatatatattaatttaatgcaaggattgaaaagtcatgatttgcacttacagaacagtggtttccctctccggtggtatcttcgcacaggcatagcagaatagacagccgcaccttgatattagggaaaaaaaaggtgatgcaagagtttaattagcagcaacaactggacgacacatacaaatataaagtagaccttgtaaatcagacagcgcatattgtttgaagtaaatatgtcacatatgcaatattgataagaggtagactcttatgttgtaattttgtattttttatttgaataaaatttatgccaacagcaggggcctccccaactgtgttctgctaaaaaaacagatacaaatattgcattgatgtagttactgagaatgtattttagcaaaatggataaaaagattcttaaaatagtttacatgagtcaccaaggcaatcgatgtaataccaatcctgaacatgagttttgctcttttgcaattaatctagtgggttgacaacatgtcaacatccctttaccaacaagaggactaactaatagaagcagtgatcagatatagtgtgacactaagagaaatatattctaaccatgtttcaatcttctagcattaatttgagatggcccatggttgggcttttaggacaaaattagtcaacatgacagatgaatctattctaagactgaaggacatataacaaaaacaaaataatttgaaattataaaagtcacaataaactttatgatattatttcatcttataataaactaaaattatattccatctgttataggaaaaatgtctaaatagctaattagtatacctaatgggcacatagaaatctgttaaaaaaacatatatccacagtaatatcgatacaaaaattattgcacaggacaaagtttgtccatccaggaatatgttttctaatcatgatctttctatatggagctttaactagctaaaacaacaaattgctggtaataatcaaatatgcatcatatgaggaatacaaatggcattaatcttcacaccttacaatttctcacatagcaactgttgtttgaaacaaaacaaattaatgcaatgatccactaactacaatatatactgcgaaagaagtgacctctactagtcatgtaagtaaatcaatggatcaaactgtactgatccaaaaagaaaacagtaattctgttccaacaatattggatcaaatcatttaatttcatgtgtcttgtataagtagaaggttgtaggccctatggtctacctctacgatttgcaaacatgcatggtaagaatttgagctcattgcaaactacatgagtttttagtgcaaaatattacatcacgttaatataaaatgtctttgtgttctacaagactgcaattgtgatgacatgtgaagccaaatgaacagcctatttgacaagggaactgaacccatttcattgaccttcgaacctctcttgccctcccctttcacagggtgaaaaaatacagctcaagaggatagaagcaagaggaaaccagccaatatttgcatagagaagacctattagcaaaaaaacatgttatcaaatagatcatttcataagatacatctctcgaatcaaattcacttactgcgcatccttcggatctaaagtttccatcaatagttgaggagggccaaatggactcatttacatagcagaaaacattctagatactatttgtaatgattactaaggtataaaatcactgtacaagttcagaacatgcaaagtaatatgaactacatccagaaaatcagcaataagtaacctaagatggaatctacttctttaattgagaggcaaattcatccagaacaagaacaacaagtgatgtaaacatgaaaactaaataaaaaagaatacgatgtttaccggcaagtgacaatgctgcatcccccagtcaactcaatgaatatgccacatcgagggcatggccgccaaccttttgcaattgccagggtatgcagcggatcaaggcaatcatccctaccaccctccatcccgtccaaagtgaccccttccaaaaattttccacaacttccacacctttttagcatagcagaatcccttaggtttgcagattcccaagctttgcgcacatcacccctgacatgcttgtaccacttctcgtaggtaagctcaccaatagtacatcctggctcagggcagcaaacatgggcatcaccacccaatacacggtaactaatatgatctaaaacacatttgaagcagaaatagtgggggcaaccttcgcaatggaagcgactattcataggcttgtattccatgcatatggcacagtggaatgtcactgtataagattcatcggtttcaatattaaccctcttttccttggtatccatgtttctctcgtggtctgctgtttcggtggacatgctagcccacttaatttatttatataggtgtaaacatgaatgttttccgtgtgatgtatctccttttgcatatctggaagatacgaacaaatcacgggacagctcaacattgatgacatgggttgtcgtacatggctatagtaattaatataaagatttacattggttatttcttcagatacagtctggtacatgtgtgacacagcgaaacaacgtaacataatgtgacgatacgctccgatacacaaatacagatactataactgggctgccaactggaatactattgaaactaccattttgtatcatgttgctaattcgctagttaatttctttagggacccagccagttaacaccttccattgcagtccttcgatatcagttatagaaaattgaaggttctcacatgcacaaccttccatatcagttatgtagccttccctcgaaatgtgaagccagtttttgcctcttgggatagttgggctagcacctgctcttgtcgtttgtttgtgcactgctgactgttcaaaatccttgcaaagaattgcgggtgactaggaaaatttcttcttatcgtgtgcacgatggcatcgctagctctaccactgcttgtaatatactaggattcttattattctactttcagtaagttggtttccaggagctttgatacaagatccttatatcagtgttgcttctattattggtagttgcccacttaggatgcacttttttggcaagcattttgctccatttcaggttttgtttttctttgtagatcaacatcatggcccaagcacgatgaggtagatacgagcaacatcatacccatcaccatggaggatttgaccgaggagcagtgacaagttcttgagaagcaaaagaagaggttggaggtggcggtcctcgcgagctacttgaaaacccatcaacggatttcatagaaaagcggtcctctacccgaatcattttcgatgaggtaaatctcgatgatgtatccgttcgttttcaaaaactcataaaaagcaccatagttgaaactatgaatgctatattcagtaataaacatgaggcaactatgagattttattttaataggaggatagaaaacattatgagttccaaattcggttctctcatgaccatactctaattgagttgttgaatgccatgttagacattgcgaggctttccaagaaatggtggggtgaggccatattgattgtgttatatcttaaatagaatttctattaagaacaaagaagtaacaccattcgaggaatgggaagagaaaaggttgattctcttatatatattggcgtgcctggggatgtttggctaaggtcgatgtgcctatagtcaaaaagctcaaacttggaccaagaaccgtagtttgtgtgtttcctagttatgctatctatagtatgggaaattgtaaattctggggtaacagacatgcatgttggtataattttttagtccagagatgttacatcttttgagaatgaatctccggtgaaagatgaaagatgcatctacatttctagtcaagaacttattatattccctgagtcttttctgctgattgaacacaatgaacaaacgtatgtggaaaatcctcccaccgtcaacaacgccccctcccccgtgcactccctgtgggccttttcatcaacatttccccattaaggtctcttcctcctccaaacttgctttaacggtctcttccttgacagcgggctatcccatggtgggtactgatcaaataaataattacactgataacctcgttcaactttcaacctttcaacatctcttggcttcctcttaaagtgctgaattttcatgttaagatcatcaccatcacctagtctgtcccacaccctagtttgtcccactgaactgattacttcttcaactccttttccacctcctctctcagcactattatcaggtttattcttctaagtaaaaagatgtcttcttggtagatcacgatcaactgcattgcatctctgtgcataatcaggagaactcgctttgctcccatagctgctcccctccgaacctgatcttgctcactgactgctagccgcctagccctctttgttttcacctgttctgcacgcaaccactcaactcacttctgatttttttttaaaaatatcctctttctcggtcttgcatccctcctttgtatgaaataatcttccacagacaaagcaaaagtgagggatttttttcatactgaacctcataccattacccctccgtatcatctgcatccactcggagcttaacagttaataccccttggcagaggttgatttacattcaaattaactctagtttgaaggaacttatcccaagcaataccatcttcatcaacaactacgttaatcaccttcccaaaccatcgggggcagatcatgcacctggacccaaattggtagttcatcaaaggtgatatcagatggtctttgcaaattgataaaccattttgcaaagagcttcgaggttgggaggagacattgttaagttttcagaaaacatatccttggggttttgaccaattgaattaacctatagtcaagttagctctaatactactttgtcacgccacaaactctgataccgctttgtcacgcctaaaaatttagccattttccagatcctattgatcagtaagaaaatttctgggtgtgagttggctcttctcttactttcctagcgtacttgcgtagaggtttcctacaagctaaatcagatcatttttttgcagggtaatgtacgtcaccaggtcatatctatccaaattcgataatgcatttttcttcattgtttcattgcaatctgcatagtaaaccacagaaggataaaattatcagcgttgatctctatcatctccattgtacttacgagttatagaataatacggaaactccaccaacataattgggtattaagattgaagattgtcccttgtttttatatgaattctagagagagttcagactagttgcgagacaacccaataagcacatctgtttctagctttagagtctctagaaggtgttggactacctgctggtgtatccttcctgaacctgacgtttcgcttatcgtctgttggctttcaccacattttgttgttcctattgatggtctctcaaagattcttgtatcagtttgccatcttcctccatctgttgattttcctccctaacaaaaataatacaacagcattaattaataatttgctataaggatggatgtattaaactacgttttccatgcaaattgtgacataaaaatagcataaatttgacataagaatataaaagtcatgatttgtacttacagagcagtgttttccttctctggtgacatttcaacacaagcataacagaatacacagccacaccttgctatcaaaataaaacgtaacatgattcaagagttaattagcaagaacaatgggacaacacatatacacatatgaactagtctttgcagttgagccatagacactgcatgccgtttagtgcaaatatgtacaacagaatgaacagctgtaattactatcaatactttttagcagaatggataaataattattacttttgcaaataaattgaccttgacaacactcacttttccacttgttttggactatcatcagttttaaaggaatcatctagacattgacgaaattcagcaaaatccagagacaaccaatttcagactagaccagctagccagcagagccaagccggccagcctaggaaggaggattggccagctaggtaagagttttttttttttttgacaattcggctaggtaagagttggcctgcctacgacctgcttggccgttgtccgttgaaccaagctgactagccaacaagggtcactattatttggaaacatgatctgatatagccagtgttattttagaaaagatctactgcaatgatccactaactacaagatatactgtcaaagaagtgctctcttctgatcatgtaatgcaagaaatactgatgtaggtaaattctccttcctgtgctttttttaggttcggacaagggtcgctagactgggtattatctgtagccattgcagttctcttcagttctaaggtaagtacataagttagtttgtgctattttcagtgagagcagaactaagtggtgctactgttggtatttcttaacgacattactagatatataattcctagcaatggcgcagaaatactcctggtatattatggttacaaagtttatccgcaagcgcacggatataccattgtagcatttcacccaagagtattttaagggtatcgtatttattttatcccgtgggaagatcatgtagagagaactcgactaataatttatatattacttgtgataatcatattctaagcggggttaagataatccaagcgtagagtgacacacaagcatcggtcactcattctcataatatattatctaagctaagtggaaagaaaagagagaaaatatattcctatacttctagtatacatagtatacatacattctagttatctgatatactagctaataccctctatctgatgccctcatggtacttcgagaagccactctgactgccgagttccttacgacagcccatcatgaccatacaactggggctaaataaggaggaataccctccccagggaattaacttaggattatatacacgcgcggatccaggaatacccgtactgagctgtcaccatcagcggcccacctctcatccgcagcatataaccccaaataatgatatcccgtaatctagacacaacgtctaaactactagatactactctaatatcattgtcatgatatagagtaattgcataagcaaacattatatctgcaccaaagcatctcccagataagctagccgtatattcagtataacatgaacataatgtaaagtaggcattcatatactcggaaagtatttcaataccataaatgtatatagaaatgtattctaataaaagtacaaagcttacaaaagaggaaagggaagctactagagccataccagaactcttccgaagacttccggactcctgatttctactctattcctattccaccagctagatactactaaactaaacttgagagaatatgagagagctttgcttaaggtgtgtgagtgaagtgagaaggtgatgggtttatatagtctcccaatgacggttgtgacggttggaatggtcggaaataccctccaaccgtcattgggagctaatccacaccgtccaaaagaaaccctgcatccaacggcgcctgggagggtttggccgaacctcttggttcgactgaaccaggggcccgcccaaccagcccaggttttggctggcggccttctctgttgatcctctccttaaacttgtgaattttggcccaattcatcgtgtcaattctgagttcttggcctattcatgcataagtctgattgtcgacatcgtccgattgatttatggtttgggttgatgtcgattctcctctactttatggttattctctgcaaaaggttagaaaacctaatactagtggaatattattattctaacatgtttatgcattgcaagcatcactagttctcctctattttggtaatattgacggtcgaaactgatcgataacgaccgtcaacagctaccttaattatccttaggatcagaaggtacatctgtaccaggtgatggagcatcgatatgatgtttgttgctcaggctgcaccatgccttttgccttgctaaatggagtatcaaattagattgcgtgtatcatagcaggacagagcatcccatacgaggaagatagtgtagagatgcattgtgaatggattttaacattgccgattatcacaaatatcatccagaaatgaacatggaaaaactatgatttaactggaaatcaaaagcaatggcatgagctcacattcatggatagttgttgtacttcctactgttctgaccaagaagattatattaacaatggaactaaactttttgcttgcaaatttcagtaatggaaatacaaaattttgagaaatggaaaatcaaagtaaatttaatacttgaatcacatcaagaaaaaaaaagagaaaaagatacccacctctgcaagaccaccacaacaccttctataactttgcaagaccaatctgtggacaaatgaatcacattattcacagtgacatgtaagtaagataaagggataaatcaaattactaaaagatcactaactatggggctgcatggaatcaatctattatcattgggctggccagaagaatctataaaacaaaagtgcacatcttatttttatatactccttttatttccacagaagctatcagttacaactatctttctccaatagccaccatgttaatttaacagagtataaaatggcatcattaactaaaggtcaaaacataaaagcattagaagatggacatgcagaaattttacattgacagaataaacatgatttagtgcagcatcaaaaagtgttgcaacaaaaaggagaaacaggattgttggtaccttagtgaagcaaagccaccatcaactttgagaggatttgtggcagtgaattgcaatgccactaattaatcaatatactaattaagcagtggtctatcacaatgtatattcggtattttccatctacctaaagtgatgattgaaaaggataataaactgatttcaattgtacacctacctccctgggtaggcaaacataaacacggttcaataaggaatacacattaaatgcacatatgtgaaccatcgaaccaagccataccagttttatcctggtcttgttttaccctacaacagaagttatgaccttatgaaagcattataagttttcgccagtgaaaaatagtgcatgccatcacatgaaattttttgaagtaatcatcagtgacatgtggggatgagaatctgataggttgaccaattctatggtagaaaaataatcatcaaaagctgattttcgtaaagaacaatacaaactacctgtgcattgaactacccaaatatcacaaacctagatcatgcattataaatgaatatgcaattcttcatataagatcaattagatataaccctttttcttttttgatgaaaactaagtgatagattatctggtaactttaacaccgtgctagaagagcacatatatggttaaaaccatcaaataagtaaatacctgtgaaaatcggacctaaaagttttctaaatttatgagaaaattactagagaaagatgtaggaatgtaatacatcctcatcaaatcttaagttataactcaactttacttgggagtaaaaaaacaaattttgggtaaatagtaacatgacactaatcaactgaattttgtctttttccattgctctcaaatgaagttgagtttggactatagatttggtatgaatatatgttatgcctatacctatctctagattttttttatgaatttagagaacttttaggtatggttttcacttattcgaaggttttcactgaatatttccccgtgcaagaatcagagaagtgaaattaaataacaatgatttcttcatcaaccaattagtggacaacaatacatgtctttgatcttgcacaaattcatcatgttttctttgaaccttctgatatattaatcacaaaccaataatgaaatccattgtaaggtggcagctaattggtgttgggaagtttaggcaacttaaaatagaatcaaagcaatagatggattgtggaacaaacactgagataaattgattttatacagtgcaaaaagagcagatatatagtgagctttagccatcgcatccaaaaaaataccgagagaagtgttggattattctcttaaataggaattagtcaaattgcataatactactagttggttaatttggttgcttattgctgcttaagtttctggcacaaattagcttagcttagttgtaaatgagtgataatgggctctagaatacacaagtgagttgtatgcttttgtatggtggcatggtaggatgcaaagaaaattttactagttagcaaggttgtacagtgtactagtagttttgttggtagcttgtgcttggtagcaagctatagttttgagctataaaaagccactgtaggtcgattactgtaacaaccgcctaaaagtcctgtaactggacatgtagccctctatgaaaacaagtatgggagtctatgcttgtgaaatatatgaaaatgcagctcctttggtgtattctgttatgggagtctatgcttgtgaaatatatgaaaatgcaactcctttggtctattctattatgttgctgtctattactatttgtcatgaaagaaattcatcttgatcttagaaaaccaacaaaaagcactacaatgcatatcattattttttttggtaccaaactaaaggtttttacaaacatatagagttatgatccagatagtttagttgttccaggttaggcctaagccttcagagacatgataatatgaaatgctactgttggtaaagaatgaactaaaaatgcaaagctatagtctcttttgattaagatgcatgactacatttggatgaagcatcatcaaatcatccacaaaagtactgtaaattgttatatgttgccggaaactcaaatcagcatactcatactttaactacaaagatatatcaatttctcatagctaaaaataggtttcgcgcaatgctaaactagagaaaataagtgtgcagaaaagaagaaaaatggcaggccctaatcaaccctttcaaaagatccatatcttcaatcaaattcaactactacccatcgtctagatgtaaagtctccatcaatagaagaaggccaaatggactaaattacatacaaaaactatcgagacacatctctacatgtaagtattactatgctacaaacatgtgagattactcttagttgagataaactactactagcaaactaacaatcagatattcaacccaaacaggcacaccagagtcatgtcgacaagaaaacttaaaagaaagacaactagaatgtttaccaacaagttaagatgatatatcctccagcagataaatgaatatgtcacggatagggaacggccgccaaccttttgaaacaaccaatctatgcatcgcatcaaggtagtcatccttgacaaccaccattccttccggtgatccattccaaaaatttcccacaactaccataccttaacactgaatattcccttagaagtgcaactttcgaagcatttcgcacatcatccaagatatgcttgtaccacatctcataggtaagtcaccaatattggatccaggcacagagcaatgaacagggatatcacccctaattacatggtaactaatatgatctacaatacagttgaaccagaaatagtggagacaacctttgcagcggaagtggctatgcttaggcctatattccatgcatatgatgcagcggaatgtcaggctatgagagtcatcggtcacaactggaaccttctcttccttggtctctccatgttgctctggtggtatgttgctttggtggctttatttgcccacacatttatttatatataggtgtaaacatgaacgcttttcatgtgatgtatctgtttagtgaatctagagatactaacaaatgattggacagctcaaaattgttagtattggttgtcgtgcatggctctagtgattaacataaaagatttttcattggttatttcttcggatataatcagatacgcttgcgacaatggaagagcaaatcatctgggaaataaatacaatcagatatggtggctggactaccatttggaatatttatttacttaatgctaatcttcaattttacttggggacctccatttaacaccttcaatgataggccttccatagtggagaaatccaggtttttcacatgcacaacattctatatctgttgcacaatcttcacttctaaaccaattctaggactagtttggtgtccacctgggcttgccccctgtgtgtgacaccaccgacttctggaaacttgtgatgccatcgccagcccataaatgaccataactatgttacacaacaatgaacaaaagagcatgttttatagttagattcgatttttatatatttgagaaaatggtattgcgccatgagtattgtgtgttttgttttttgcaagcgcttgtgcaaattcacgaaaaggaagcacatatgcattcaatttacagaggaccaatgaagatgattggggaacatagtggaaaaagcccgaccggttggtgacccggtcaacctttttgctggtctaatgatatgaccgatggatcggcgatcgaaccgcggttcactagcatacatgttgtgtacatgtttcaacactaacacattcacctaaatggtaggatggctacatgagtttgctttcaacctatcgatctaagttcgactccccattcacatgccttttcatgggattttttgccaaaaacaaaaaaaaggtgttgtgaggcccaaaactaattggaccatctggtggccccttcactcgttgacctgccttagtccaatccgaccagatgtggcatattgcccggttcacctcaaaaccgaatggttcgagcggtccaaagcggttcaattacatgtccagtctttctattcaactaaaccgttccaacctctggcttcgttgttttccggttgaaccctaatccagtcccttcttttccactatgtgagggaactggtcaaatcctaccttcaaagtttcttagtgtcaccacatcatccatcgactaagaaataacaagttcctgttgaatatgtccttgaatccaatttgtcctcctgagattgtgcaacttcaaacaaccacaagatttgcatacgatacctcaaattcaatctgggtcaactgcgatcgatagaacaatgacagactattatcggcccattgagccttcaagactagttgttgattttcgatttgaactatgtatcgagtcaactcctcttcatttttaagtgaggtagcatagttttaaggctacataagacctaacgtataaatcaatttagtttcttcatgctctccatagtcaacacaaagaaagcccaataactcctttcatgtgataaactaacaattcctccattcttccctttgcttatccaaaactcctttatatacatgaacctcatagtgtattcaatcaccgagaatctagccatttaatacttagcaaatatgattactcccaatgatcatgccatattttctaatattgtaagatataatataactcttggtttctaagactaagacccacaaattaaacctaatgcaataaacaatagtctatagataaaacaaattaacattagagtttttcaagaggtaccggagattgaacaatctccagtaatcatgcacaagagtgttcctccatttcttgcccagaaagtccattggtgctcttttgttggtagttgttctccactccaaataggcgagctccaatccttcacacaaaccagtgtacctcataatcttcttccaagagagatctagtaagcttagtggatgcatcatcggaaaggataaaactgccaccgggaatagtgttgcacttaatccgttatttcattgcaaactataaaactgttgtcgaaacgacaaccgcatacgtcgaaagatgtggttactcaacagtggttggaaaaacgaagtgtattaaattttgaatttcactcggggatccccccgttacatggccctaggggactatttatagccccattacaggttcttactactagggcttaggttatacaagggaatttacatgattacccttacaaaagggacatttacaggggtacataatgttataggggctcatgggcccctgatgggctgtctggcgatcgccggccctatagcccctaggcttgatgggccggaaaggcttcctcagcccttgcggaggcgaacttgccatggcgaagtcgtcttcctttggcagatagtcttcgccttgcacccttcgcctgagacgcctctggcctggcaagtcactcgtacgactcttcgcctcacgccgttcttgctccatagccttcgccacgggtttcgacagattcggttgaagggcctcatgccatccgccaacaagcccctcatgggcaagggtgagattggagcttcggccgagaccgtgcaaaccatgtggtatggtatgcggcgccccctttcgaccgatgctcctgccgaaacctacattattcctgtgaatgaagtttgttacttgtgcggctggcattattttgccgcgcttcacctcctgcgattggtggttatatattcccgggccgaacggaacagtattgggctttcccttcgtgggctttttactgtgccgctcggacggtgggaatttaccgtttcgcctacccttgcgacacgtggcgctttattactggtgggtaggcgaacggtcgcccgggtgagctatatattcccaccgctctttccttttcaccgccacacttgccattttaccgcgtgcgttctcttcctccatttctttcttccatagcatctcttgacccctcaagcgtttcggccattttctttcttcgccatcgcaaacgcactgttcgccatggcccctcgcaagccaaaccctgcttcggcgaaagggccggatcccggccgagtcgatgacgacagcaccgcctttttgggggtttctcttatggacgacgtcgagctggtgaagctggtcagctctggggcgttggttgaggggcaggctttcgccccagggaaagccgtggtgccgaaaccaatcgacaatcggacggtggtgttcaccgtcttttttaaggcagggctacggtttccctgcaacgtgttgttgccggagatccttcgcctcttccaggtggaacttacacagctgagcctgtcggcgcttgttcggatcgctattttcgactgggcatgccggacttctgggtttgagcctaacgctgagtttttcggcgccatattcttcgccaccgtgaattcgaagacggtgattaccccagctgggacgaagaagaccgtgttcgggagtgtgaacttcaacgttcgtcccgagcggtccgatctctggccggtgaacgctgccatgtcgaagtgggaccgccattggatggctaggtggttctatcactccatccccttcgaggctggttctgactcgacaaaagccctccggtgccggcgcagggcgatcgcgccgaaccggaaacccaagatcgccgtggacggcgctttggaggcgcggttcgttctgctgcgcaaagtttgctcccgccttagctgccatgacttggtagaggaattctgtatgcttcgcatctttcccctctcccaggcatggcaagtcacggttgatcaaggcgaagaggttgacggtttgccgaacctgattcttcctgagaggacgaacagtaagacggttcttttgctatatactgctgtgctttgttattttgccttgtctgacttttaacatggctacacacttttacttttgcagtgttaaccctcgactaggctgaaaccgaagcccgcaggatgatcggcgacgtatcggtcgtcgagtatagccagctgctaacacgacaagcgtctgggcaggcgaaccgggtttgtaacggcgagttgcctcctcgggcaaacccccacaaagcggacgacgatgcagggccttcgcaaaagcgaatgcgcaggcaagtgaagcttgcccctaggaagcgaagggtccttgcttcgtcggactccgacgccgacgacgaggacgatgccgaagaacgcgacggtgagaatgaaggagaggaggaagaggaggaggccgtggccgataaggccgcgaaagaggcgatcgaagatcgcgtcgatacccccggctacactcctaccccaagtccaggtcacaacgagaccggggtggagtcgaacagctccccccttcgacggaaggatctggaaggggcgaaggctctagttgcgttctccttgggaacggtggcgaagggaggtccggtgaagaaggtctccaaaaagaaaggactcgtcgacatcgcccgcgttttcagcgacgacgagtcttctgacgagactccgacatcgcctgctggccgcagtttggacctttcgactgctccccttgcttcgctcagcgttgctggggcaggcggtagccccgccgccggggcttccgcctccgccgaacagatcgtgtcggctgcggcgagggttttcgggagccctgtgcgtgagccagctatttcgccgctcctatctttcatctagattcttgcggctcactgttcgacggagcgaaccgtgcgggcccgttttgacggttttaagagccgtcttcgggccaaggatgatgaaataagccgcaagaacttggaggtggaggccctggcccacaccctcaaggaggcgaaagctgaagtcaaacgccttcagtccgaattggataaggggaaagaggccaggggcgaggttgatcgcctcaaggccgaactggagaaggagaaggcccattcggcggtgctcatcgattactacaaccttattgagccgaagatggaggctcttcgccagaaggctagcagggccgaagcgagcgccgcggaggagtcgcagcggttttcgcgggagatggcgaagaccacctaatctgcaagaacggcttgccaaacgctccgccttgcccttaccgacatgggcgcgaaggtgcgtggggtccctgccgaggatgcctcagcctttgacttctccgagtggacccagcaggctggtagatcggtttcagactgcgccaccgcgtacggcgattgctgtgcgcgtgtatcggcggccttcaccttaggccttttgcagcagttcggctgcgagcacgtcgccgagttccctaccaacgtgaagggggactgggagattagtgcgtagaatatttcgcccgctcttcgcgcgtggcgaaaacagttctggcagaaagacggccggtccgctgccaagacgcgccttctggagcaactggcgaaggcggaggcggcagatcggtgcgaagaagagggtgcggtgggcgaagaggttggaggcgatgcccaggatcaccctgaggtgtgaggccctccgccctttctttagagttttgtagtttttctccctcttttgcgtttgcctagagaggcaaatgatgtatattcggcaagttgccaccaaaccttaaaaaaggcttttttgtatatttggaatgtatggcacaatgttaaattcttttttgatgattgaagcctttagcatattattacttcgctcatttcgcattatgccatacctcccccttcttttgcctattcttactatataagctgtgttttgctttttctgcgctgtctatcagggggttcgccgaaagttgtgcattcggcccccttccgggagctagcgaagtcaaaacgagaaatttgtggcattgaagggtctgccgaagctgcgatgtccatttcggcctgtttatcgcgaaatggagataaatggtcgcagctataaggtttttaaggttgccgactggctgcgggcgcaccccgggcgaaccttagaagattacgatcttgttcaatcaagacgtttggaggatatggatcgcttttggcgaaaccatcagaagactaaacgtcaggaaacgatctttcaacgtcgttacagtttagtctgtgtttcgccccctactcctcttaaggttgtgtacgatattagtagtgatgacgaacctagttcgcctgaccattccttagggagggatagtgattacgggggcgaaaatgtaatttacttgtaaagtaaattgtatcgtgttgtgaaccttctattcttcgattatttttttttgaagttaataaagaacgtgctttatttccttttcgctatttttcgcatcgtcacattttgtgcttttgttaggttggaacatgccggcccctttgcgtatattagtgaaataggtgtactgacttttcagcttttcgttattcgttttcgatctgtagcattttgtgtcgaaagagacgcttttgcttttatgttgatcgaatagtaacgtcgttcagctagttattttccgagacaagctgttgcggtttcaacgttcggcgagcgatgcttcggccgattcgtttcgcccccctggcctttttcgctgatcaggcgtttgccttggggtttttccacaaattatcaatcacacgaaaaataaaaagaaggcggaggacacagagattttatactggttcgggcctccatggtggataatagccctacatccagtttttttttctctttttttttctcttttttttccttgccgaaaagcttacatagtgccgaagggcttacatgacggtatgtatatttttacaagttggcgatttgggtgccacccattctagacatagaagcgcttgagagaggcggcgttccaggaatggtcgaactcctcgccttcgagtgtcgctaggcgaaaagatcccatcctggacttgtgtttgatgaggtacggtccttcccactgtgatt

SEQ ID NO: 25975 - DNA, 602 bp, Oryza sativa
ccaggaaactatgaatctcggagactgtcttcggttgtttctagttggttactcattccacattactcggatcaacggcaactcctccggctgagatgacgtgtccaaggaactttacttcagacaaccaaaattcacatttgctaaacttggcatacagttgatgttctcgtagcttctctagtgcaaggcgaaggtgttcttcatgctcttctttggttcgggagtagataagaatgtcatcaataaaaaccaccacgaacttgtccaggtattccataaacaccttattcatcaagttcatgaagaaagcgggggcattggtaagtcaaaagacataacagtacattcaaacaacccatcttgagtggtaaaatccgtcttaggtatatcttcctctttaatcctcaactgccctgatcgaagatcgatcttggagaaaacggtggctcctttaagctgaacaaacaaatcatcaattctaggcagtgggtatttattcttgatagtcacatcatttagtgcacgataatccatacacatcctctcagtatgatctttcttttcacaaaaatgactggagctccccatggagacgaact

SEQ ID NO: 25976 - DNA, 20381 bp, Oryza sativa
cttccagatccagaaacgaagatagggttaaggtagaacgagatggagggagagagaaagaggaagcaagtcagcacaggagctccccaaaggtggaagcagcaggacaccgtcggccaccgtaggcgagggaaggcggacggagagaccaccggatccgaagctcgccgacgtcactgctgcctttcctcccgccgggtctggcggaggagagggcgccaccgttgccgccgtcaccctaaggatccaccaccgctgggctgccaccgggccaccaccgcctcctctcccaccatcgggccgccacctgcaccgttcgctgcctccacgccgtttgccgccaccgcgcctcccctcccgccggatctggcagaggggagggcgccgccgctgctacacacagagagagagagaggagaagtggagaagtcaggatcgagagaagtggagaagtcgagaccgatcgagagaagctggccttatctcctccgggtgtgggccccgccgggagaagaaatatctcctccggctcggctcgatttttaaaaggtgtcagttcggctcttttaaccaataataaattaaaggtgtcggttttttctgaaaaacagacacctacagtataggtgtcggtttttatatagaaccgacacctataatcaattaaaggtgctggttttttgtgtttttgaaccgcggaggtgggaaaagttctttatgtgtctgttttagcacttccggcacctatagtgccgacacctatttgatgtttcatagtagtgaacgtggccaaggttggtgaagaatgacttgcgctattttattgattcatgatagttggagttacaagttatacgtaaaatcttctgaggtgctcgatgttccaagagttgtcgattaattcacctttcatagttgtgagccggtaggcaccgggtcgagtgacggtgatgactttataaggcccttcctaagttggagatagcttgtgcctatcttttgtggtttacactcgacgtaggactaggttgctgacagaaagagagcaatctcatacattgcggctttggtatttgcgtggtagttgctgataccgggctgactcaatcgtggcctcttcgccgtctccttcagggtggaccatgtctatatgcaacgagtgctcgacttcaccctcgttataagccccataccatggggcctccgagtgcgagcttagttggtaggactgccttggttccatagcgtaagaataatggagtttggcacgctgcccgacaaagtacgatcaaaatacctgaagttacaaggtttctttcagcatccctccattggcttggtggaattcaacctttccaccaaggttcaatgcctagacttggaaatagattctcacattttcaatagttagatctgagatatctgacatgcatgttcgtacaattatgtagtctcgggatgttacttcttttagagttttttttccaatgaaggatacacatagtatttctagccaagcttttgaatgcaatgacaaatttatctaagaaaaacttaactctaataggataatgactactgaataaataggctctagggtcgaccaagtaccattggatgagtccctaatagaatccaacacgatacagggcctgatgggcctaaatacagtccctaatgaactccaacttgataaatgacccagcaggcctaaaatatggcgacgtagcactcgtacatattctggaagtcagttttttctactattcctgttgacttatgaagaatttaaaaagaattttgatgtgagactaggtccattggaaaggagattgatgaggatacaactagctcggatataaccatgactaccttatgtattaatcaacaaaggtgcatatgttctatattagatttacttgttatatgtttgaacaaacgctgctacacaatgagttttgtgtgtttttgtttgcagcggtgcttgcttgggcgaaagaaaagagaccaagcgtaaagaatgcatggatgattaaagaagttgattgggaccaaaccaagaccttctccaagtattctttcatctcaccatgtcacttttggtccatagaagacaagagataaagttctacatgttttggattcggattcgggcctcctgacagcatcaacttcaaacggacccagtcacaaatctagaaggaatttcggggcccatgagtacttgttggaaagcttatggagtctaccttcagatggttttggttccacgtcaaactttctaccgagctactaggaatcagcaaaacaaaccgcgcacctcatccagtccgaatccaatttgtgttttgagccttgtaattgtgtcgtgggcttagcccaagggggtgtgcgccctagggcaaccctaggacgtccctaatcatacttaatcagtagccatcgtttagagtcaggttttgcttagattattctgttaagagcagtttcgccgctagatcggtttgtggaaccccaaattcgagtgcttaatcattcatatgcaatttggatgcaatctatcttgttcttgcttgtgttcttcgattcacatgcagggattagctttctcggcgaggtcaaccgggtttcggcgctattgataaccagaggatacgtggtgctgcgattgcgtggctcagtagcgtgttcgtttagaagccggatcgagttgtgtcatgactccgtccaaatcgactgtttatcaatacctatcagaagatcgggacctaacatcccttatcagtgatctctttaggttttcatacatacatatgtagcacattgggagtctgaatgaattctgggcaacgattttagtgtgtgctgttcctgggtttcaaggcaggttcaaacttgatatgaattagcccttcatctcctagcatctctccaattgcttattaaaaaaacagagggaacatatgtaagtaacaagacactacctaagcgtgaacaacatttagtttagccaagatgcttacctgtaattttcttttcttttgcaatccttgatacaatcaaagacgtatgcgtgcacgtacacgtgcatatatatgaatgcatatatttccatcacattatacaatcatagaaaggatgttattccgcactaattaagctgatgcttctcgcgatagagttcagtcccactaaatacacgtgtttgcgtgttggtgtgtgcattgttatggtagatcattgttacgactaattattatttcagtgatagacgatgtattcgtcaatagtgagatatctatagtaacatggtgaatctcaagctatgctggtcctcgaacagggtcggccctggccctatgcagctaaggcaaccgccgagggcccatgatggtggggggtggcaactctgaaaatttaaaatcctttgatgaagtgatctttggtcgcactgcaagatttttgcggaaatatttactcatgagaactcatccgatgttgagatcaatgatttttatttagaattaaaggtgttgcaaatgagtttgccagattccgcctgagattgtgaagtttgttatggatgcagattgctatccaaatatttcaattgtctatcgaattctcttaactgtacctgtgacagtagcttcaactgaaagaagtttctcaaaattgaagttgttgaagaactatttgagatcaactatatcacaagaaaggttaaatggcttggctatgtgctctattgagaaggatatcttagacactattaattttagtaccgttcttgatgattttgcatcaagaaatacccgaagaagtatcttttcatgagaagtaatagatatgatgtgatcctattcttcattaaggtaatgatattagtttcaatgtacaaatgtattgttattttggtcaactttatttctcgataattatcatacatgttaaatttaatgtatggatgtatttattttcgttttgtaagtaaaattagcgtatatatgtatatcataagattttatatatagcttagaggacccatcatgataagttcgccaatggccttcaaaatcataggaccggccctgtcctcgaagatatgcacatagtttgtagggtgtacatgcatatatagagagtgtgtatgcatttatacgagcgtatacatctattgtgttccaaaaaaaaagtgggtggaactttatataatcacccatgtgttgctttgcctaattaattagggtcaaactcgatgccaatcagaagcggatgtaggattggttgaaaggaggactgatcttctttctcttccttcagttcccctacgctcattccctttcctcttcttcccctgcattggatccgtctttgtgctagtggctttacaacacaacgcgactattgtggtaaatttctctctctcaatttgttatcatatttgattgattcacacctaaattaatgtactagtataggttaattatagtcattatttgcttctgtacatttgcgtatgcagtaaaccaaatattttaagacatgatattgtttgtttcagaaaataaatgaataaacatgtgacttgttagactctggacgtgtttagaatcaatttttttttcaaattttcaacttttccgtcacatcaaatatttggatacatgcattgagcattaaatatggatgaaaaaaaccaattacacagtttgcatgtatatcacaagacgaatcttttgagactaattacgccatgatttaataatatggtgctacagtaaacatttgctaatgatgaattaattaggctaatgatggaatctgtaatttattttgttattagtctacgtttaatactttaaataagtgcccatatacttaaaaaaaatttggcacacgaactaaacccaacctctatctagtgattgaaaattggattggcaaaatttgccctaggacatccaaaaattgtgtaattggctgagagacactgtaaaatctcgttgctgctgatagacaccacaaaatttgtgtaatttgctataggacacccgagacaatattttatcatttcttatcaaaaagaggagagagaaatttcaaaaagacaaaattgcccttagctctatctaatccccattgctggcagccgcttcccagcgtcgctcgccaaccgtcaccatcgaagccaccgccgccggctcgctgatcatcatcgaaactatcaccaccgcccgcttcctagcgctgctcgccgctgcctccatcaccacagtcgtcgggctcatcaaccatcatcgaagcagccgccgccgcccgctgctgcatcctctgtcacctccgccgccgcctccacaactagcgacaacgccgcctccaccgccggtgctgccgcctccacaacctgcgacgacgccgcctccacaaccagcctgatggcatgcgacattgttgttgggcgtcaccgtcaggctgagtgctagatgcgtgtaggcgctgaagatcccgcatgagaagaacgcccgcagcgacggcttgagcctcgccgcgccggcgccggcgccatccgatccaacctcctgaagtcggcctggagcagccgcgctcctggtgtggtcgcgctgctgagcccggccgtccttgcgtgcgcagcgccgccccagcgccgccccggcctctagctctggcaccacctctcgcatgaccgcgcagcgccgccccaaccaaggcgctgcaccagcccacgccatcgccagcgctttccctctccctcgggctcacttgaagattaaggaagaataaagaaaaataattcgaagggtagaaccgtacttacacagccgtttctctctcctattcctccaaaaataataaaataatgtcgcgggtgtccaggagctaataaccggttttttgtgatgttctacagcaaatacgtgtttttgcgatgtcccatagctaattacacgttttttggatgtcctgtagcaaattttgccaattggatttggagataagaagaaacagtcaccaagtaactaaatgttattgcattaattgtcacgctccgtatcagaagtacgaaataatatctctattttgaccaaattaataaatcgtgtagaatgtggaaaccacagtttaatgatgtcttgtctctaagaaaatcttcatctggccggcaggtttacaaccgaaagattattcaaacgactttaatttgtacttgaaaagtagagcttcgtcctctctattggttagttcaatttaatttcttcctaagagtggaaaacatagcgaacacatttacagatggagtaaacaaagactaatgaatcatagcagtctccatccgtcatattaaaatattaacacaacttaatttgcatctcgttttcatttttgatggatttgcctaatgcatgcgcaacaatgttcatactatcttttgtaaagtacttcaatgatagtccctccatttctaaatatttgacatcgctaacttttttaaatatatttaacctctcgtctaataaaaaaataaataattattaatttattttctatcatttgattcattgttaaatatacttatatgtatacatatagttttacatattttataaaagtttttaataagacgaacggtcaaatatttactaaaaagtcaacagtgttaaatatttagaaacggagggattataaagcaaatgcctgtctctttgcctgaaatttaattattcacgatgttccatatcaaagaaaagctacgactaaaataaattgcaaagctacatcacagacatgatgattacttgtttagtgatcctcttcaactcttaatttgaccgatcgataagcacagtttgccctaaaaaaatagaaaagaaaagccgtattggagaagacaaatgtgcatcataattaaccaattactggattgcttcaacggaaaagaaactaatgttggctgtttgcattttcagatgagctaagcctgctacaagaatcgcagatatatgcttcatataacacgtgagagagcgtgaagccatatctaatgttgtatttgagatagataatccttctacaggttttttttttaaaaaaaaagacagagatgtccttataaacatgattgaactatcacatttcttctagattgctccaacagtctatcattagttagctgcaaatttgctcatgacacgttgtcgcatttgttgagaagaaagataacagaaaaacataagagcagtgtctcttggtgtctcggtttacctttgcgtttttagttaaaatcgctttctcacagtgtcattgagaaaaccggcagaaaacacacaaagactgacttttttggtcaacaacgtactgagacaagctaaaaccaatcgagttttacaaaccgacaacaacagccagctgttttcaggaaatctgatcttgttgactgctttgtgaaccctctactctcagaacaagaagaagtctacacgtggtccgagtcaaatccgatccttgatgcggaagacaaaagaatgtatctgcactctgcatcacgaaatggctattatttcctacgattctaggcaaactggcctaatctttttcttactaaaaagctaatacccactagacatctaaagcctaagtatagtttttattagcactcttaaaaacctaacatataagtatgtcacatcaactcactaaatacataaagctcaacatacaaacatataataattatatctacaatttattccatttcaaaaactaagcatacgcatgctaaatcatgattctcaaattattttataatatttcaatccaaatcatttaatcatttctataatatctaacatatatcccgcagtcaaacgtgggacatcatatagtataaaaaacagttaatgtctagtccacatgtctacaaataaaaaatagaaaatcccttttttttaagaaaagacatacaattctgtctaagcaaaaattgggccaatatgggccgagaataaaggcatgggcctggctaggatggagaggtccaatggccttggcagcgcatctccaagttggcatgtaaagaatgtgcctgttccaaatattatacctacattacaaaggtcgcgctcgccatcccgcgcgcgactgaagacgtgttgcgcacagagaggaggcgacagacggcgcgtatggtttccttttttttttcctgtttttttcttccgtaccttttccagttttccttttttcttttttttcttctcgtatatttttccgttttttaatacgtatgtatgcaaactttgtatacgtataaatacaaactttatatacacgtatataaattttgtatacacgtatgtaaactttttatacgtgtatacaaagtttgtatacgtgtatttttgggttttatacatatgtataccaactttgtatacacgtattttttaggttttttatacgtacgcacacaaactttatatagatgtgtatatcttttatacattaaaagtgcatacatataaaaaattatttatatatacacacgtatatatatatagtatatacatacgtatatacatatatacatatagtacgtatagtagcgcgcggccgcgcgactgatcccccatattacaaatatataataaacaaatagcttataacaaagggtcaaaacaacttagaaatatttttttcaatgaaattatattttttaagcgtggagaaaataatccagggcaaattcatcatgtattaagttgaaaagaaggtattccctccgtttttgtttgacttttttctttgaccaagtttatagtaaaatatagtaacattttcaatacaaaataaacactgtatcaaaatatatttaatgttaaatttaatgaaactatgtatacaatgctaatttttttataaatttggtcaactctaaataactttgacacaataagacagtcaaaccacttgtaacatgtaacggaggggagggaataaaaaaagttttgttactttatacattatttaatagtgaactgtgaaagagaagtgaaagagggggcatatttgaacaacaaaacgatgacaaagagaggaggggtcacggggtgaaagaaagggaaaaggacgaattgtttaggagcatgtaagaaatatgaccgctccggcactccattcaaaagaatgtaattctagaaagagtcaagtgcacgggcggttcttaaacttgtagcgctgtgtcatctaggtctctgtcagggttacgggtcaggcataccctctacccttcgatatacgttacatatcgacatggcatacccacgcgcacgcggatgttttctacatattctaaggaaacctttcacgaaatctacagatgggaagagtccttctcggacagaactgggtcgtcgatatatcgtattgggtctaatatctctgagtcctacttggagacctctagatctgtgatataaaagggacccccccggggagggcatagatcattgaatcttagagccaacacaacccacacagcctacaaagccgaagtctgcaaggagccaagtcatcgagagctagtcgaatccactcaactacgatctcgccggatccgacaagttccatcattccctttgtaatatgtattttccaccatataatcccatatcaactcgattaggactattacctaccaagaggcctgaaccagtataattcttgtcttttgattgttcgatgtcgtactacatagatccttgtaccaacgtaccccaataccctctatatccggtctacgggtatcacccgtcgacagtggcgcgccaggtagggggacttgatactcaaggttctactactatgtcatccagcttcgtcgacaacaacgtcaacaccagcctcagccaagcgctccctgcttcaacaatgctggtatggactcaagtcggtgaaattgtcttcctggtttacaccacgacgccgatctcaactggtcctccaatgaccggaaacgagaacacagtggctacaaaccaaggcgactccatgtcgaaaaatccacccgtcaaaacggagaacggatcatcgacgacatccaagctcgggaaggattctgatacggccaaaccttgtccttccgacatgaaccacgagccggcaaaaatgacttccgaaaccacaaatccacaaaaccaagaaacacaccctgcaagattgctgggttttcctcaacgtccgtgctgaaattcgcgcctgcaaagaacgtggaattcagcgtacttctccaactcgggatgtctattgtcctattcacaagacaaataatcacgacctctcgagctgcaaagtcttcctcggcgccatgaaagatccgtctcctaagtcatacgtccccgtcagggataacggcaaggaacaaggagcgactctggcctcagatcgattcgttggggtaatcgatatcgatcctcacgaaccatcggtcttacatcttctcgaagactatgggtcatcgacaacgagcgtgccgcgggaggtattggctatcgatgacgtcggcacgtcagcgcaagccaacgcagaagcggcgaatcaatcgactactccagcccaacacatcagggccattcaagctatactgagggaaactccttacgatcccgttctgaacgatgacctcgagcgttggacagaacgactacgggaatcagtgaccaacctcagcaacgcgtttgaagaagccgctaccgcagcgcaccaagatcagccgccaactggcgacgccaatggtgaagatccggaacggagggaatcacctcaacgagccactcctccacctcacggcgctggcgatctccgagatcaaatcaacggccgccgagaagcacgacgcacacgagacaatgtaaatcgctctcggcgtcatgtctcttcacggcgccatgataacggaaatcgaggagaccgctcaaacgaggaccgggatcatgacaaccaccacgatcgcaacgatcgcgaacgacgggggccagacaatactggtcatggccgccgccgtaacgacgacgataatggagatcggcgccgagacaacagcgagagacaacgacaggattcccgagatccaggctgtcatcctcgtaatcgtacgctggaaccaagcgacccatcgtcatcatcatcatctgcgtcctcctcatcgtcagacagacatccacaaaggacacacgaccaccgacaacccaccgcccccaacgctgggtgcagggctttcggtcgttccctacgtgatgtccgatgcgagcaccgacccagaagaattccttcaagtctactccacagtactttatgttgccggagcagacgacaacgcgctagcaaactatttaccaaccacgttgaagggttctgcacgttcatggctgatgcatcttcctccctactcaatctcttcgtgggcaggcctgtggcaacaattcgtcgccaatttccaaggaacgtacaagcgccacgcgatcgaagacgacctacacgcgttgacacagaactcaggtgaatcattgagggaatatgttcgacgcttcaacgaatgcagaaacacaattcctgaaatcaccgacgcttctgtaatccgcgccttcaaatctggtgttagagatcgctacactacccaggaattggcgacaagacgcatcacaaccactcggaggctattcgagatcgttgagcgatgcgcccatgtggacgttgcggtaagacgcaagaacgacaagccgaagaccgggggagaaaagaaatcagccacagacgcatctgagtcaagcaagaagaaaaatcgcaaaaatgggaaaaggaaagctcaagccgaagtcctcgcagcagaatacgcgaaccctcccaagcgcccagacccacaaggcaacgacacaaagaaatcttggtgccccatacacaagacggacagacattctctggaagattgccttgttttcaaaaagtcgctcgagaagcacatggcgtttgaaaaaggcaagcgagtacgcgttgtcgagaagaacgaagagacggctcctcacgaatcggattctgcgtatccagactccgacctccacgtctcacacattttcggcggctccacaacgtactcctccaagcgagaatacaagaaagtggaacgtgaagtctgttcgacatggcggggggctgcacccaagatgaagtggtctgagcagaaaacagagttctcgaaagaagaccaccccaagaccgccgttatcccaggacgatatccgatcgtggtcgaacccactatttggaacatcaaggtagcgcgagttctcatcgacggtggcagctcgatcaatcttcttttcgccagtactctaggcgcaatgggacatccgcaaagtgagttgacaccaactgatcaacccttccatggaattactccctaatcatcatccagacctttgggcaagattacgttgcctgtgactttcggccgagccaacaacttccgaacagaacagatcaccttcgatgtcgctgaattcgatacagcttacaatgccatcatcgggagaactgcacttgcgaagttcatggccgcacctcactacgcgtatcaagtgctcaagatgccgagactgaagggaacaatcactattcagggaaacgcaaagctagcagtgcagtacgacaagcggagcctcgacatagtcgagcaaacgcccagcccacccgccacgactgagccacccaagaaagtgagcaagacaaataagacgccgaagccggacggtgccatcaagatcgttccactctccagtgccaatctcgacaagactgtcaagatcgaggcgacactaaacgagaaataggaactcgcgctcgtcaccttcctccgcgataatgccgacgtgttcgcttggcagccgtctgacatgccgggggtccccagggaggtgattgagtacaaactaatggtgcgacccgatgccaagccagtaaagcaaagactgcggagatttgcaccagaccagaaacaagccatacgagaagagctcgacaaacttctcaaagctggcttcatcagagaagtacttcatccagagtggctagccaatccagtcatggtgcggaaggccaacggaaactggagaatgtgtgtctacttcaccgacctcaacaaggcgtgtcccaaggatcattttcctctccctcgaatagatcaattggtggattcaacagccggttgcgagctattgagcttcctcgacgcttactctggctaccaccaaatcagcatgccaaaagaggacgaagagaagacatcattcatcacgcggttcggggtattttgctatgttaagatgccgttcggactgataaccgccaggaatactttctagtgcacggtccagggcgcacttagcaaccagcttggcaacaatgacgaggcttacgttgacgacatcattgtcaaaaccaagacaagtgactcattgattgacgatttgcgggaaacgttcgacaacctccgacgatatcgcctcatgctcaatcctgagaagtgcacgttcggagtaccgtcgggtaagctactcggattccttgtctatggtagaggaatagaggtaaatcccgagaagatcaaagcaattgagaacatgaattagcccacgagactcaaggaggtacaaaagctaaccggatgcatgacatcactaagcagattagtcgctaggatgggagaacgagcacaacctttctacgctctattgaagaaacaagacaaatttatatggacacaggaagccgaagaggcatttattgcactcaagcgctacctatcaaacccccctgtacttgttgctccccaacctactgaagaattattcctctatattgccgccacgccatattccgttagcactgtcattattgtcgagagagagaaagtacagcgatcagtttattacgtcagcgaagctctccatgacgcaaagacaagatacccacagatccaaaaactgctttacgcagtcatcatgacatcaaggaagctgcgccactacttttaagctcacagagtcaaagttgtatcctccttcccccttggagaagttgtgagaaacaaagacgttgtcggccgcattgcgaaatgggtagtcgagctaagccaatttgatgtccactttctgccgcgaacagccatcaaatcctaagtactcgctgacttcgttgccgattggactatgccagacaacaaatcagacaaccaaggcgacaacgaaacatggacaatggcgttcgatggcgcactcaacagccaaggaccaggggcaggatttatcttgacgtctccttccggagatcaattcaagcacgcaatccacctcaacttcagggcgaccaataacactgcagaatacgaaggactactcgcagggatacgagctgcagccgcacttggggccaagcgactaatcgtcaaaggggactctgagctagtcgcgaaccaggtgcacaaagactataaatgctctaaccccgagttatccaagtatctcgcagaagtcaggaagctagagaagaggttcgatgggatcgaggtccgacacgtctatcgcaaggacaacgtcgagccagacgacctagcacgacgtgcgtccagacgagaaccgctcgaacccggcacctttcttgatatcctaacgaagccatcggtgaaagaagttagcggcgaagttagcccgaacacccccgacatcagctcggaggtcaccgaggcagaacgcgccattgctgacatcgaaaccacagacgactggcacatccaattaatcaaattcatcagcagcaaggagttgcccgaggacgatacagaggccgagaaaataacccgtaaagcaaagatctactgtatggtcggtaacgatttatataaaaaagcgctaaacggggtacttctcaaatgcgtctctcctgacgacggcagacacctcctcctcgacatacatgaaggcatatgtgggtcacacgccgccggtcggacattggtcggcaaagcttttcgacaaggctttttctggccaaccgcccttaaagatgcatgcgacatggtccaacgatgtgaagcctgttaattccacagtaaacacacaaagctacccgcgcaagcgctccagactatccctctgacttggtcgttctcgtgctgggggctagatatacttgggccattcccacgaggacagggcggctacagattcctattcgtggcgatcgacaaattcaccaaatggatagaagcagtgcccacgagggaaatcaaggccgacaacgccatcaaattcatcagagggatattctgcagatacggagtaccgcaccgcatcataaccgacaacggctcccaattcatcagcgccgacttccaagattactgcatcgggttgggagtcaaaatatgtttcgcctcggtctctcaccctcaaagcaacggacaagtcgaaagggcaaacggcatagtactacaagggatgaaaacccgcgtctacgataggctcatgtcacaagacaaaaagtgggttcaagaactcccatcagtactatgggccgtacgcaccacaccgacaacgtccaataaggaaacaccattcttcctcgtgtacggctccgaggccatgctccccggcgagctacgacatcagagtacacgagtacagaagtattccgacgagaaccaggaggaacagtgagacatcgatgcaaatcttctcgaggagcatcgtgagcgagttgccgtccgagcagccagctatcaacagtccctccgccgttatcacgagaagcacatccgagcacgcatactttcgatcggcaactatgtcctccgacgagttcaagcccaagcagggtgaaacaaactctcaccaaaatggaaaggaccttacacgatcacacaagtcttgcggccaggcgcattcaaaatcgcagacggcgacggtcgcgaattagcaaatttttggaacattgaccaactacgtaaattctatgtatgagtcaataccactatacctgtaagtacccttacagtatcaataaagcctatttctaggccccatatcacaatcaaagtgttttcactcgatgatcccttactctgatgacacctagcgttgaaacctgtccttatatccctttatgccgtctcgacaaggcctccgaggaacctaagggatcttcggctggggacgcccagagccgataaggccttgttagatcctatagagacaaaagaccatgtaagatctggtcgtgtaagagttctcgccgtgcatattaaccaagccgtgaaatcggaaatcaactttccaacctcacggctgggggctaggatcaaagcttattcaaccaaggcaggtcaagggtccaagagccttatcctccgagaaaactcctccgacgacaaggttagggtctagggagagtgtacgactcaaacggcttaccaaagtcgttaactgagaacacactcttacacacgacgtccaaagtaagatacatttgtttaaggaatatttctttattcacaaaataattcttacagtttttacataaattttccactacattacatctttccctaagatatctgtgacagggcacgagtactaccaagaaggccaacgccagtccatagactggaagatcttctcggccagcggcgacatcgacctcgctagatggtctatctccgccggtgttctccgagaacgagcaaaaccatggcggagaaactcgaggtccaggcgcgggcggtgatctcgtaggcaagccagcacatgccctccggcgtatcggctcgctcgacaacactcttgcttcaaggcctcgtcgatatgcttgctgatgccatcgagttgggcacaggccccgtttagccaagagatgtacccggccgccgactcctcgggatcacagtggactactcgaagttccctgcatactctgaccatggaggcatagcaactcctcaagtaagagttgaaccacacctcgcgacctcggagcgtctccacaacctgctctttcttcacggccagcatggttctctcaagttccgccacttcaaatttcatcttccagtattggatacgacgatcttgatttgcaagggcaccctcgagatctgctaaacgtgacgaccactaagacaagctggatacctcctttacaacataaataacctaatcaggaggtcactaagaggtgaaaaggctactcacttgaggtggccgttgccatcccggcctccgcatcaagagtttgatccacattgtcagacgaaacatgtggttcaaaatcgagtaccggaatcatcgccagtgactcaggctgcccgcgctgctggacatcctcgtcatcaacatctctacaatggacaaaaactcccgagatcaacatacaaaattggacaagggtggtaatcgcacgaacgaaggcggccagagttcaagatttacacaatatataacaaatacaagaagtcctactcttcaaaaagggggagaacagactcccccagatcaccgacttcttccatcacctccttacgcgtgtcgcttgccgccccctgatccaagatctcgcgcagatctagttcaggatgcgacaatcttacacacgcgaggacgtgacacgccccggtgtagatgccgttcgacgtctcctccgcgatcctggccgcatgtttggaggggattttccccatcgccatcactagttccacaagagaggaagtcagcgaaaactcgtcgggattcgccgggatcgtggacttgacgccgcactcctcggcgagctgatggtggccagtataggtgacccacaacgagccacggatctcggagagattgttcccgagttccgacattcggtcctcgagccccttccgttgacgatcgttgccggccaccaactccctcatcttcgtgaggtcctcacgggcttcagctagctcgcgcaccaatctctcagcacgcacgttcgccgtcgccgcttccgacctcgcctccgagatctcgtggccgatgccgcgagtaccagctccgagaaggcgcccatctcgacttggagctcatcccaggtgagaacggccgctggcagaccacgacctgcagcgggatcgctgacggggccgctaggtgtcacctcccggctcccggtcatgggcacgacgcgctggaagctcccccggacatggcccgtgcggccttcgcccgcgcctccctacggacgactatgaatcaaacaccatttgaacgaaaagcacgagaatccaagaatctatttacttacttctcgccgatcgtcacaatgcgctgttgtcgtggaggtggaggggacgtgtctgaagcctgaaagacaatcaatacagagtaagaagaaaccctccttgctgcacgatctggcgacaagatgaaattaccgatggggtcgctgccttgcgacgatgtccgagtacagacgagaatttcctcgccttggtcgggactttgccaccgctagtggtggccgtatcatatgcctccttgacaaccttctcctttagagatgtcaccacctgatggtccgcgagcggcctgatgatgtcagtcaaaggaagggcctacgcttaatcaggtcataacgtgatttcgaaaggagaatacgagatgcttatcaaatacacttacgttgatggcttcatcgcgttccgccgcccccttttcacaaaggggcacggggatgtagctagccgtggtcggaccgctgatcatgtcacgtcccaaaacgaccctaaaatatatcctttaaagttatgcctagaataattaaaatccatgtgaaagcctccaaaaattaaaatgtgcaaagttaaaagtcaaataaggcttggaggatttttgtatatttcctaaaagcctaaaatgtgtaaataaattttagtggaattttcagagcacaaataataattattaagaaaaataaacaaagttgaaaaagttttataaaaagaaaaaccctaaaaagtcccccttccctcccttgggccggcctggcccatctttccccccgctctctctgtcctctcccccgcggcccattcggcctccctccccgcgcgcacgccgctgacaagcgggcccgcccgccaccatcgctgacgggtggggcccacccgtcatccccaacctcccgccgctcacgccgcctcgtccgtgcctagcgccgccgccgccgcgaatcccgccgcctcccgtcctccccgcgtgcaataaagtggggggaatcattccccgtgatcccctctccctttcccccatttttccctctctctcttgcgttcaaacgggcggatttgcccccgcaaatctcgccggcgccattgatggcggccggacctcccgcgccggtttccttcctcctcggccgccctctcccccttccaaccctatttaaaccctccccgcacttcctccgaccgtttccgcctctcgccgcccttcctcctcgctggattcgagctcgcgacgtcgctctctctctccgccgtcgccgccgagctccggtccgccgccgtcgtcgccccggaccgcctcccacctcggcgccgcctccttcggcttcgccgcatcctcgccgacctcgtccacccctccgtttcggtcgccgaccgccggagcgccgccgaccccgtcgacccgagccgcgccaccgcgtccctccgcttctgccgcctcctccgtcgccgccgtcgcctcggggtgagccgtggaccgccgcctcgtttccccctttccctcccctctctcggccgccactccgccgtgcctatggccgccgccggcgaccatagggacgcgggcgcgccgcctcccgccgaccgcgccggcatggccgccctcgggcgcgccgagtggctgccgcgtggggcccggccgtcagccgcccgcgccctcgggtgcggctgacgtgtggggcccacggcgccggccggtgtgagcccgggtgcacccggtccaccgtggaccgtgaggctgccgcgtgggccccactcccgtggacccggtccgcgcgcccctccccctcggctgacgcaataaaccctttttaaattaaattttaaatgaagaaaatcgcaaatattcatttaaagagcatataaacttcaaatggccataacttggccatttgaactcggaattggaccattcaagtctctattttttccttaagaagtgaagaacccatttttgtgctttgttcctgcttgttatatgaagtttattagagtaaaagcgttttctttt

SEQ ID NO: 25977 - DNA, 6612 bp, Oryza sativa
  unsure (1)..(6612): unsure at all n locations
aatgtggaatggttggctgggttgggcttnggacgagctaggacccaaggtcgggtgcccagttcggtctgaatcatcgtagccctggggttaagccaggttcgtgtgggttcacgcccttgattaataatattgtatacctctagggtcgtatttataaaatagctttgagcaaccaagtgtcttttaatgctgtttactgcaaaccctaacccctatattatggctcccttgtactcccttgcatttattctgcacttatggatgtgtcttgttgagtacggtggttgtactcagtcttgctcaatttttcccaaacccagaagaggagttcctggaagatgaaggctttggtgtctagctcatgcctgccgtcaagcgcctgtggtcgtcgccctagtcttccgctgtttttcgtttgtcttcttgtgtgctgggccttcgccgcccatgtaataaattaactatttacgcttccgcttgataaactctgaaatgtatcaacttttggtgtaccttgcctcctgggacaaggaataatacacgcacgtaaggaacgcccgttgggttatttccggtcgtgacaagttggtatcagaacctccttgaccctagaacgagctttagatcccaagccttagcaatattttcgaaataaaaatccttccttatttgtgaaaatcctctagtctctctctgtcctgctgcttcatttatcgtcaaaatctgatctttaaaatgttgcttttctcttttgtttttgtttgtagatggccggcagcatcaaccgtcgtggcctggacctgactggcttcgttttggagctgcggagcatgtgcgttgtcctagggtatccgcatggagtggactaccagggcaaacagctcccggagcaggagggtgacgatgcagagccccacgctatttgggaggtcactgcagtgatcctcactggctcacccgagaggactttattggcagtcaccgcgggtggagattctttccccgccgcttgccagaacgccgcactcctcgccatcggcactcttcaccagcgctacccggacgagttgcagcactcgccgtaccgctaccaccctcgtcgcggaggagcccgtgactacgccaccttcagggatgctagctcggaggatgacgctaccatcatgcacctggcacgcatggtggaggcgtatgacgcagcccgtatcgacttccatcatatggtgcgccgtgggttggtcgagaacaacatgaagatcctggagctgcgtcaggagaatctgcagctgaagaaggacttggacgcggtggaggcgcagctgtgtcagctcaagatcgcccaatgagaggtctgtcgccccaagcaccgccgcgtctgccgcagcatgaagatcaccgcccgcaagagtacctccaggcccgagcttgttcgtcagtccttggcatggacctgcttcgtcgagacccctcgcgccgagcccgcgccctcggttcattaggaggcgggagcctctggcgttggcagcacggaggatgcgctgctgctcaccttccgccctggcccgtcgcagaagtaaacgagcagttagtaggctcgcgcgtgtgttcttttcgtttgttttcctgctagagtcgtgtggggcatggttataccggtgtgtggtataactgtgtcggagcctgtctttattttatttgcttaagcaacttgaaccttaatgaaccaatttaatagcagtaataaattcaagaattatggtggtcgtgggtggttagttttaatagtcagctctctctgtttgccggttctgtgtgggattttcagatggtgacaaccaggagaagtgctgctaccggtgaaggcagtcaccccgaaggcagcaaccacaacaaccatggcagcccacctccacctcctcccccgccaccaccaccaccaccaccagacaccaactccatcctcacccaaatcctcgcccagcaggccaacatgatggctgctttcctccatcacatccaaaatccgccacagcataatgttccacctccatcaccacccccgcaacattctaaactcgccgagttcctccgcatccgtccgcctaccttctctagttccaataaccccgtggatgccttggattggttgcatgccgtggggaaaaagttggataccgtgcagtgcaacgatgaggaaaaagtcatctttgccgctcaccaactgcagggacccgcatctctatggtgggacaacttccaggctatgcagccagaaggacagcctattacttgggcccgcttcaccgccgctttccggaggacccatgtgcccgccggagttatggcccttaagaaaagggaattccgggagttgaagcaaggcaaccgctccgtgatggagtatttgcatgagtttaacgacttggcccggtatgccccagaggatgttcgggaagatgaggaaaagcaggagaagtttttggcaggaatggaccctgagctgtccgtgcgtctggtctccggggattatcctgatttccagcgtctggtggacaagagcatccgcttggaagccaagcacaaggaactggagtcacacaagcgtcgcttggcaaatttccgcaatcaacaaggggctaaccaaaggatccgctacaccaatccctatccagggggatcctcctcgcagcagcagcagcagcagcaaccacgctccgcgccccgacctcaattcgtggtgcgtgtcccacagccgcagcaacagcagagtcagcaagggacccgtgcgccccgtcctcatgtgccagccgtgcagcctggacaaggccgcagagacgctcaaggtcagcagcgtctgtgcttcaactgcttcgagcccgggcactttgcggataaatgcccgaagccgcgacgccagcaaggccaagcgcctccccgccccaacaacggtggtaaggatgtcattcggggtcgtgtgaaccatgtgactgccgaggatgtgctgacgactccggacgtcatcgttggtacgtttctcattcattccatccctgctaccattttgttcgactctggagcttcccactcgtttatatctgtgccattcatggggagaaatcagttgggggtagaaaggcttaggaaccctctgctcatcaccacccctggaggggttatgacagcaaagtattatagccctgccgttcctatagaaatccagggaattcctttcccctcggatttgattcttctagacaccaagaacttggatgtgatcctcgggatgaattggttggcacaattccaaggagtagtggattgcgcaaggcgcactgtcactctgtaccgggggcctgatcaaccggttgttttctttgcacccccaacctctgtcgacaattcagaacttcatcagattggactgtcaaaaatccccatcgtccgtgagttcggagatgtgtttctggaggaactacccggtatgacgcccaagcgagagattgagttccggatagatcttgctccaggaaccactcctctatacaagcgaccctaccgtatggcagccaatgaactggccgaagtcaagagacagttggaagagttgaaagaaaaggggtatatacggtcgagcacttccccctggggtgctcccgtgatttttgtggagaagaaagacaagacaaagaggatgtgcgttgactacagagctctcaatgaagttactatcaaaaacaagtaccctcttccccggatcgatgatttgttcgaccagcttaaaggtgccactgtcttttcaaaaatcgatcttcgttccggatatcaccaattgcgtattcgtgaagaagatatcccgaagaccgcattcaccacgcgatacggactgtatgaattcacggtgatgtcgttcggtctgaccaatgctcctgccttcttcatgaacttaatgaacaaagtgttcatggaatacctagataagtttgttgtggttttcattgacgacatcctggtgtactcacaatcagaggaagaccatcagcagcatctctgtctggtgttgggaaagttgcgggaacaccacttgtatgccaagcttagcaagtgtgagttctggttgtccgaagtcaagttcctagggcacgtgatatctgctaaaggagttgctgtggatcccgaaacggtgaccgccgtcactgattggaagcaacccaagacagtcactcaagtccgtagctttttgggtttggccgggtactaccgaagattcatcgagaatttctccaaaattgccagacccatgacgcagttgctgaagaaggaagaaaaatttgtgtggagcccgcaatgcgagaaggcgttccaaactctcaaagagaagctggtttcctcgccagtgttaatcttaccggatactcgcaaggacttcctggtgtactgtgacgcttcgcgccaaggattggggtgcgtgctcatgtaggaaggccacgtggtagcctatgcctcacgccagcttcggccccatgaaggcaactaccctacccatgatttggacttggccgctgtggttcatgctctaaagatctggcggcactatctcattgggaatcgctgtgaaatatatactgatcataagagtttgaaatacatcttcactcagtcggatctgaatcttcggcagaggagatggttagaactcatcaaggattatgatgtgggaattcactatcatcctggtaaggccaacgtggtcgccgactctctaagtcgaaaaagccgttgcaacactctcggcgtccgtggtattccactggaacttaatcaacagatggaagccctgaacctaagcatagttggtcgtggattcttggctacgctggaagccaagcctaccttgcttgatcaaatccgcgaggctcataagaatgatccagatatgcatggactcctcaagaatatgaaacagggtaaagccgctggtttcacagaggatgaacacggaaccctatggaacggaaatcgggtatgcgttccagacgacagggaacttaaacagttgatactttaggaagctcacgaaagtccttattccatccaccctggcagtacgaagatgtacttggacttgaaagagaaatactggtgggttagtatgaagcgggagattgcagagttcgtggccctttgtgatgtgtgccagcgtgtcaagggagagcaccaacgaccggccggacttctccaacctctccaagtaccagaatggaaatgggatgaaattgggatggatttcatcaccggacttccaaaaacccagggcggttatgattctatatgggtagtcgtggatcgactaaccaaggtagctcggtttattcctgtgaagactacctatgaagggaacaaactagccgaactctactttgctaggatcgtaagtctccatagcgttcctaagaaaattgtatctgatcggggaagccaattcacctctcatttctggaagaagctccaagaagagttgggtaccctattaaatttcagcaccgcgtatcacccgcagacagatggacagaccgagcgtctaaattagatcctagaagatatgctttgggcatgtgacctagatttcgggaagacctgggataagagtctcccctataccgagttctcctacaataacagctaccaagccagcatacaaatggcaccctacgaagcgttgtatggctgcaaatgccggacaccgctattgtgggaccaagttggggaaagccaagtgttcgggactgatatcctgagagaagctgaagataaagtcagaaccattcgggataatctaaaggtggcacagtcccggcagaagagttatgcagataaccgacgccgtaacctggaattcgcagtggacgattttgtgtacctatgggtcacgccattgcgaggagtacacaggtttcagacgaaagggaagctcgcacctcggttcgtgggtcctttccgtatcattgctcgacgcggagaagtagcttaccagttggagctgcccgcctccttcggcaacatgcatgatgtgttccatgtgtcgcaactcaagaaatgtcttcgagtgccatccgagcaggccgattcagagcaaattgaagttcgcgaagacttgacctacgtggagaggacagtgaaaatcctggacaccatggagcgcaggaccaggaactgggtaatccgtttttgcaaggtccaatggagcaaccacgctgaggaagaagcaacttgggaacgtgaagacgagctgaaggcagcccatcccgatctcttcgccagttcttccgaatctcggggtcgagattccgtttaagggggtaggtttgtcacgtcccaaaacgaccctaaaatatatcctttaatgttatgcctagaataattaaaatccatgtgaaagcctccaaaaattaaaatgtgcaaagttaaaagtcaaataaggcttgcaggatttttttatatttcctaaaagcctaaaatgtgtaaataaattttagtgcaattttcagagcacaaataataattattaagaaataaacaaagttgaaaaagttttataaaaagaaaaaccct

SEQ ID NO: 25978 - DNA, 2135 bp, Oryza sativa
gtggggccaggccgtcagccgcccgcgccctcgggtgcggctgacgtgtggggcccacggcgccggccagtgtgagcccgggtgcacccggtccaccgtggaccgtgaggcttccgcgtgggccccactcccgtggacccggttcgcgcgcccctccccctcggctgacgcaataaaccctttttaaattaaattttaaatgaagaaaatcgcaaatattcatttaaagagcatataaacttcaaatggccataacttggccatttgaactcggaattggaccgttcaagtctctaatttttctttaagaagtcaagaacccatttttgtgctttgttcctgcttgttatatagagtttattagagtaaaagccttttcttttccgttggtcttgtagacgctgcagcttcagaagatccgctcttcgtggaggttgaagccgacgtttaggaaagcgagcaaggcaagtcacatcatccttgaacatattgaatcccaatttataaaattattttgatttaaattattgcattatcgctttatttaaattcccgcgttatcactgttttatttagccatgcctatttacctttgttatgatcttattattattgctattgttattattaccttgttcaccctagaataaacaaaaccccaactagtggacactctactcatggtaccactagtatgaatttaggtagatgcttcgccgcttaattaggcaacattaggtggttttacaactctagactttaggaatattcatatcacctggacattatggaatggttggattattgtggaattggattcacacctccccctctattcaaaaccctcaaaatggttttaggctgggctcggggtgcatggttttgatagtagcacctcggccatataaggaccggtctttgggcctctgttgcaaagcactaccgtacttccatatgtctagtgggtaaggcttagtttgtggctcagtctggttataaataaaagtacacggatggagatggacgaagtcggggatcgatggacatctctagggcaaatgaaggctacacgagctgcggcccggtagtcgagatgtcatggcacagggccggtgtcctgctgctaggggctcagttgtcacaccctaaaaatcctaaatatataaattgttgtttaattagaattattagaatttattttaaaagtatagaaaagaagatctaattttaaataataaattccaatataaaatggggccagataaaatttcattaaatactttgcttaattctataattcctagatttttctgagatttatttgagctaaggaagtatttttaataaatggaattgcatttcatgaataatttaaattgaaaaaggtttttaaaatcctcttttggctttgggccgaaagtcggcccaaaaccttctttctctctccctcggcccagtcggcccagtcagcccgcagccgcccgcgtgagcgccctcggccgctgacaggtgggtcccacctgtcagactcgtcgtcctcctcgcgccgtcgcccagccagaaccctagccgagctgcgtcgccgtctccttccaaattcgctcgcgcctttccttctccagtgaaatcaattgaggggaaatgtttcccgagatctcctctaccttttctcttttggaatcgtcggctaaatcgtttggaaatccgtggattcgagttcgattcggatcgatctctctcctccgaaccctaaactttccttcgcgtcgccggtcgccgtgggccttcgccgccgcctccttgcccctataaaaggacccccaagcccaccgctacctgccgcaccctcgccttcgcctctcgccgcccgtagcgccctagccccgtgtagcctagcgccgcagtcgtcgccgttcgtccagtcgtgcgccgccaccgatcccgtcgtcgtcgttgctcgggaaagtcaccgtcgtggtcggcgtcgcgtcgccgtcctcgtccgcccctccagcgctgctttagaccgccggagcaccgccgtcgtcgtcaagccgaaggttgccgccgcttctttctcattgctgtcgccgtccgttgatcttccgccgccgctttggtcaccggtgaattcg

SEQ ID NO: 25979 - DNA, 10620 bp, Oryza sativa
aagtggaaggaaatcggtatggatttcatcactggtctacccagaacatcattaggccatgactctatttgggtgatagtcgacagacttaccaaagtggctcatttcatcccagtaaagacaacctattccggaagtcggttggcggaattgtatatggcaaggattgtgtgtttgcacggcgtccctaagaaaatagtgtctgatcgaggcagtcagtttacttcaaagttttggaagaagcttcaggaagagatgggttctaagctgaactttagtactgcttatcatccgcagacagacggacaaaccgaaagggtaaaccagattttggaagacatgttgagagcttgtgctttagacttcggtggaagttgggataagaatttgccttacgccgaattctcgtacaacaacagttatcaagctagtcttcagatggctccttacgaagcactgtatggtcggaagtgccgcactccacttttgtgggatcaaacgggagaacgtcaggttttcgggacggatatcctgagggaagcagaagaaaaggtgaaaatcattcaagaaagattgcgtgtggcccagtctcgtcataagagttatgccgacaatcgtcgtagagatctaagttttgacgaaggagattatgtgtaccttcgtgtcacgcctcttcgaggagttcatcgttttcacaccaatggaaaattggcaccgcgttttgtgggaccttataagattgtcagtagaagaggagaggttgcttatcagttggagttacctcaatctttggcaggaatccataatgtgttccatgtgtcgcaattgaaaaagtgtttaagggtacctaccgaagaagctaatcttgaacagatagaagtccaagaggatctgacctatgttgagaaaccaatccgtatcttgaaaatagatgagagaagaaccagaaatcgagttatccatttttgtaaagttcaatggagtaatcactcggaagaagaatcaacttgggaacgagaagatgaattgaagtcagctcatccgcatctgttcgccagttcttccgaatctcgaggacgagattctgtttaaggggggtaggtttgtcacaccctaaaaatcctaaatatataaattgttgtttaattggaattattagaatttattttaaaagtctagaaaagaagatctaattttaaataataaattctaatataaaatggggccagataaaatttcattaaatactttgcttaattctataattcctagatttttctgggatttatttgagctaaggaagtatttttaataaatggaattgcatttcatgaataatttaaattgaaaaaggtttctaaaatcttcttttggctttgggccgaaaaccttctctctctctccctcggcccagtcggcccagtcagcccgcagccgcccgcgcgagcgccctcggccgctgacaggtgggtcccacttgtcggactcgtcgtcctcctcgcgccgtcgcccggccggaaccctagctgagccgcgccgccgtctccttccaaattcgctcgcgcctttccttctccggtgaaatcaattgaggggaaatgtttcccgagatctcctctaccttttctcttttggaatcgtcggcttaatcgtttggaaatccgtggattcgagttcgattcggatcgatctctctccttagaaccctaaactttccttcgcgtcgccggtcgccgtgggccttcgccgccgcctccttgcccctataaaaggacccccaagcccgccgctacctgccgccacccttgccttcgcctctcgccgcccgtagcgccctagccccgtgtagcctagcgccgccgtcatcgccgttcgtccagccgtgcgccactgccgatcccgtcgtcgtcgtcactcgggaaagtcaccgtcgtggtcgccgtcgcgtcgccatcctcgtccgcccctccatcactgctgtagaccgccggagcaccgccgtcatcatcaagccgaaggttgccgccgcttcttcctcatcgctatcgccgtccattgatcttccgccgccgctttggtcaccggtgagttcgccgtgccgtccgctacccctaggtgctctccgttcgcgctgtcgtgccgtcgttcgccggcaagcatgcacgcccgagccgccgccggtggtggcgtcaccgctgacgtcatcatcgtcgtctcccgtggtcctgccgtggaccggtcgatctcggccgttcgttttggatggaaagatctcggccattcgttttcgtgagccgccgccgtgcacccgattcaccgcgaaccctagccgctgacgcaataactcgcttttccttttcaaaaataattcattattgcgtcataattcaattaaaatctaaataaatgatttaatccgatttaatctttgaaaattcataactaattcatcttagctcggatttagttggttcaagtctctaaatttttctaaaattgagatctacatgttaaatatatccacatgtactgttcatgcttgtttatgtgctgttttggtgattttgctcctttctgtttagattccgacgtttccggagagtccgtttttataggagaagaatttgaagagttccaaggccagcaaggcaagtcacacagatcccaaacaaccctttgagcatgttgatcccgtttaaagctattgtttctattcaactattgcatttattttcgaatgtcattgggtggaattaacctattgtttgttatagcccttttgttcttgattactttattccttgataccttgggttattataacttgactagttgggctatatatattggttcagctagatattagatatgattgcttagccatgcttagaaacattagcacactattgggataacttatgactcactattatttaatgttggcttaatgatagttcacgatggtcaatcgtgattggttaattaattacttgccaactaaaacttgataatggtgggttgtgagcacatggttttgagagtcgtgctcatgacaattaaggaccggttcacgagtttcggttgtgaaacattaaccgtgccaaccacaagccagcgtgggcaacggctttaccttttgtatagcatggttcattgcggagcaccagactgagaagtggcggagataagcccacgggggtcactggggagtccatgccttgtttataagggggtgattatgatccaggaaaggtgcgctgtggtggattgtgttgtgcgaggggtactgtcacagctcctttccaaggtactgtggtggtattgaggcacatggtgacatgttgtggggctgtgtcttgtgggtacagtggtacacctctggccagagtaaaactattcgaatagccgtgcccgcggttatgggcgggtctaacaatgtctttcgtgattagtttcacacttctcatcataataaaagatgctataactggtaataatttgattagctcctggtttggaatagtatattcctggtttggagatagatctgtacagccgggtatggttgttcgggatggttgggcctgagcagcatgggtgtgctgtttagtgttgattaaaattgatgattaattactctactgttttataattctcaaatgtttgctaaatgctgcttttgcaaatgagccctatattatgccattctttggtatccttgtgcacttgcatatttgctacgtggcttgctgagtatgtcatatactcaccttgcaatcattcatcagaggaagagttctacagtgatgctgatggtgtggaggattaggtgtagccctggtcaagctgcctgtggagtggagtcgtctgcgccatttatcttttttttttctgctgcttagatctttattgattgagaggaactatctacctctgtaatgacattttattcgcttattaattagagtaataattgtactctattatcaatttgttattgtgtgcctcggctgattcctggacgagggttcacacacatgtaagcgtttggaattttggatagaaattccaggcgtgacaagttggtatcagagcctccttgaccctaggttatgccaaatggttacccatagaagccctctaaaaatattggaaaagtagaattgttctcctccctttctcttttaattaaaccaaactaatagcacatgcacttcataatctcttttagtggttgtcattcaaaatttattccagtgttgttagtactgtacatctaatactgtactaatggctcatttaccagcaaatgttttgcaacattgttttattttgctgcaatgaaataaatttagcatgttgattttataactttcttttatttcttttggaacctgttgttcaaaagtacaaaatttgtgaccttgtttccaactgtttcaacttatcttgcaagcttggtttactttatttacttaccttttactttgattttctaactttattcaaattaatccaaaaacttgtgctattaattggataaatgtcttaactccctcctttcacttgtctttagatgccgcgctacaagcctgagtacttgtttggttttgagggatttgtccaggagttgcgtaccataggatttgggactgcccctttgtatgcccagattcctcatgatcgtcacgaagagaagtgccgagtcaaagtcaccttgaacagtaatagtgaagatatcccatcagtgatgttcgaagctggaggaggaaactacatccatgcatgtcaggaggtggcaaggatcgccataggagagctccgcgatcgctacagtgatcagttggctgacactgagtatcgctaccatcctcgccaaccccagggaagtgaccgtggcagctaccttgagactgaggggattgagaatgatgctaccacaaggcatttggttgagatgctgtgggctatggatgaaacccgcgcggaggttgtgctagcagctcaagatcgtgaagaccggaatcgtggtaagatttgcaggctagaggacaaggtggatcgtttgaagaaggaactagccgcgttgaagggagaagcaccaccgcagaaggccaggattcatcttaccgcaaggaagagagctctatttgtccctcgctaccaattggcgccaaaggtccgtgtggtggagaaagaagttaccccagccctagcggatcctccggtcgtcaatgtaagtgatgatgaaggagaagaatcgaagcgcacccattcaaaggtcgagtggggagctactcaagatgatggagacgagccgaacgagccttcaatcaacttcgatgcccggaagacctagagtgccttgttaagccgttgtcttagatcgttgtgttagtttgttcgtttaagtttggttgtgtgtgtctcacatgtgatttacattagtggtgggatgtaagtgcatgcgtttgtttgcttttgagtgttaggaagttggtgagtttagtggtgtgagagtcttcagttttgtaataatgaaactcagttaagatcagtaaaagttaagttagtagaaaaattaattctctgtcctaagtagtttccccggtttctcttcttgtgatcctgcccatgccagatggtgctcactcgcagcaatgggaatggtcccaacaacaccaataacaacaacaatggagagaatcccacactggcccaagttctggctcaacaggcacagcttatgaacatgatgatgcagcaactccagaatcagtagaaccagggaaataaccatgcacctccccagaacaagttagcagaatttattcgtgtgaggccgcccactttctctagcaccactaatcctgttgaagctggcgattggttgcatgccatagagaagaagttggatttgcttcagtgcactgatcaggagaaggtctcatttgcatcacatcagctgcatggccctgcctctaagtggtgggatcacttccgccttaacagaactactgctgaacctatcacttggcttgaattcaccgctgctttccggaagacgcatataccatcgggagcggtgtctctcaagaagaaggaattcaggtcgctcacccagggatctcgcacggtcaccgagtatctgcacgagttcaaccgtctggctcgttatgctccggaagatgtgcgcactgatgaagagcgccaggagaggttcttggaaggacttaatgatgagctttcttacccactcatgactggggattatcatgatttccagaagttagtggataaggctattcgccaggaggacaagtacaaccgcatggagcagaagaaacgccggattgctcacttcaaggcacaacaggggaatagtcagaggccgcgtcttactttaggaccccagtccatgccacagggaggttcttcgtctgttgttcgtccgcagtgtcagttcttcaacaacaatgctggcaacaacatccgcaatcaagctccacgccctgttgcagctccaacacagcaacagcctgccaagagggagcaaggtagcaagcccggggtgtgcttcaactgtggagacccaggacattactctgacaagtgttcgaagccccgacgcgtgaaggttgtcccggcccagagcaactctaccgcaccagcatcaaaggctcgtgtcaatcatgttgctgctacagaagctcaaggtgctccagatgtgattttgggtacgttccttgtcaactcagttcctacaacagtgcttttcgattctggtgctacacattcatttttatctatgagttttgcgggaaatcatgggatggaagtagaagatcttatacgtcctttgatggttagtaccccaagtaatcaagcactctctttgcaacgtagcccctctgtcagaatagaaattcaagaagtaccatttctggccaatcttatcctgttagaatccaaagaccttgatgtcatcctagggatggactggttagccagatataaaggtgtgatagactgtgccaacagaaaagtaactctcaccagcaatgatggtcgagttgtaactgttcatgcattgtcttctgagtctttaaggtcaagactgaaccaaatgactttggaagagattcctatagtccgggagtatcccgatgtgttcccagacgatttacctggtatgccgcctaaaagggatatagagttcagaatagatttggtaccaggaacaactccgatccataagagaccttatagaatggcggccaatgaattagcagaagtcaagagacaagtagatgatttgcttcagaaaggatacatcagaccgagttcatctccatggggagctccggttatttttgtggaaaagaaagatcatacccagaggatgtgtgtggactatcgtgcactaaatgatgtgactatcaagaataagtacccgctgcccagaattgatgatttgtttgatcagcttaaaggtgccaccgttttctccaagatagatcttcgatcagggtatcaccagttgagaatcaaagaggaagatatacctaagacagcttttatcactaggtatgggttgtttgaatgtactgttatgtcttttggacttaccaatgcccccgctttcttcatgaacttgatgaataaggtgtttatggaatacctagacaagttcgtggtggtctttattgatgacattcttatctactctcgaacaaaagaagagcatgaagaacatcttcgccttgcactagagaagctacgagaacatcaactgtatgccaagtttagcaaatgtgaattttggttgtttgaagtgaagttccttggtcacgtcatctcagccggaggagttgccgtcgatcctagtaatgtggaatccgtaaccaactggaaacaaccaaagacagtttcagagattcgtagtttcctaggcctcgcaggatattatcggaggtttatagagaatttttccaagattgctaagcccatgacacgattacttcaaaaggatgtaaagtacaagtggtcagaagaatgtgagcagagttttcaagagttgaagaatcgcttaatatcagctcctattttgattttgcctgatccaaagaagggttttcaagtgtattgtgatgcatccaagcttgggttaggttgtgttctgatgcaagatgggaaggtggttgcctatgcatctcgtcagttacgtccgcatgagaagaacaaccctactcatgatcttgagttagctgcagttgttcatgcgttgaagatttggcgtcattatcttttcggtactcgtacagaggtatacaccgatcacaagagtttaaagtacatctttactcagccagatctgaacatgagacaacggagatggttggaattaattaaggattatgacatgggaattcattatcacccgggaaaggctaatgttgtagcaaatgctcttagcaggaaaggctattgcaatgctacggaaggacgacagttgccattggagttatgcaaggaatttgaaagattaaatttgggaattgtcagtagaggttttgttgcagccttagaagcaaagcccactctaattgatcaagttagagaagcccaaattaatgatcctgatattcaagaaatcaagaagaatatgagaagaggaaaagctatcagtttcttggaagatgagcaaggaactgtatggttgggcaagagaatctgcgtccccgacaacaaagatttaaaagatgcaattctgaaagaagctcatgatactttatactccattcaccctggtagtaccaagatgtaccaggatctcaaggaaagattttggtgggcaagtatgaagcgtgaaatcgcagaatatgtagcagtatgtgatgtttgtcagcgagtcaaggcagaacatcagaaacccgcaggtttgctgcagcctttgaagattcctgaatggaagtgggaggaaatcggtatggatttcatcactggtctacccagaacatcattaggccatgactctatttgggtgatagtcgacagacttaccaaagtggctcatttcattccggtaaagacaacttattccggaagtcgcttagcggaattgtatatggcaaggattgtgtgtttgcatggcgtccctaagaagatagtgtctgatcgaggcagtcagtttacttcaaatttttggaagaaacttcaggaagagatgggttctaagctgaactttagtactgcttatcatccgcagacagacggacaaaccgaaagggtgaatcaaattttggaagacatgttgagagcttgtgctctagatttcggtggaagttgggataagaatctaccctatgcagaattttcgtacaacaacagttatcaagctagtcttcagatggctccttacgaagcactgtatggtcggaagtgtcgcactccgcttttgtgggatcaaacgggagaacgtcaggttttcggaacggatatcctaagggaagcagaagaaaaagtaaagattatccaagagaggttgcgcgttgctcagtctcgtcagaagagttatgccgacaatcgtcgcagagatttggctttcgaagaaggagattatgtatacctgcgggttacgccgttacgaggtgttcatcgtttccaaaccaaagggaaattggcaccgcgttttgtgggaccttttaagattgtgagtcgaagaggtgaagtagcttatcagttagagttgcctccgtcaatggcgggaatacacgacgtgttccatgtgtctcagctgaagaaatgtttacgtgtacctacagaggaagcagatcctgatcgtatagagcttcaagaagatttaacttatgttgagaagccagtcagaattttggaagtaagcgagaggaataccaggaatcgcgttatacggttctgcaaggttcagtggagtaatcattcagaagaagaagccacttgggagcgagaagatgaattgaagtcagctcatcctcatctgttcgccagttcttctgaatctcgaggacgagattccgtttaaggggggtaggtttgtcacgccctaaaaatcgattaaattaaaaatgcatattttaaatcatttttagaaattattttaaaagcctacaagctaaaccctaattttctaggaaaattttcaatataaaaatgagttagataaaattttattaaatactatgcttgctcctctattttctagaattttctgggaattatttgagcaagggaagtatttttaataattgaaacaacatttcacaaattgttttattcaaaaaagtttaaaaacccctccctaagccgttgggccgttttcggcccaacatcctctctctctcgcgcggccgaaccggccaatgccggcccaagccgacgccgcccgctcccctctctcgtggattccgacaggtggggcccacctgtcggatccatctcctacctccagccgccgaccgagcccgagccgccggcttccacctccaaattcgcctcaatccgactccgattccttcgggtttttgaggggttttggtcctctcgatctcctctttcttttttcccaagaatcaaagagaa

SEQ ID NO: 25980 - DNA, 1138 bp, Oryza sativa
attgtgtgcctcggctgattcctggacgagggtttacacacatgtaagcgtttggaattttggatagaaattccgggcgtcataagttggtatcagagccacattgaccctaggttatgccaaatggatacctatagaagccctctaaaaagattgaaaaagtagaactgttctcctctctttctcttttaattaaaccaagctaatggcacatgcagtttatagtccctttaattgttctcattcaaaatttatttattattcctgtgttgttagtactgtacatctattactatactaatggcccactttctagcagagattttacaacctttcatttatttatttatttattcaatcatgttgcaatataatttagcatgttgattttataactctcttttattttatttcttttgaaacctgttattcaaaagtgcaaatttgtgattctgttttcaactgtttcaacttatcttgcaagattggtttactttatttatttaccttttactttgattttctaactttattcaaattaatccaaaaacttgtgctattaattggataaatgtcttaactccctcctttcacttgtctttagatgccgcgcttcaagcctgagtacttgttcggtactgagggatttgtccaggagttgcgtacgatgtccttcgccataggatttgggactgcccctttgtatgcccagattcctcatgaccgtgatgaagagaagtgccgtgtcaaggtcaccttgaacactaatcatgaagacatcccatcgctgatgttcgaggctggagggggaaactacattcatgcttgtcaggaggtggcaaggatcgccataggagagcttcgcgattgctacagtgatcagttggccgacactgagtatcgctaccatcctcgccaaccccagggaagtgaccgtggcagctaccttgaacctgcaggaattgagaatgatgctaccccaaggcatttggtcagatcctgtgggccatggatgagttccgcgctgagattgtgttagctgctcaagatcgtgaagaccggaatcgtggtaagatatgtaagcttgaggacaaagttgatcgtttggagaaggaactagccgcgttgaagggagaag

SEQ ID NO: 25981 - DNA, 785 bp, Oryza sativa
tgtgctcctgcctatgccaaatggtgcttactcacagcaatgggaatggcccaaacaacaacaacaacaacaacgacaacaatggagagaatcccacgcttgcccaagtcctggtccaacaggcacagctcatgaacatgatgatgcagcaattccagaaccagcagaaccaggggaacaaccatgcacctccccagaacaagttagcagaatttcttcgtgtgaggccgcccactttttctagcactaccaatccaggtgaggctagtgattggctgcacgccatagaaaagaaattggacctgcttcagtgcactaatcaagaaaaagtctccttcgcttcacatcagcttcatggccctgcctctgagtggtgggatcacttccgtctcaacaggaccactgcggaaccaatcacttggcttgagttcactgctgctttgcggaaaactcacataccgtcgggagtggtgtctcccaagaagaaggagttcaggacgctcactcagggatctcgctctgtcactgaatacttgcatgaatttaatcgtctagctcgctatgctccagaagatgtacgtacagatgaagagcgtcaagagaagttcttggaaggactgaatgatgagctctcttacccattaatgactggggattatcatgatttccagaagttggtggatatggccattcgccaggaggacaagtacaaccgaatggagcagaagaaacgcaggattgctcacttcaaagctcagcaggggaatagtcagaggccgtgtctt

SEQ ID NO: 25982 - DNA, 721 bp, Oryza sativa
ccctgacaggtgggccccacctgtcagagggagagaggagggagagcggcggctcggctcggcgggctgacttgggccgggcgcgcttgcaggccaaggagagagagagaggggttttgggccgactttcggcccaaagccaaaagagaacttttaaaacctttttcattttaaattattcatgaaatgcaattccatttattaaaaatacttccttggctcaaataaatcccagaaaaatctaggaactatagaatcaaatgaagtatttaataaaattttatctagcccacttttatattggattttattatttaaaattagatcttctctttctaagcttttaaaatcatttctaataattccatttaaacaacaatttataaatttaggattttcagggtgtgacaaacctaccgtcttaaacagaatctcgtcctcgagattcggaagagctggcgaaaagatgcggatgagctgactttaattcttcttctcgttcccaggtagcttcttcttccgagtgattactccattggaccttacagaaacggataactcgattcctggttcttctctcatcttctccaggatacggatcggttcctcaacatatgtcaaatccccttggatttcaatctgctcaagattagcttctacagtgtgtaccattaaacactttttcaactatgacacatggaacacattatgaacacctgcc

SEQ ID NO: 25983 - DNA, 1147 bp, Oryza sativa
cctgcagcaacactcacaagtacacaatccagtgggtgaaaaagaaaagttagtcaaataagcgatcgaaaatttgagcaggagttcaaatttgttcccaatttgattacccaaggatgttgtctgcaatacgtgcctatcaattcttcaaacttggcaagaagaaacttctctcgcttcacaaaggctgatctcaccgttgatatttctgacagggcttgtgtattcagtgggttttcagatgatgatctctttcttttcagtcctcggattggctgatgtccgtggatcatcgtgttcagcttctcccaatcaacgtcagagatcacgcagccggaggaaccgaaatctcgcgcgggtttcagccattggcgcaggcagtcgaggttctcgccggagagggagacgaggaatgacccgatcatggcgctctgggggtgatcggaagcctcgccggcggcggcgtaggggtttctcttcttctctctgctgctgttctgaagaatttcggtgaggtcgcattgcctggaccagaggtgttcgatcgcctcatgctccgagatcggcttgccggcggcggcggcggcggcgcggacggcggcgacaaggccgtccagtgaacggcattccacacggagcatggcgtcggtgtcaaagatgtctcccggtaggtcagcctcgtcgtcgggcggaggaggagcggcggcgtcgtaccagacggtgttgaggatgatgttggaggcggggtcgagagggccgtagcagtgcccggcggcgaggagggagcggatgaagcggccgcgccgccgcgtcgtcgtccaaccgtcgccggcggggagcacggcgagcgcccggatgtagaagccatggatggcgtcgaggaggcacatcttcagcgacagaatgtgctcgcatggggagaggtcgtagttcagcgctgcgccggcagcctcgtcgccgtcgtccgccgcgcgcgtcacacccgccaagcgtctggacagcttcgcctccatggtttcgcaatcgaacgtcaggtcggagatgtacccgagttgaggagagtcgatgcggcttgcgtctgcagcgatcgtgattagggcaacacggccatcttccccgatggtggttcgaagcgtcaccgtgccat

SEQ ID NO: 25984 - DNA, 1255 bp, Oryza sativa
ccaacccagtcatggtgaggaaggccaacggaaaatggagaatgtgtgtcgatttcacagacctcaacaaggcgtgccccaaggatcactttcctctccctcgaattgatcagttggtggattcaacagccggctgcgagctattaagcttcttgacgcttactctggctaccaccaaatcagcatggcaaaagaggacgaggagaagacagcgttcatcacgccgttcggggtattttgctacgttaagatgcctttcggactaataaccgccgggaacactttccagcgcacggtccagggcgcacttagcaaccagcttggcaacaatgtcgaggcttacgttgacgacatcgttgtcaagaccaagacaagtgactcattgattgacgacctgcgggaaacgttcgacaacctccgacgatatcgcctcatgctcaattcagagaagtgcacattcggagtaccgtcgggcaagctactcggattccttgtttctggtagaggaatagaggcaaatcccgagaagatcaaagcaatcgagaacatgaagtcgcccacaagactcaaggaggtacaaaagctaaccggatacatggcagcattaagcagattcgtcactaggatgggagaacgaggacagcctttcttcgctttgttgaagaaacaagacaaatttgtatggacacgggaagccgaagaggcatttattgcactcaagcgctacctatcaaacccacctgtactcgttgctccccaacctaatgaagaattattcctttatattgccgctacgccatattccgttagcactgtcattgtagtcgagagagagaaagtacatcgaccagtttattacgtcagcgaagctctccatgatgcaaagacaagatacccacagattcaaaaactgctctacgcagtcatcatgacatcaaggaagctacgccactactttcaagcccacagagtcacagttgtctcctccttcccctcagcgaagttgtgagaaacaaagacgttgtcggccgcatcgcgaaatgggtagtcgagctaagccaatttgatatccactttgtgtcgcgaacagccatcaaatctcaggtactcgccgacttcgtggccgattggaccatgccagataacaagtcagacaaccaaggcgacaatgagacatggacaatagcgtttgatggcgcactcaacagccaaggagcaggggcaggatttatcttgacatctccctccggagatc

SEQ ID NO: 25985 - DNA, 3072 bp, Oryza sativa
cgccgccggtcggacattagtcggcaaggcctttcgacaagggtttttctggccaaccgcccttaaagatgcatgcgacatggtccagcgatgtgaagcctgtcaattccacagcaagcacacaaagctacctgcacaagcgctccagacaatccctctgacttggccgttctcgtgctgggggctagatatacttgggccattcccacgaggacagggcggctatagattcctatttgtggcgatcgacaaattcaccaaatggatcgaagcactacccactggggaaatcaaggccgacaacgccattaagttcatcagagggatatactgcagatacggactaccgcaccacatcataaccgacaacggctctcaattcatcagcgccgacttccaggattactgcatcggtttgggagtcaaaatatgttttgcctcggtctctcaccctcaaagcaatggacaagtcgaaagggtaaacggcatagtactacaagggataaaaacccgcgtctacgacagactcatgtcacatgacaaaaaatgggttgaagaactcccatcagtactattggccgtacgcaccacaccgacaacatccaacaaggaaacacccttcttcctcgtgtacgggtctgaagccatgctctctggcgagttacgacatcaaagtacacgagtacagaagcattccgacgaggaacagcgagacattgatgtaaaccttctcgaggagcatcgtgagcgagttgctgttcgagcagctagctatcaacaagccctccgctgttatcacgagaagcgtatccgagcacgcatactttcgatcggcgactatgtcctctgacgagttcaaacccaagcagggcaaaacaaactctcaccaaaatgggaaggaccctacacgatcacacaagtcttgcggccaggcgcattcaaaatcgcagacggcgacggtcgcgaattagcaaattcgtggaacattgaccaactacgtaaattctatgtatgagtcaataacaccgtacctgtaagcacccttacagtatcaataaagcctatttctaggtttcataccacgaccaaagtgttttcactcgacgatcccttactctgataacacctaacgttgaaacatatccttatgaccctttacgccgtctcgacaaggcctccgaggaacctaagggatcttcggctggggatgcccagaaccgataaggccttgtcagatccttcagagacgaaagaccatgtaagatctggtcgtgtaagagttctcgccgtgcgtattaaccaagccgtgtaatcggaaaccgagctttccaacttcacggctgggggctaggatcagagcttattcaacctaggcagatcaagtgtccaagagccttatcatccaagaaaatttctccgacgacaaggctgggggctagggagagtgtacgactcaaacagccgaggtcgttaactaagaacacactctaacacataacatccagagtaagatgcatttgtttaaggaatatttctttattcacataataattcttacttgttttttacatagatctcccactacattacactttttcctaagacatctatagcaggccacgagtattaccaagagggccaatgccagtccatagactggaataccttctcggctaacggcgtcatcgacctcgcaaggtggtctatctccgccggagtcctccgagaacgagcaaacccttcatggaggaattcgagatccaggcgcgggcggtgatctcgcaggcaagctagcacatgtcctccggcatatcgactcgctcgacgacactcttgtttcaaggcctcatcgatacgcctgccgatgccatcgagttgggcacaggccccgttgagccacgagatgtacccggtcgccgattcctcaggagtgttgcggactactcgaagctccccgcatacccgggccattgaggtacagcaactctttaaatatgacgcaaaccacacctcgcgtcctcggagcgtttccatggcttgctctttcttcacggctagcatggttctcgagagttccgccacttcaaattttgtcttctaatattggatacgacgatcttgggttgcaagggcatcctcgagatctgctaaacataacgaccactaagacaacctggaaaccactaacccaacacgggttaaaaaggctactcacttgaggtggttgtccccatctcgacctccacatcaagagtttggtcctcgacgtcatgtgagacgcgtggttcaaactcaggaaccggaattatcgctagtgactcgggctacccgcgctggtgaacatcctcgtcaccagcatctctacaatcgacaagaaaaacttccgaaatcaacactgaacaaggatggtaatcatacgcccgaaagcaaccagagttcaagatttgcaaattataaaaaatacaagaagtcctactcttcaaaaagggggaggacagactcccccaggtcactgacttcttccatcacctccttacgcgtgtcgcttgccgccccctgatccaagatatcacgcagatcgagttcagggcgcgacaaccttacacacgcgaggatgtgacacgccccggtgtagataccgttggacgtctcctccgcgatcctggccgaatgcttggaggggatttcccctatcaccgtcgccagctccgcaagagaagaagtcaacaagaactcgtcggggttcaccgggatcgtggacttgacgccgcactcctcggcgagctggtgaaggccggtgtaggtgacccgcagcgaaccacggatctcagagagattgtctccaagttccgacatgcggtcctcgagccctttgcgttggcgctcgttcccggccaccagctccctcatcttcgtgaggtcctcacaggcctcagccagttcccgcaccaaccgctcggcacgcgcgtttgccaccgccgtctccaccctcgcctctgagatctcgcggccggtgccgcgagcaccagcttcgagaaggcgccccatttcgacttggagctcttcctaggt

SEQ ID NO: 25986 - DNA, 619 bp, Oryza sativa
caaaattatgtgaaacttacatataagttacactgtaattacatgtaagttacagtgtaattacatataagttacagtgtaattacactacgattgtactataattacatctgtcaaatttttggagaaaaacttgtcaacaaatgtataggtagtcccacggttttgtaagttgagggatgtcacatatttggttttgtggttgggggacgattttgtatctcgatgacaagttgagggaccttcggtgtactttttccaatatctcttcaagctgtcagaggcaaactggtaaccaacccagtttagcccaattcaacatgggcctaaactacagcccactaacaaaagcccattaagagaaagcccattattttctctttctctctccaaggtggcggcggggttggtccactcgaagagctcggcggtggaacagctcgctcgatcatggccgccgccgccgccgcctcaagggcgctctgggcttgccgcaccgcctcctaccttcggatctcctccttccccagggctttctccaccggtatggcatctgccccctctcctgctttccattttgtcctccctcctgcttagtattttgcctgtattatatggg

SEQ ID NO: 25987 - DNA, 884 bp, Oryza sativa
acaaaccccaacttctgccgataatatgatatactaaaatcatattttttttaaatcacgtagattctatcacgaaattctgtaggtactacgccatccaaaccggagtaaaagttccttggctaccaatttcaagcgtgtagcaccattacgcatagtatcctgttgttcctgtgaaagcatcatacaccaagagtggagctaattggaacacatgaatataacctgcatgatgttaggcatttttttatggttaaaaaccatatcattacggcaacgccaaattgaccaacatagagcactagctccaaataaaatcatttttttgtgtgtctaggcactccccttagccagttaccaaaaatatcttttgcattgtggggagggggaatattgaaggcaaagaagacacatcgccaagcaaaacgtgcaacatgacagtcaaagaaaagatgttggatggtctcttgtgtattacaaaaacaacattgcttgtttcccctccattttctctttatgaggttatcttttgttaagattactttttttgtgaagcaaccacataaatactttgatttttagtagtacctttacctcccataagatcctcttgtggattcttacattggaattgatgatcgcattatacatggatttgaccgaaaaatggccatttttatgtagcgaccaaataaagcaatcattttcatttgacagggttatgttagctagtcgagaaatcaaatcattccactcaaactaaactttggtcctacaattgatcgttggaataaaacattcaacggtgttgtgctcataacctctgccaaagtagaattgtctctttcgaaccacattgtacagagaaggatattgatatttga

SEQ ID NO: 25988 - DNA, 15114 bp, Oryza sativa
gagggctctttttagaccaaggagaatttaacaaaaattctccgggccatatttgaatttttcttgtacgtattttagtgtttgccaatttcttttcgaattttaattaattctattattcctgttagaagatgatttttatttcgggatgaatttatcaggacgtgacattccgccctctcccgtgcccggctccctcccccatcctataaaatgcaacccccgcactccgttctatcgctttagccccctcccgcggtctcccgtggtctctagccacctccccaccgtcgccctctctctcccacgttgccggccgcctccagccgcctgtgccgcctcgaccgtgcgccggccggccgcgccgtcgcctcctccagcgtcgccgccacctcctccacgccggcctgccctccgtttcgcgaggtgacccccggagctgcgtttccgccgtcgcccatccatttcctccgcgccggccgcctccagtcgcctccatctccctgcctgcacgccggtcgacgtcgccaccacctccctcggctccacgacgccgctctcatccccggcatcacctcctcctcgcccgaacatcgccggaacaccgtcgcccgcgccggcctcaccttcctcctcgtcgacatctcctccggctgcccctttcgccatgcccgtgcatcagccgacgctgccgtcccctccctcggcatggtgacgtagccctccacctcgtccactcctcggtttcgccggaacgccatcgccgcgagcccctccatccgcctcgccggagttgttcggccgcccgtccctccacgccgtgcaccggtcggccacacccccatcatcttcggcatcgcagctgcgacgtcgtcctcggcctcgcctcccctccgaccgaacaccgccggtgcccgtcgtcgccttcaccgttccctctcgcccggctcgtcgtcttgcggcgccgcctccgtcatcgtcatcgctgcggcgtgttccacgccgtcctcgcctccatgcagccgttgccggctgccctcgtcgtctcctcgccggctgccctcgtcgccttctcgccggccccggtcgtcgtcgtcctcgtcctctcgtcgttcccggtcgtcgtggcgtttgtccctccgtcaagccgttctcgttcgtcgtcctcgcttcgtcaagatcgctgcagccccgtcctcgtgttcgtcctcggctccgcgtcgtcaagcctcgtgccggccgcgtctcgccttcgcccaaggatcgccgccgaagccgtcccctcgccgttcgtctccgttgtgcccgtctgtctccgccgcgcccgttcgtcgttgtcgttcccacgcctcgtcgcgtggtggtaaggtttcctcctctcgcttccccgccctcgtcctttcggtgtcgccccgtacccgttgtgcggtcgtcgaccccggtacccgtgtaccggtgtcggtagtcgttcacgcgtgcgggtggtgaccgtgtagtgtccgcgttagtgtgcccgctcggtagccgcgtggtttccacgtgtgcaacccgggtggtgtctagtggagtccgtttatcggccactcgcctcggttgacacacggggtccgcttccgtcgacccgtggaccgtctctgtgtacccggtctaccgtggtcctttaggttgacatgtggggtccgcatgtcaacggcgcagccttcctgtcttttccaggctagcgcttacacatgttttataattgcaaagcttaattataataattcgcaaatctccatataacagcattaaacttcggatgatcatatcttggtcatacgaactctgaatcgacccgttcaagtctcctaatgtttgttataacctaaagaaccctgtgctttctttttatgtgttgttattgcttctttataggcttttagctttgcttgtgtgcttcgcgtagcttctgtcgttccggaggttcccgaagcgtggttcgtggtcgtcgccgaaggttcggaaggccgttatctctgagcaaggcaagtcacatcatccttgaacatattgaatcccagtttgtaaaattatgttgatttaaattattgcattatcgctttatttaaattcccgcgttatcactgttttatttagccatgcctattcacctttgttatgacattattattgctattgttattattaccttgttcaccctagaataaacaaaaccccaactagtgggtactctattcctggttccactagtatgaatttaggtagatgcttcgctgattaataggacaacattaggtggtttttataactttagacttgggaaattctcatatcatttggacactatggaatggttggcttatgttggaattggacacacacctctcttcctctttcaaaacccctaaaacctgttttcggtggggtttgggtgcatgccagttgtgggaagtagcaccccggccactataaggattaagctcgggcctctgttgcaaagcactactgtacttccacatgtctaatgggtaaggcttagtttgtggctcagtctagtcataaacaaaagtacacggattggagatggatgaagtcgggtgtcgatggacattctccagggcaaatgaaggctacacgagctgcggcccggtagtcgagatgtcatatggcagagggttggtgccctgctgctaggggctcagttctgcctgcctgtcccgggtatcccggccgtaggtgggattgggtcggtactcttgtctaaggctaggatgggttggaaactatgtcacgtctttcgcctgtataccgtggtggtatgtggcacgtggttacacgtgaggaagatgtgtcttgtgggtaaagatgtacacctctgatcagagtataatctattcgaatagccgcgccctcggttatgggcaagccgagcaatgtacccaagtcagtgttttaattcttaaaatttgctcaacaactaaaatatggaatggttggcctgggttggcttgggacgagctgggacccagggtcgggttgccagttcggtctgaatcatcgtaggccttgggttaaggcaggttcgtgagggttcacggccttgtttaataatactgtgtagctctaggatcgtctttataaaatagctttgggcaactaagtgacttataaatgctgcttttctgcaaaacttaacccctatattattactccttgtacccccttgcattaaccatgcatctgccggtgtgacttgctgagtactgtggttgtactcattcttgctcaatctttccccccttcagtaagagaagctttggagaagatgtcttaggcggagtcctggcttataccccagttgagcgcctgtgaagatggagccgtaggcccgctagtccgctgctgtttatttttgattgtcaggcctgaagcgcctttgtaataatgtaaatattatcgatataataaagatgtgtcttttatatcatgtttgtgtggtgtaccccggcttttcctgggacggggattaatacactagcgttcgggaaaaggcaattttcccagtcgcgacagtgtccccgacaacaaagatctaaaggatgcaattctgaaagaagctcatgatactttatactccattcaccctggtagtaccaagatgtaccaggatctcaaggaaaggttttggagggcaagtatgaagcgtgaaatcgcagaatacgtagcagtatgtgatgtttgtcagagagtcaaggcagaacatcagaaacccgccggtttgttgcaacctttgaagattcctgaatggaaatgggaagaaataggtatggattttatcactggtttacccagaacgtcatcaggccatgactctatttgggtgatagtcgacagacttaccaaagtggctcatttcattccggtaaagacaacctattctggaagtcgcttggcggaattgtatatggcaaggattgtgtgtttgcatggcgtccctaagaagatagtgtctgatcgaggcagtcagtttacttcaaatttttggaagaaacttcaggaagagatgggttctaagctgaactttagtactgcttatcatccgcagacagacgggcaaaccgaaagggtgaatcaaattttggaagacatgttgagagcttgtgctctagatttcggtggaagttgggataagaatctaccctatgcagaattttcgtacaacaacagttatcaagctagtctacagatggctccttacgaagcattgtatggtcggaagtgccgcactccgcttttgtgggatcaaacgggagaacgtcaggttttcgggacggatatcctaagggaagcagaagaaaaggtaaagatcattcaagaaagattgcgagtggctcaatctcgttataagagttatgccgacaatcgccgcagagatttgagttttgaagaaggagattatgtgtatcttcgtgtcacgcctcttcgaggagttcatcgttttcagaccaaaggaaaattggcaccgcgttttgtgggaccttataagattgtcagcagaagaggagaggttgcttatcagttggagttacctcaatccttggcaggagtccataatgtgttccatgtgtcgcaattgaaaaagtgtttaagggtacctaccgaagaagctaatattgaccagatagaagtccaagaggatttgacttatggtgagaaaccaatccgtatactggaaacaaatgagagaagaaccaggaatcgagttatccgtttctgcaaagttcaatggagtaatcactcggaagaagaatcaacgtgggaacgagaagatgaattaaagtcagctcatccgcttctgttcgccagttcttccgaatctcgaggacgagattctgtttaaggggggtaggtttgtcacaccctgaaaattcaaaatatataaattgttgtttaaatggaatttctagaatttattttaaaagtcttgaaaagaaaatctaattctaattaataaattccaatataaaattgggccagataaaatttcattaaatactttgcttaattctataattcctagatttttctgggatttatttgagctaaggaagtatttttaataaatggaattgcatttaagaaataatttaaattgaaaaagttttaaaaagtcttcttttggctttgggccgaaagtcggcccaaaaccgccttctctctcttctcggcccagccggcccagtccgcagccgcccgcgcgcgcgcgcgccctcgcagccgctgacaggtgggtcccacctgtcaggcccgtcgtcttcctcgggccgaaaccctagcgcgccgccgccgagccgccgccgctgtttccttccaaatccggccgcctctttccttctccggccgaatcaatagaggggaaatgatctccgggatctcctctaccttttctcctttggaatcttcggctaaatcgctttggaaagcgttggaatcgagttcgattcggatcggttttccctctttccaagccgcgagtttccttcgccgttgccgtcgccgtgggccttcgccgtcgcctccgagcccctttaaaaggatccccatgcccttctctttccgccgccaccctcgccttcgcctctcgtcgtcggaagagctctagcgccgtgtgccctagcttcgccgtcgccgccgccgcttcagccgtgctccgccgtcgctccagctgtcgccgccgctcgggaagaccgtcgtcgtgctcgccaagtcgccgccgtcctcgtccgccccttcgcagccgtcggaacccgccggagcatcgtcgccgtcgtcaacccgaaggtagccgccgcttccttctcgtcgccgtcgccgtccgttccttttccgccgccgttttggtcaccggtgtgttcgccgcgttgtcctctacgtgctggtgccctccgttggtgccgtggtgccgccgttcgccggcgagtgtccgccgcccgagccgtcttcttcgccgagtcgccgccgtcgtcggtgacgtcatcgctgacgtcatcgggatcctatcccgtgagccggtcgtagaccgatcgatcttggccgtccgatttggatcggatcaatctcggccgtccgttcgtgtgaaccgccgcccgtgcgccggtccacccaaaccctagttgctgacgcaataaatccccttttccttttcaaaaataattcattattgcgtcataattcaatttaaaccgatttaagtgttttaatccgatttaatctttaaaaattcataactaattcatcttagctccgatttagttggttcaagtctctaaatttttctaaaattgagatctacacattaaaaatatccacatgtactgttcatgcttgtttttgtgctgttttggtgattttgctcttttctgcttagattccgtcgtttccggagagtccgttttcgcggaagaagagtttgaagagttccaaggccagcaaggcaagtcacacagatcccaaacaaccctttgagcatgttgatcctatttaaagctattgtttctattcaactattgcatctattttcgaatgtcattgggtggaattgacctattctttgttatggcccttttgtacattgattaccttattccttgataccttgggttatattaatttgactagttgagctttatttatattggttcaactagatattagatataattgcttagccctgcttagaaacattagtacacttatgggataactaatgattcactattatttcatgatggcttattgatagttcacgatggtcaatcgtgattagttaattaattaatgtgccaactaaaacctgataatggtgggttgtgggcacatggttttgatggtcgtgctcatgacaattaaggaccggttcacgagtttcggttgtgaaacatttatcgtgccaaccacaagccagcatgggcaacggctttatcttttgtatagcatggttcattgcggggcaccagactgagaagtggcggagataagcccacgggggtcgctggggagtccatgccttgtttataagggggtgattatgatccaggaaggtgcgctgcagtgaattgtgttatgcgaggggtattgtcacaactcctttccgagataccgtggtggtattgaggcacatggtgacatgatgtggggttgtgtcttgtgggtacagtggtacacctctgatcagagtaaaactattcgaatagccatgcccgcggttatgggcgggtctaacaatgtctttcgtgattagtctcacacctctcatcatagtaaaagatgcttaaactggtaataatttgattagctcctggtttggaatggtacattcctggtttggagatagaactgtgcagccggggtggttgttcagaatggttgggcctatacaacagggtatgttgtatagcgttggattaatattgtttaattattacttaactgttttgttaaattctcaaatgtttactaaatgctgcttttgcaaatgaaaccctattatgccatcctttgttatcctgtgcacttgcatatttgctgcgtggcttgctgagtatgtcatatactcaccttgcaatcattcatcataggaagagttctacaatgaggctgatggtgtggaggattaggtgtagccttggtcaagctgcctgtggagtggagccgtctgcgccgtttatttattttccgctgcttagaactttattgattgagaggaactatctacctctgtaatgacattctattcgcttattaattagagtaatatttgtactctattatcaatttgttattgtgtgcctcggctgattcctggacgagggttcacacacatgtaagcgtttggaattttggatagaaattccgggcgtgacaatgttgctgttggagctgactagctgatgagacacatgctagcaacatgtccaatttttccacaacgggtgcatgcctttgatccgaagaagacacatcggaaactcttagtccaaacaaatgtctctttggttgatcacttgattttcttcgccatcaatcgctaggttatttgattcataatagattatgagcttacggaaatgagaccctaggtctccttaatcatcaaccaaatgtacccatcacacaacacttgcaatcttaatatggaccctacataaacttgccaatctcattcattatctcatgtttctctgttattacatgattgacggggaacagctataaaacaaaagtacttgaacaccgatacaagagtattatggttgcttctgactagcactaggcttaacaggtactgcatttgctccactgactacttggtgattggcatggttgcttcctgtaaattggcgaaaatgtggaggccgattttgccttggttggggacagtttttggagtaatgcccttcttcactgcagttgtaacaaacaataactttcttacactcgggttcttcatcttgtacttgatttctcagctgctgtattggaacttccaaaggtacaacgcagatactgacctctgtcttgtcagctggtggctggggctgaaattgagcattgacaccttgtggtagtgcactcattggagttggagctgttgcaacgcgggctataggactgcttcgggatgcatggatgacaattcgttgaggagcaagcttctgattgcggggggttgcgtggactgacgtgctggcagctacgtttctcggttttgggcacttgtcggcgaaatgacccattccttgacatttgaagcaacagatatcttcccggactcggcattttcttttctcattttgattcctctgtcctggcactggagttaggctgaaactgtaatcttggcgaggatttgtgcttccttgatgcttctctccgttggaactggcgggttggttggccatcttcttcgtcagcagaaaactgaattgacaatcttttggtacgtgatcagttccttcacaaaagaaacaagtgatcctgctcgttggacacctgtcgggtggatggtcttcctcaccatgaacgcatgcagaggcacacgagctggcaacatgaccgatttctccacaacgagagcatgccttaagttctattttattctggttaaaaccttggggagacttctcatcttcatcatctgaggagacttgatctgaatcttcactaccagacactctacctccattagctaaaagatgctctgtcaactgttgtgcacctcggaaggaacttcttctctgacattttgtcattcctggtggaggccattctgtgctggtaatgatcatcttacggacttcatcttcggttcgcattggtgcttttcttttctgctgaggacagttccttgcatagtgcccttgctcatcacacataaaacagatgatacttgcttcttttgagtcaacatgtggcatggcatgaggggccttctgggatgttggcggtgcgctgacttgtggtgtgagtgcttggactgcctccaactgcacttgaggttgtatttgactcaagttcagaattggcgtctggtgctgctgtagtatctctataagcaatcggttctggttaatcaggtgttggactagtgtcacacaactggtgtctggtgcttcattcactcgggagcttgaggtaccaatgtcctgacttctgaccttattgcctttctcattgtcagccatctgttgcaaaggtttggagagggagagagggaaaacaaaggggagagacagattagaaactaaggataggaccttaacagatctaagtcttttgctgttatgatgtatgttaggcttattctgcaagttgattaagcaaacaacctagcatggttacatcacaccccactgatgcaaaccacgcgctacacacacaagcaaggaaacacacgactaacgactctaccctagagggtggcttaggttctgcgacgggttctccgagatcttcactcctgcttcacatctggcttcactgcttccttcgcttcgctaacgaatccaacagccttctgcagcttcggcagacaactgacgatgtcttcttctttgccgacctgaccatctagtactagttgaaatccgaagaatgaagaagggaataaaccttttccaaatagcattgggggaaggaggaaaaaggaactttcgcaaatagtttcatttataaaatatgtccttaggttttatccacttggcttaacctacagtcgagatggctctgataccagcttgtcgcgaccgagaaaattgccttttcccgaacgctagtgcattaatccccgtcccaggaaaagccggggtgcaccaaacaaacatgatacaaaaggcacatctttattatatcgataatatttacattattacaaaggcgcttcaggcctgacaatcaaaaataaacagcagcggactagcgggcctacagctccatctccacaggcgctcaactggggtataagccaggactccacctaagacatcttctccaaagcttctcttactgaagggggaaaagattgagcaagaatgagtacaaccacagtactcagcaagccacaccggcagatgcatgattaatgcaaggggggtacaaggggataataataggggttaggttttgcagtaaacagcatttaaaagtcacttagttgcccaaagctattttataaagacgatcttagagctacacaatattattaatcaaggccgtggacccacacgaacctgccttaacccaaggcctacgatgattcggaccgaactggcaacccgacctgggtcccagctcgtcccaagccaacccaggccaacctttccacattttagttgttaagcaaattttaagaattaaaccactaacttgggtacattgctaggcttgcccatatccgagggctcggctattcgaatagatttactctgatcagaggtgtacatctttacccacaagacacatctttactccgcattccatggccttggaacccgtcgtaaacatgtgacataacccttcacccatcctagccgtgaacaaaagtaccgacccaaccctgcctacggccggtatcccgggacaggcaggccagggttgagcccctagcaacaagatctagaccgggtgcgccacacacataggggtgagaccacccgcgtactagtccagtgccatggcatctcgactaacgggcaccgacccgtgtagtcttcatttgcctagacatctcgattaccgagccgcagctcgcgtagccttcatttgcctcagagatatccatcgtcgcaacgacttcatccatctctatccgtgtccttttgttcaggactagcctgagcaccgagttaagccttacccattagacatgtggttagtacggtagtgctttgcaacagaggcccgagcttaatccttatagtggccggggtgctacttcccacaactggcatgcacccaaaccccaccgaaaacaggttttaggggttttgaaagaggaagagaggtgtatatccaattccaccataatccaacaattccatagtgtccaaatgatatgagaattcccaaagtctaaagttataaaaccacctaatgttgcctaattaatcagcgaagcatctacctaaatttatactagtggaaccacgaatagagtacccactagttggggttttgtttattctagggtgaacaaggtaataataacaatggcaataataatgtcttaacaaaggtaaataagcatggcttaataaaacagtgataacgcgggaatttaaataaagcaataatgcaataatttaaatcaaaataatttgataaactgggattcaatatgttcaaggatgatgtgacttgccttgcttgctttcccaaacgtcggcttctacttccacgaagagcgaatcttccgaagctgcagcgtctacacgaccaacggaaaagaaaaggcttttactctactaaactccatataacaagcagaaacaaagcacaaaaatgggttcttgacttcttaaggaaaaattagagacttgaacggtccaattccgagttcaaatggccaagatatggccatttgaaatttatatgctctttaaatggatatttgcgaatttcttcatttaaattttaattaaaaatcgggtttattgcgtcagccgagagagagggcgcgcggaccgggtccacgggagtggggcccacgcgtcagcccctcggtccacggtggaccgggtgcacgcggctgacgccgaccggcgccgtgggtcccacgcgtcagccgcacccgcgggcgcgggcggctgacggccgggcccacctggcagccgcggggcgcgcccgaaggcggcctcgccggcacggccgacggaaggcggcgcacccgcgccccgatggtcgccgccggcgaccaacggcgcggcggagcggcacccgagagagaggagggaagggggaagcgaacggagcggtccacggctcaccccgggacgacgagggcggcggaaacgacaaccggagcggaggaaggcggcggcgcggttcggatcgacgaggacggcggcgctccgacggtcggcgggcgaaacgaaggggtggacgaggttggcgaggacgcggcgaagccgaaggaggtgacgccgagtcgggaggaagtccggagcgacaacggcgatgaaccggagctcggcggcgacggcggagagagaggaagacggtgcgggcacgattccgacggggagagtgagcggcgagtggcggaaacggaggagagaggcacggggaacaattatatagcgccgggagggggagaaagcggccggaggggaaggaaaccggcgcggaggatccggccgccattgatggcgccggcgaggtttgcggaagcgattccaaacggatccgagggagagagagagggaaaagcgggggaaaacggagagggaatcgcggggagtgatttccccctctttatggcgcgcggggatggcgggatgcggcggattcggcggcggcggcggcgctagggcacgggcgggcggcgggagcggcgggaggtaggggatgacgggtgggccccacccgtcagcgagggtggcgggcgggcccgcccgtcagcggcgcgcgcgcggggaggaggccgaatgggccgcgggggagaggagagagagggagagagatgggccgagccggcccaagagggggggaaagaactttttagagcttttctttttataaaaccattttaactttgtttatgtcttaataattattatttgtgctctgaaaattccactaaaatttatttacgcattttaggcttttaggaaatatacaaaaatcctccaagccttatttgacttttaactttgcatattttaattgttggaggcttgcacccagattttaattattctatgcataatttaaaggatatattttagggtcgttttgggacgcgacaataaagggcagatttaacgtgtcaatcaagcatatagaataaaagtagttaaattagataagatcaactgaaactccgatactaccctaatcggcaaccagaaagcaggctagagattgcaatttgaagcacgacttaatagatcaaactcaactgatgcagcattaagtatgaaaagaagaacaatatctagaaaatcaagccgctggaagtttcatagagtggtagatatatcacataatctaagttaacgtcattatctaacctaatcggctgccttccattagcagatgttagccgattataggttagataaagatattatcgaagactatgtgagatatatgataactcgacgaattatatagacaagattagagtgtcataaagatggaagcactaatcctgagaacataagtcgtcatgacaagttttacctcttgttgaagatcgaaaccgatgcagctcaacccgagagcacgaactcgtcgaaataaaagtaaagcaaaagggtggcgatgcgccgagattgtattggatgtgttttcttgtttttacatagggctcgggtctatttatacccgaggattacaagatacgtccataacggacacgactattatctctaacaaactctaagataccataagtctttacggcagacttttgcccaaacatatctctaaggaaattacatagaatatcctaattaatagatacaatcgccttcccaggactctatccaagcatggcaatcaccttgaagcagatcaacttgaacccaatgactttcaccgggtcatattatcggaatcggctgtatcggctagccccgtccaattcggactctgccgatcctgaccttagccgatttagactgcagccgatttttactctatctccgcaaagatcttcatcttggatttcacttcgatctgatcttcatctccgatgccaatagtgatagaatttaccaaatttggtcgttaacaagttaccaaaatttgtcagcaaactaaatgtaaccacttttttgacaactttaccaaaatttggtaagattgaaaatggcatcaaagtgaacaggcccccaataaaaaaaccaacctagctcttacataagtattgtcattcattatactccctccatctacttttgatagtcatatttcatcttatcacacagaccaagggtaagtaactctacttatcattcatttaaacatgctactagtcattcctcgtaaacaaacaattcattaatatttacatttctcgatgcccatgtagccaatgttgtgtggaagaatgaagagtcatgcattaaatccgagaaagtcattaagatggttgttgaattgaaatattactatcaaaaataaatttttcagatttgaaaatatgactatcaaaaatagatgtagagagtcctatataatattataattattttttatggaacggaaagagtaaatgacgtaagaagatataatgtaatacagtttttgtgtcactgcatcacgactcaagccgcattcgagataagagcatatgaaaacgaagtacatgcgcttaaaacgattatttattag

SEQ ID NO: 25989 - DNA, 19966 bp, Oryza sativa
ggggagaggagagagagggagggagagttgggccgagccggcccaagaagggaaggggggaaaaaggactttttagggctttttctttttataaaaccattttaactttgtttatttcttaataattattatttgtgctctgaaaattccactaaaatttgagggctccttttagaccaaggagaatttaccaaaaattctccgggccacattcgactttttcttgtacgtattttagtgtttgccaatttcttttcgaattttaattaattctattattccttttggaaaatgatttttatttcgggatgaatttatcaggacgtgacagcagttatgtatggtggatgcatggccccggacatattatgaagttccaatcatcgattacagggaaacaaacatgcgtttagaggtagaagagaaggccgattgcatatactgatagagctatgtaattgatcagtcatccattaatcgtaacctgtgtaaatgacaataaattggtaattgattagtagttaacgccatatgtaactgtgcaagaaagcatggttaaaattagaatatatcttgctttccccagaaaaatatatatcttgcattcgcacaaatgggtttacaagaatgactaaaagtcaaattttagacatcaaccattagaggcaagaagaaaatagatttggtttagtggatgaagcctacgtaagtggcagtgatatagtggatgaaaacatatatagcgatgtgatcaagcaacaagtggaaatgagaattagtgaattggggcttgtgtccagtggccagttcgtgtccggctaaaaattaattagggcgtagcagcaaacaaccaggaaggagttagaggctgttacgactgaaacaattactaaattaccattgtagtgcttttttatctctaagttgccctttagcaaatcaagggccgatgatgctgagtactccctccgtcccacaatataagggattttgaatttttcttgcaacgtttgaccactcgtcttattcattttttttttgcaaatataaaaaacaaaaagttatgtttaaaatactgtgagataataaagtaagtcacaaataaaataaataataatttcaaaaaattttgaataagacgagttgtcaaacgttacaagcaaaaactcaaaatcccttatattatgagacggatggagtagtttgagaggtgccttgcattgggtacctcccaagaaccttaaaagctctgctttatctttggtgaagatgacggaagggtgcatatatgcgcagtcctgtatatatacttgaaacatggacaagaaagggattttcaggctattcaggtggctgaagaattgtactatcagttaattggacttgttaattagttgaagtacatcatgaagctgccagcacccaggaggcccaggagggtaaaaggtgccatgagaattatatacgaccaagactgactaacgaatatattgtatacatgataggtttacctgaaagctgggaaaagaactcatgtgtgatcgatgcttgtttatgatggaacaaagggaatttaatctgtacatttccttcctttttttttaatagtggaaattccggccttggcttgaacagacgaaggtacagctaatgttatcttatacctacttaaaaaatcggcaactttctaatcggcaccgatgcattttcgtccgttgtcttgcgcctttgcagctcatgcccgcttcgtccatttgctcacgtcgtccacccgtgttcaaataaaattaaacaaagacaggctgagcggataccaagttcaacacaaaaggtagtcggatacggatttgatttggactcaaaaagtgataaaatcaaccccataaatacaacaaggattgcacgggatatcaattgctacaataagaaatcaagcaagacacatagcaattagtgagatctgacataatttcatgaaggtggctttgacttgcagtgtcgagctccgagcggcagtgcacggctttggtgagggacggaagctcgatggcatctccccaccgatgagacaggttcatgaggaaccagaggaggcctggtgaggaagtggagtgtaacgccccgatattcgttagctataaacacaagacaacttacaccagggtgttatgcattacctgtgagatagtaccagtcccaggatacactagctagtacacacagaataaatgttgaatcacagtaaactgttttattatatcactaggtagtagtccttacaaacgttgccatcatggacaggcccatagataagcaacacaacattacagaaaaccataaaagcgacggcatataagcgaacagcgcggagacactaagcgactaagcaactaagcactaggcaaagcacctagaaaactaacttattccacaggcgagactttgggctaggcacgaaacatctagaagtcttcatactcggcttgctcctagagacactcctcagcggtcgagtcgacatcttcatcctcgtactctatagattaatgtaagggtaagggtgagtacttaacgtactcagcgagctaggggaaagaatgacatgttcggtttaaacaaggagactagggttttatttgcggaagcggcctttttggcaaagtgatttatttcacaaaactcctagtgagtcaaaatgttagttgtcgggaggaggctcacgcctcgacccattccacaagttgctttgcaacaacttgtcacaagattaactaacaataattaatttgcttcctctgttattttctgttcactttcacaacaacatagttcacccagctatctcagcacatcaacaccttctcgcccctaacgacatctcggtgttagacgacaccccgggtcacacagatccattcctaactacaaaggttagccgtctgccacataggcggactctggaaatgttttccttcccaataaccactattccttaatcatttgtcaaatgaatctacactatgagaaacaccttacactcgcccttgaccgtgggcacggctgttcgaacagttcattaatctctgcagaggttgtacgatttacccacacggcacgaaactgacactgtttactcgtcggtaacagaagttcgtgataaggcttttccaaagctaacccatgaaaatagcatgccacctagttgggctaagtctcttagccgagtatcaggcaaggtcagccttcatccactcaggaaatatcgaggatgtctcctactaatatcgcgtgccacaatagaggcaataaaaacacccaaaagggctataaagatccaaacttcgtctcctcaccctcggcatcccacaaccattggcacaccgcactcctatgtgataacaatttacttagccagaggcatcccatcaacacccgtgtggtcgcgctgtaatgtgtttggatggattttccaaaggaaacggtccttaacgataatacgtggccaaaccacaaaggcatgactttgcatcatcactatttacacagcacattttatttcacagcacctcggtacaacatactgaattttttagcatgtaattggaataacctagtttcctacacggtaaatcaacgttagcatggctaagcaaactacctcggtagtcgcataacgataccggcgcaaatatttgtggagctatcaaaggtaaagaaacaacaacatatgtaaactaactgcaactaatatgtcagtccgtcggttgtataaacaatccgaggcctaaacatgtttatcgtgtatactaagcaatgcacttatcaaacaaacatatcttgcaaatataggggcaatgtgatcaaagaggcttgccttgcacagggctggggtcttctccctcaaaagcggcctccaaagcttcctcgtactcaggctctaaacgtgaaaaacaaaactaattaacaaaaggcaataaaacaagctcaaatcagagaaacaatgatgccactgtgtagatctcaattttagaaaaatataggaacttgaaggggtcaaacggagttacggttgaatttctatgaattttcaaagattaaaaggattttttggaatatttggaaatctatttattaacggaaagggaatattccgctaatgcggacagcaagaggggcccacctgtcagtgactgaaagagagaaggaggcacggggcccggctatcagcggtggggttttcttcttcctcctctcgctcggttcagctctggggcggaggcgtgacgtggcagcgaggctcggctcggcgaccggcggtcggggaggcggcagcgaactccggtggagctatgccagcgacggcggcgctgggaggcgaggtgcggcggcttgagcagcggcacagacaaatcaggagagaagagagaggagagatgggaatggcgtggtgagcatgggggctcgggcccttttataggcggcgtggcatggcgggacgtggcggtgagctggcgtctaggcgcgggagaactgtgggtagctggctagccactacagcgggaatccgggaggggatggcgacgcgacagcgtggcgtcacgcaccggtggcgatgcgacggcgaaaacgacggtgacatgacacgaggtgacgcgcggagagagggaatggcgacgggacaacgatgacgcgcagtcgacggcagctacagccaagagttgggacggtagagctcagaacgaggcgacgggagcgacgtcacgcggtggtggcgacacgacgcaagagagagggagagacgcggtcttggcagcttcccggagtggatgggcaacaagacgacgagacgatggcaaggggacgcgcatccgcgagaactcgggatgggacaatgacggaacaacagatgacgcaaagcgacgcggcgccgtgtctcccggcaggaattcggagcgagggagcgggattcacagctgctcaggaaacttctcatcaatcgagctagcagaagtggatggttcagtgagtggctcgatcgttagaggttcctctatcttggacacggatgcctccggctggggttcattggattgcgtcatgaaggaagtattttctagaatgcgatccaaaattgtccttccttctgacggtgttttgtgcatgaccgatcctccagcggttatgtccagatagaatgcagactccttatccaaacccgtatggaaatgttgaagaagcacatactcgggtaaggacagggttggtccggattgcactaaattagtaaatctggaccatgctgcaccaattgatccgttcttgatctgtttaaaactgagaatttctactcgaagggcagtaatacgagtaactggaaagaaggcaagacagaatctgtctcgcaacttttcctagctaccgtttacacatccaacggtagaggtgtaccatttctttgctctctcttgaagagagaacatgaacaatttccaccgcacagtttcttgtctcatgccacgcatcttaaggcacgagcagacttgttcaaagtctcgcagatgatggtagggattttctagatcaaagccagaaaaaagatttttccctaaccatactaattagttcgggacgaatttcatagccagttgtataaatgggctccgatgaagaaggtggctcatagaattcgccccgaggagcagacagctaaaaaagaggttgctccatggtcgagaagagtttgacaggaatacttctctaggatagcaggggtaaaggtataataaaaaacttaaaaatgatacgaggatgaactaggttcggaaatgatcagcaaccgttccccggtgacggcgccagaaatgcttgttggtagttcttacgatcacagataaaatccgcaagcgcacggatataccgatgcagtactttccctatggagtattccaagggtattgaatccaagggaacgtgtgtgatcagatcttccttcagttcatccaaggacaccaagcagatgataggctaggatagagaggatttagtagtgagaaacatctagggaaagcttaattttaatcgtaacgcaatacttcaggcactggaaacccgttgttcccagatatcgctctactacgtacccggatagggaggacttaagtgatctcgagggctgtcaccacctctacacccacctcaaacgtactgtgggatacgcagtaattactggataacaactacctaaacaccacgtctaagcaattaatatctactttagtttttataactcactaaagcaatcactatattttagttggttatagtgaacaataatcctgtatgctatttaggaactaaccaagagataattctcatgagataaatctaaattactcaagaagaatattatattgaactcagagtaataaacagaataaaagaaataggagaagattaccgacaactccggaattcttccgacttcttctattctactctcttcctattctagtacacaatatagtacaatagagcctcttataattcagctcaagcttggaagtgtgtgtgagagtgaatgaagtgaggtctatttataggacaggtatgacggttataggaaggggaattatccgaagtgccccctaaccgccatcaggaatgcatctggagcgtccatgccaaaacctgggatcaacggtgatcaccagggttcggccgaacctgggctgggcccccctagcctggcctttggcctggctcctctcctggtcctcatctatccattcttcagagttttgggttgatttactgatgttttgatgaagttccctcctggcctggcctttggcctggctcctctcctagtcctcctctatccattcttcggagttttgggttgatttactaatgttttgatgaagttcacaacccctccttgtatggatacgtaattctcctcactttagtccagatttcctcccaacatcaggttttatcatctgcatacaaatatacaccaacactgtggaatatatgctctattatctgaactttatgtagatgttggcggtatagaattgacatttaacagccgccaacagtgatgctacagaaaacatgtgctctcatttatggattaattaggcttaaaaaaatgtcacgcgaattagctctcatttatataactagttttgtaagtagtctatgtttagtccttcaaattaatgtccaaacatcatatatgatagagactaaagtttagtccctggctccctgcatccaaacaccacctaagctcaaagcctggtttggttccccaaacttttttcccaaaaacatcacatcgaatctttggacacatgcatggagcattaaatatagattaaaaaactaaatgcacatttaggggggaaatcacgagacgaaccttttgagcctattagtccataattagccataaatactaaagtaacccatatgtgctaatgacgaattaattaggctcaaaagattcgtctcgtagttttcaggcgagttatgaaattagtttcttcattcgtatccgaaaacccttccgacatccggtcaaacatccgatgtgatacccaaaaattttcttttcgtgaactaaacaggtcctaaggggatcgatcttatccaaacccgttgactggttgacgttaccactactggggaagggctctttattcccggtttacaaccccttttagtcctgggttgcaaatcaggacgaccaatccgggactaaagatataaacgggagtaaaaatgaatctttagtcaccgttggtaacaccaaccgggaataaagttcccagcgccattttagtctggttggttaggcgcttttttttcctttatttttttgcttcttgcatttattgtcaccttcaaatccacacaaatcatccccaaatcatgcacaacaaatcatccacaattctcagcccatccacaaaatcatccacaatccacaagtcattcacaaaatcatccaccaaatcatccccaaatctaaaataatttacaacaaaatttacaaatcattccaaaaataaaagaaaatcacaaaacaagccgccgttggccacccagccgtgtgccgcctcccggcctccgccgcccggccgccgctgctcagccgctatcgcccggccgccttcgcctggctgcctccgccagggagaggagagggggaggagaggggaagggggacgaaggggagaaaaggccgggagagggggaggaggtggaaaaaaggaggggaggaggaggagaagaggatgagagaggggaggaggaggagaggaggaggggataaggacgagcggggagaacaaggcacggcgcgcgggtcgaggcaggattttcatgatttttttatgttaccaaccgggactaaaaaataataggactctgacatgtctttgaaccgggagtaaaaataatacttagtcctgattggtaacaccaaccgggactaaatataaaaaaaaaattattgtgtgttttcaaaccgggactaatgtgatttttaagcgatccagcaaaatcatttctccagtagtgtcccaggtttttaactgggaaaagaaaaatctaatgtttttctacaacatggaagctgaatatatgcgtgtggtgtggaacttggaagggacagacgcggacacacatgaatgcggtggtggagccattgatatcgtgaagcccgaatgagtactaacattttccagtaatattcgactaatttttttagacatgaatggctattaatttacagtgaagacgttagcggaggagcctggacgacgcccgacctgcccggggctagctccgccactgcgtgatgaatgggctacacaatgtgggcctggatgcaggacgctcatgtacatattcgagaggttttctagaaaaggaaaaaggaacggttcggtccggcttgtactgtttgagtttagtcgatggttcaataactaaaacagaacaattaattgataccaggatttcacatattgagaaattgaacgatataactacaaatccgcagaaatgtaatctaggtccaattcaaatgctgatcaaacatctatacgtgtgggcttgtggttatttcttagttagtatcattatttatgaacatggaactcctattcccgtttaagctgctcgcgtagtacaagccctgttaattcatgttattttatgagatcactgaaatttatccgcatccgcatgcatgctgtgaggtcaacgaaatgtaagagctcgcctagaacttgtgacttaattagtaggtcatgtttggcataactccaaatctaatacctatgatagatataaagtttgtatgttaaactatagtggtttaaaatttaaaattttatttaaaatgtgaacaaaatgatttatctaaatgctatcagcgtaaccgtagatccatatccatagatttgtggagctgaaaatactcagctctaaaaaatcttgcatctctggagctatatcaaaaagtgtctagtatcaaaatttcacctcttgaatatggtatctcaatatgctctcctaaattaattattgcttgaataccatagtggccgtcaactccttacgcactcactatttgctcctttggctctctccaccaattgttgaggtgttgttgtctttgtttgcttatccgttagcgcgggtgttttatcttttcctactatatgacttgcgtcttttattttactggcacttaatttgttcgttttgtttatatgtattattcagcttcctgtctataagttggcagggttttacccatcatgactacatacgtaaaattaaagttttttttatccgttgcaaagcacaggtattttgctagttatttggtagcacctaaggctatcaataagactttgaaatatgacaagattataataaacgataacacccactagagtgggacaatctgttcattggctggtcaattccgtgtatcttctgtgatcgaagtagacaatcaagattcttcactccacatgcatgaaagaaaggagtgcagaacttctgcatgtaactgaaaggatcattggtctctctctctctctctctctcttacccctctcatgtttttactcatttgtttttcatttattaatggatcgatttttacatttccttggctggtcaattctgtgtatcttcagtgatccaagtagacgaaataaagattcctcactccgacatgcatgaaagaaaaaggagtgcagaacttctgcatgcaacttctgaaaggatcactgatttttagctccaaacatcacaggattcataagctgaaaagttgcgaaatacacaaggaaattgaaattacactcacagacacatggtacacaacacatgtactctcgtctctgctcctaaatactccatccgtccctaaatatttgacggcatttattttttttaagcatgtttaaccgttcgtcttattcaaaaaattttataaaatatgtaaaattatatatatacataaaagtatatttaactatgaatcaaatgataggaaaagaattaataattacttaaattttttgaataaaatgaacggctaaatatgtttaaaaaagtcaacggcgagacggaggaagtatataggcgacgttgacggactaccgtggcggcgccgacatggagctatcaacgtcgtcggcgtggcagcggtggtgcggcgaggcctgctcgacgatgtgttgtggcacggcgggcagcttgccgccgccggtggcggcggtgtcgtgcacgggcgcgtggatgatgagccaccagatcttgcgcaggagctccgccgcgtacacgacgtagaggaagacgacgacggtgaggacggtgacgtagatggagcagggcgccgcgtgcgtgctgccggcgatgtaggcacccatgaggcacaccatgtcgagcaccgcgatgatctccagcgccaccaccttcgcctccgagtggtagaacgactcgttcatcagcaggatgatgatcaccaccgacgtcacgaacgctgtcgcgttgaagtagaagaacacggtgtaccttatcacatgcacatcaaacattgaaaagaaagattaatggaggggtctcgccgtggtcggaggcaaaaattagttcgtcgttgttacctttgtgggaagttggactggagcaccggcgtgccggcgacgtgactctcaccgtcgttgtgctgccagaagccgccgggagggttgagtccggcatggtaggtgacggaggcggcgagcacggcgagcaccatcagccagccgctcatctccttgagccacttctcccgcttcttcttcgcctcgttcaactgccccagcgccgccgcggccgccgcctcctcctccttcttgtggtggtgcaggtacagcacgcccgtgtacgccggcggcaaagccgctgcgtccccgtcaacgccgggacgggaacgatgggagatatcaggacttgcacggggttccccgtggccggcatcgcctgatcgccggcggcgtcgtcggcactggcgctcggaggttggccattgataaggttaagatccatcagtatctccacggacattgttggtgacgggattcttgctatctttctgcaactcggatgatccgatcgatcgagcacctggttgatttttactgatgctgaagtgtttcaggatttcagctaggagatggatctctgtgtaagtaagtatataagtactccaagctgtccatgcatattgaagctaagcttgccgacgattggcgcacacggtccatgtggcacgtgagtgcgaagcgtagaaccaactgtccaggacaggctgtcactgcaagagagctcggcacatatatatatatatgtttagattcattaacatatatataaatattggcaatgttagaaaatcttacaatataaaactatatgtttagattcattaacatatatataaatattggcaatgttagaaaatcttacaatataaaacggaggaagtagttgttagtactcgtttttttgaaaaccttgttagtactcgttaggctgcattctgtgtaagactcacgacctcgcgtaacgttacatactgtaagagtcacgtcacgttattaagatcattctgttaaaccagcatgaatgaagtatgaaggttacactgatctccatcttaaaatagtaaccaaatgttaaaattagacacacaatctatattatgtttaactgagggaataaacaaaagtaatcagtaaacaccatacatgacaaaaatgagacttggcaccgttcaaatcagatgggcttatcggccgcacataaatctagacgagttattggtgttgtgaaacaaatctctaggagataagtttcttgtgggccaatctaaatcagagtagagataagttctatctcctcctaagactcctagatatacaggggcagggtgtaatatttaaggttggcttgtactccagatgagatctataatgaagagagaactccaccctatatttgtgttcattgtctacttctgcaatgttcttgagggcaaaggaatgggcgcgggtgttcgacatgatatcacgtctctattgttgtaggagggacagggaaaggatccggtgatccgctaataggcgtgttggtttacaacacgttatcagcagctcttcgttcaccggtttgtcgttccaatctattgctattagattgattttttttaacgacagattgatttgctcggttgttcttggcttgcatgtaccggtggatttgctatctaatatagcgcagtgtcgtctgcatctcttcatgcacgacttcacgccggcacgacctagggttggccttgtaacgcgcatgtatggatgcatcttgcgtccttggatgcttgagatcgatcggcaaaaagcatgttgcaagcatgcatgcatcagtatatgcatctaattttcttgttgcttaggccttgtatagtttggttttgcgtgtgggtcctcggactcgtaaataatcatgtaatggtgcttttaaacattctaatgcttttaaagttgatgcaattccaataaaataatttagatacggatttctaggttatgatgcttccataaattgtgttcacatagtgttgaatctccccttggaagcattatgatgggtttattttcctgcatcaatatgtgatggttttctgtgtgacataaatattgggaatacaatgctaaataagaccaagtaaataacagaaaatcacctaatgcatgaaaattctgggaaattgaatatccatggctatggataagaccgctctttactgataaactccttcatacataaatggtgatattaatgtgtctacaagatggagacacgtattcttgttgtacgagatccatgcttttgccgaattcatcacgcatattgtccgtttgcgtcttgggttctctgagaactgcatgaaatgatttggacagatagtgtgggtgatttcacgtaaaggccttcaatgactatagctttgggcattaatgtagatcactctatccctatgatcacactcaagaataggattctgagtcgttgaaatgtgtgaaattagattatgggcttgggattctctgtgcctttcccctagtggcttaacatctcaattagagtacagtcggactacggtcgacattttgctttcccaatggttgagagcacacttttctgatttggagataaatgattatacctcaattttctagcaacttggagttgcgaggttcaataatttgagatatttttcactcggtccggtgaaagatgtaaagtgttttccatgtggtggaatgacattgttcatatggttgcccctattgtgcacatatcttctcaatattattttgaacctgatgtcttgcaaggacaccggaaaattggagccaaatctagcagaataagcccgagggtagatactgtgaatatgcatgattcccacttcactatagcaccaacagctaaacttgggtgttgacccaatctcgatcctcgcgtggatctagcgctaaatggccacctttggttgatgaccaatggttggtagtgtttgtctaataaagttgttttgacaatgggagttgtatggctagtttcgagcatgtcctaggagaacattggtcggctatactgttgtctgttgccaagcagtttatcttttgcttagtttggaactttgcattagatcgatattttctagatagataaagttcttggtctttcctattctattctaaagcttatcttcatgctggaattgacaaaatgctttagtttagaagaacaattagtgtatgatccaaggagttacaactactaacacaattcggtgtaactgtatttcagacaaatgttggctatgcactattgtgttttatcgtgttcttgtagtcggtgactactccctggttgtgttggttgatcagccatcggttgatgaccatgcttgtcgcacgctggcgtttttcacgtgtggacgtgtgcaagccatgcaaagattcgtcgtgttgcataagttgagctcgttgtgccaacgatgattgcatcgacacaccccactatttttgtggatatgtctgaacataatggttttatagtgaatattgttggaggtattgattatctcccgatggctatgtttaggggacataagctaatgtggtttgacaactcgcttatgaatcgtacctaaaacatgctgcttaacatgagtgacccaattctagaatttggtatgagtaattggatcgttcttgcagccttgttggaaagctgccatcacctccgtgttagtgacatgcagaatggtgttgcgacgttccgtgaagcggcgaatgtaattggagaagcgttcgtcgttgccttgaacgatctggtatagatcccactgagtgcccgggtggggaaaggtgccctggaagttgacgatgaactgccccttcagttcgaaccaactgttgatggtgtacctcggtagccccgtcacccatgcctgggcggctgtggtcagcatgactagcaggcagtttgccatgactagttggtcgcccccggcagcttggatggtggtagagtagacggaaagccatgcgctggggtcggtcttgccgtcgtatacttgttgatgcccatgggcttgaagttggccggccatctgactcgacgtaggttgacggtgaaagctggtatgccctcggtgccgtcgtcgcggtgtgggagggggtcgggcaagtggttgcggtagtcatggtatggtcgatggacgacaatgtgttgacgaaaaaaattgaacacaccggcctgggagatctgcttagctcctgtgcaggtccaaagattggtaagatgcgggtgtgccagtcagtttgatcctgcaactgacaagatatgcaaataatagacaaaacagccgatcggctgacaagccgatggagtagttccagccgatagccgataatagccgatgccgataccagccgatagcgatagggttttgagcaatcagctatacgtctaatgtagattctaacactttagtaaataatgatatataggcaatcaactactgataataaaatataacaataatattgtccagtataaaccaatcgtctagcattgatatgatagaataagcactgatctgaaggttaaagcatacatcggctggagatccgatgtcatgaaatccacaaggttagattaaacagtgaaacctttgttgtcatcggctaaatccaacttatatgtatatgcaatccttatgagccgatgcaacgtccagataactcaccggctgaaaccccgatgaaacccttattggcaatcaagaagcaggctagagattatgtttcaaaacccgacttagtagatcaaacttaactgatgcagtactaagtatgaaaagaaacataatatctagacaatcaagccgttgactaagttttcagggtggtagatgtctaagctaatcccgataccggcagaaaccctaaaacgagaagcagccgatagagctaaattgatatgctaatactagattaacagagacatatgataaataggtaggcaaatatatcatccaaaccagagcaatccaaaaggtcgaatgtactgatgcagccttgaacgacgccgatgtaaacgatataattgcctgggccggcgaaacatcggtgcagccccgcgtcaggtgccaagtcccgccggacgataaaataaagtagaaaaggtaaaaggaggcgatgcgccgaattgtattgatcgtgaagataaattacatagacctcgggtgtacatatttatacccataggttgatacaagtccttctcggacaagaaagaaactttcctaaagataaaaggaaactaacaaactattcctaattaatagataaactgacatgccgcatccttcttgaactcggactcttctggataaattccctttagttgatccgactccatcgagaacacggttgctggcgatttgacgactctcatcggctgattccataactctgaaggcgatactgactctaagtcgatgatgactttgggctaaccaaatttcgttgttaacacaatgcagccgtccggctggacgtcggcgtggcagcggccagcgtagatgttgtcctcatgtatccgtagacgttaggcgtcgcggagctggcgacgcttgttcatgacgttgcggaggtcggcgtttagccgacgtcccacctcgatcttgtcgcgcaggtcgctggtgcgcagacttgggtgtgaccttcccgcttgagatgcctcgacacgccttgacccggtattttgtggccgggatggtctcttgccagaggagtcgctggcagtggaggcggtcagtggtacttcggtgtgctggacagcggcggcatccaccatggccttcacctgagcgatggtggtcttgacggccgggtcgcctggaatcggcatgttgtcgaggagggccttggcggctatcatgttgttctgtagcgtggtgaagacatcatgttctcccaacttgacttggaggatggcattttgggcgagacggccgcgctgtcgcagctcgtttagacgccgagtgaggtcctcctgctgctactggatacggcgcttctcctcttcgtactcccttttctcctcgtccgtctcttgaaagacgatgaagacctcgcgggagtgatggcttgaagtccgggtgttgttggagcttcccgagtccgagtcggagagacgtacagactcatcaaggaaaccaacccagcaggatctgagctcccgcggcagtcgaggacggtgacgcggagcggccgtggtgtcccgggcaccgcgggggtttggacgtgatcgggcggctggtgtcgaggttgccgacttgaaatgccttggcagaggaagcaacgaagttgctgataccgagaggtgctggcggtgtagttgtcgatggcgtgagttcccacgaagccagcttgaggacgccggagttggtggcgaagaagtcgagactgccgaaggagagagcttgattcctggagggtagcggtaggctgtaaccggcccgatgacgccgaggctcacctgacagaccttgccgaagctgtcggcgatgaagtcgaatgcgccaaaggagatttgggtggtggcagggaagtggtggtgttggtgatctcaacgccggtggatgccatctccgccttgaaaataatcaagcgccccctacctggcacgccaactatcgatttcttggatcggcaatatattttatggggtgcgctagataagaagagatggtgacacataagtttatcctggtttaggccctcagagtgagataataccctacgtccagtgtgtttaactctgtatccggtggaaaaatgatccgaagacctccctcagactgccaccggcgccttttatactggcttaggcccgccggcgctaatcagggtacagtatccttataatctagatacttgcctactattacatgatacgtggttcattgccatatctgctatagcttaccaactatacaacacctaccatactcggaattgggtcttcggcccacccctgaggacgcgatcttagtcctcaatatggggtacccgggtgccacatacctcacactttttatgttggttttaatagttagagagggagtcattattacgaatcagattcgacccatatctgaggtagctaaatagacttttttttcctaattccacgaaaaacttaaagcccatctgaaatcgttagttttgctcttgctcagttgccagggcccatctgaaaaaattttaaagcccaaataatatggaggcctatttcacctggttttgcctcgttcaacgccactcccctgcaggaccaaaccaccaccgccgccacttgtgccaccatgcatctcgatcgccgcctctgaccaagtcaccctcccacgcccgcgcatctcccgccgtccacgcctccacgacgcccgccatcgacggcatccaccaccgccacgtccgcaaccgcgaaaccgcactcgtacgtccactcctatataatcatccctcctcccccccggccggagagatcacgacatcgacggatcatccaatcatccaatcgctgagctgagccaactgtattagtgttcgtccatctgtgacagttagcaacagaagtagtgttgctgccatggccggagcagcgctgctgttcccggctaccgtcatcgccgccgcctgcgtcgtcctctccggcggggcgtcggcggcgccgccggggcgcgtgttcgtcgtcggcggcgacgggccgaggggttggagccagccgacgggcaccgacgagacgtacaaccactgggcctcccggaaccgcttccacatcggcgatttcctcggtgagatcgatcgatcgatcgccatttccattacatattgcttgctgcattgcattcgtcgtccatggtggtgacatgatcgcggcattgtgtgtgtgtgtgagtgtgcagatttcaagtacgccaagaacgactcggtggtggtggtgtcgcgcgccgactacaagctctgcagcgccgacaagccggtgcagcggttcgacgacggcgccgacgtcaggttccgcctcgacaggaacggcaacttctacttcatcagcggcgcgccgggccactgcaaggccggccagaggatgacggtccgcgtcatggcggaccacgccgccaagggcgccggcggcggcgactccccggccggtgcgccgtcgcccgacggcgacggcgacgacgaggacgacagcggcgggtcgtaccgcacgccggggtacggttactcgtcggggtcgccgccgacgccgccgcacgggaataccagcgccgccgccgtcgtctcgccgtcgcgtggtggtggtggtggcggcggctaccaccgcgtcgccggggttgccgccgccgcgctgctcgtcttggcttgagatgctgccacgtggctacgtctgccgcttaattagctagactcagtgatgtagtttgtcgtgtgcttcttaatttaaacctatcatattagctagactggtgatgtaatttgttggctgttagaaatgttaaacctgctacttagttttcgttaattactggtaccgtacgtggtgcatggacgtctctgagggcctttttttttcttattaacatacataattcggttcttgttaccacgaccttttaactgttaaacaatatgttttatgtaaaaattttgtatataaaaattactttgaaatattaaataatcaaaaaaattaaattttaaataactaaaacttaattaatcatttgctaataaatagggctgca

SEQ ID NO: 25990 - DNA, 1388 bp, Oryza sativa
caaggtttgttcattacctcgtgaatggcactgcataagaatttcatttcactgcatcatacaatcatagttgaatatatgaaaatggtttttcagtagcacaacattgtaaatgtgaacttgctgccatggcaatgttcttttgaagtagtcattcataaatcatggcttaaattcactgcgtcatatgccaaatatctgcattcagcattcgccttctgtatggccagttgcctggtaaatggattcagcaaacaaacaatatcagagagtacttgcgactacaattctgcagttatcctgtagaactgacaatatgaaaccatatgcagactgttccagcatctgctatccctgatggttggatgggccttgatattggcccagactccatcaagactttcagtgaaactttggatactaccaagactgtcatctggaatgggcctatgggagtgttcgagtttgagaaattcgctgctggcactgatgtgagtactgtttttgaacagatttatcagcacaggtttttgtgtttgaagctaaatgtgttcttaatcaattcaggcaattgccaagaaattggctgatatcaccgccaaaggtgttacaacgatcattggaggtggcgattctgttgctgctgtcgagaaggccgggttggcggacaagatgagccacatttcaacgggaggtggcgcgagcttggaactgttggaaggcaagaccctcccaggagtccttgctcttaatgacgcataacactgggggcaagcatatgacccaatttccctagccttttgcggtggtctggttcggaccttggtgtaagttggtaaaaatgcaaagtcagtcgtctgctacctttgaacttgaaataggcttcgcttcaggtattgctagatgacagtgaataataataagcttttggcgtcctcggcatgagagaaatgcccggctcaaacaaactataatggtgtactatattttgccatattctagttgcagcagtttacactaagctataatatcgctcttgctgttatgaatgagacctgtacatgttgtgtatggagacaaatgccactgtgcatactgttttaagccttctcacgtgaagcttctgggctgccagtttggttttgggcgttggtatgttgctttcagattctatgtatcatccaaagctaactttgtgaatagaacttgatgatgaattcgttgcaattagatgtcatggaacgtgaggatggctagctgtttctcaagaccttttctgccattagttttcttgcagtaggcttttccaatgtgcaagatactggaccgaaacctggcacgatctgtgtcgcggttaatcacaaatagaagaatcttatcatatgttg

SEQ ID NO: 25991 - DNA, 713 bp, Oryza sativa
aagctgctgctaaagcagcagcagcaacagctgatactggaggaccgaccatgtaagctttctcattttactatttcataatcccttctgtggcagtggcactgagtattcctctttgtttattttatggaagtttcacaagatcattgcaaaggaaattccttctaatgttgtctatgaggatgagaaagtgctggcatttagagatattaatccacaagcccctgtgcatgttctagtcatcccaaagataagagatgggttgactggactagacaaggtatggaatgttgttcactagtgtttgcgagaggaattctcaatctctaaaactgtgtagcatgcagtatccatgtacttcgttatgtgcttatcttagtacaagccgatgccctttttaactgcctatggaagcaaaattgttggtcatgtactcatgcttctttgagcaagccttccatcagacattatcacctcatgttggaagaacatatttttaggctgaaccaaggcatgtcgaaattctgggctatcttctatacgccgcgaaaatagtggctgagaaggaaggtatagctgaagggtaccgtgtcgtcataaacaatggacctaaaggatgtaagcactcccatgccacatctcttttctacttactggggtttgcacatgttttcccttttcagtatacatgctacacatcatccttcaacgta

SEQ ID NO: 25992 - DNA, 2606 bp, Oryza sativa
ccccgccggaatcgagctcgcgctgtcgctctctctctccgcaatcgccgccgagctccggtccgctgccgtcgtcgccccggaccaccttccccctcggcgccgcctccttcggcttcgccgcatcctcgccgacctcgtccacccctccgtttcgctcgccgaccgccggagcaccgccgaccccgtccacccgagccgcgccgccgccttcctccgctccggtcgccgtttccgtcgtcgccgtcgacccggggtgagccgtggaccgccgcttcgtttccccccttccttcccctctctcggccgccgctccgccgtgcctatggccgctgccggcgaccataggggcgcgggcgcgccgcctcccgtcggctgtgccggcgtggccgccttcgggcgcgccccgcggctgccgcgtggggcccggccgtcagccgcccgcgccctcgggcgcggctgacgcgtggggcccacggcgccggccggtgcgagcccgtgtgcgcccggtccaccgtggaccgtggggctgccgcgtgggccccactcccgtggacccggtccgcgcgcccctcccctcggctgacgcaataaatccatttttaaattaaaatttaaatgaagaaattcgcaaatattcatttaaagagcatataaacttcaaatggccataacttggccatttgaactcggaattggaccgttcaagtctctaatttttccttaagaagtcaagaacccatttttgtgctttgttcctgcttgttatatggagtttattagagtaaaagccttttcttttccgttggtcgtgtagacgctgcagcttcggaagatccgctcttcgtggaagttgaagccgacatttgggaaagcgagcaaggcaagtcacatcatccttgaacatattgaatcccggtttataaaattattttgatttaaattattgcattatcgctttatttaaattcccgcgctatcactgttttatctagccatgcctatttacctttgttatgaccttattattgttattgttattatttccttgttcaccctagaataaacaaaaccccaactagtggacactctactcatggtatcactagcatgagtttaggtagatggtacgctgtttaattaggtaacattaggtggttttacaactctagactttgggaattttctcatcacctggacactatggaatggtttaaatattgtggaattggattcacaccgcccccctctattcagaatccccaaaatggttttaggctgggctcggggtgcatggttttgatagtagcacctcggccatataaggaccggtcttcgggcctctgttgcaaagcactaccgtacttccacatgtctagtgggtaaggcttagtttgtggctcagtctggttataaacaaaagtacacggatggagatggacgaagtcgggggtcgatggacatctctaggacaaatgaaggctacacgagctgcggcccggtagtcgagatgtcatggcacagggccggtgtcctgctgctaggggctcagtcctgcctacctgtcccgggggttccggccgtacgtgggattgggtcggtactcttgtctatggctaggatgggttggaaactatgtcacgtcttccgtctgtataccgtggtggtatgtggcacgtggttacacgtgaggaagatgtgtcttgtgggtaaagatgtacacctctgatcagagtaaatctattcgaatagccgagccctcggatatgggcaagcctagcaatgtacccaagtcagtgttataattcttaaaatttgctcaacaactaaaatgtggaatggttggcctgggttggcttgggacgagctgggacccaggtcgggttgccagttcggtctgaatcatcgtaggccttgggttaaggcaggttcgtgagggttcatggccttgattaataacagtgtatagctctaggatcgtgtttacaaaatagcttgagcaactaaacgtcttcaaatgctgtttactgcaactctaaccccttatattataattcccttgtactcccttgcatttattctgcatttgtgggtgtgtcttgttgagtacggtggttgtactcagtcttgcttaattttcccaagcccagatgaggagctccttgaagatgaaggcttcggtgtctagctcgtgcctgccgtcaagcgcctgtggtcttcgccctagtcttccgctgtttttcgttgtctttgtgtgctgggccttcgctgcccgtgtaataattttatatacgcttccgcttgttaaactctgaattgtatcaacttttggtgtaccttgcctcctgggacaaggattaatgcacgcacgtaaggaatgcccgttgggttatttccggtcgtgacaaaacacgaggcctgggagatctgcttaactctagtgcaggtccaaagcttgccttcggatgtatgagcgtgccagttgatttgatcctgtaatcaacaagagatagaacaaagaaaccgcaattaatcctataaatgatagccgatcggctagatgccgatgacatatcatttatttcaagccgatgtcatgcgtacat

SEQ ID NO: 25993 - DNA, 1349 bp, Oryza sativa
atgagtgatagaaatcatggcagcaagtatcattattgtgatcacattctgcatggagaaatgtattttttccaagaatataagcccattcctctgctagtaaagttcccatgtcaacctattttactttaaaaccaaagaaactgtaaataaaaaaacgagatagagatttgcaattcactgggtacaaaagttagatgcacttctttaacattttagcagattgcttccaacatatgacatcaacttcccagtcagttggttattttacaatcttgaaaagcaatatttttctatcagtccaactaatttgagaaaaaaaattctgaatgagatatgtcaagagcagttgtgaggctgaattgttcagggatgtatggaaagcaagcttgtgtttgacgcaacaaatatgtgtatatgtaagattgatggagtatggattctgagcgatagcagtagacaattcaatcaatattttatcacctaaagatcatgcatagtattttgacgaaacaacggcagatgtgcaccttcaagatgaagctttactgacgatccaagtcgttgagggggtctaagatccagaatccataaacactctccagaacacatgcattgcaggtgaggagccggacgggacatttcgccgagcaccccgcgttcattgtactctgaggaaaagcggcaagcgctggatgatgggttttgtttcagaatgcatgatgaatccggatgaacctccacgatgccaagttccggactggtcacctgctgatgaactgcatgatgagttttgttcaactactcacctctcacgggattcacctgctgctcccccaccggcaaggaactccatagctgcagctcacccctgcgatgcagaggggattggtggagacaggcgatgcagaggacggcgcggtggctacctagcgacgggagcacctcgtgcggcggggatcggtggagcagaacggcggcgacgacctggcgacgggaggacctcgtgcagcggggaggcggaggatcgtggagggcgagccggcggcggggatcggtggcagacatgcgatgcagaggacggcgcggcggctgatacggagcggagcactgatggcggaggtgcaggagcggaattccggcggagggcgaaggtgcaggtgtggtgggagagcgatagggagggggggggggcggtgcgggtcgtccgctgattgagggaggtggaggtgggatcgattctgacccgttcggatttaacgcggatgatcccccccgttgaatgatgaatgtaagagtgtaagagtaaaagatgagtaaaacgagttggtgaattatagggctgcagg

SEQ ID NO: 25994 - DNA, 1693 bp, Oryza sativa
cgtatgacaggtaggactagatattaatagtgtagtatgtaaatattgtatgaataagctcttaaattggctatagatgaattggaggactatgctattaaacttgctctaatacaaaagcactcagctactgaagaaaaacaattccactcgcttcctcacctagccctctctccacgatacgtccagtccagccatacgattcgatcgatcgccatgggaaagctcaccgacgtgacacgctccaacgacatccagctcaagatcgtgggccactccttgacaatggccatggacgacggcgagttcttcagttccaggcggtattgcgtcggcggacacgactgggagatccgcctgcggccgaaggatccctgggttggcaggcgcgaccggccgctcacgctcaagctcgtcctgcgcggcgcgccccgcacaggcagcggcagtgtgaaggcccagctaagctgctgcttggtagatccgacgcagaagctgaggccgtcggagatgaagaccgtgtcgcataagttccacaagcccggtgactactcgccccgtgccgtgttcatggcaagggacgagctggaggcgtcgggctatctcacagacgattcctacgtcgttcagtgcgccatcaccgtgctccgagaacagccggagatagccgcggcggcggcagcggcgggcgacagcgcgaatgcagccgtggcgccgtcgtccgagttgcacgcgtaccttggcgccctcctggagagcaagaccggcgccgaccgacgttcgtcgtgtccggcgagtcgttcgccgcgcacaaggctatactggcctcgaggtcgccggttttcatggccgagctgttcggggcgatgaaggtgaaggcctcggagcgcgtcgaggtcaaggacatggaggcgccggtcttcaaagccattcttcacttcgtctacactgacaccgttccagagctcgaccaccgtgatggcgaggagacggaggcagcgtcgacggcgacggcgatggcgcagcatctgctcgccggcgccgacaggtacgggctggagaggctcaagctcatctgcgagagcaagctcgccgagcgcatcgacgtcgacacggtgtcgaccacgttggcgttggcggagcagcacgactgctcgcatctgaaggccaagtgcgtcgagttcattgctgccggcacggctgaaaaccttgatgctgtgttggccactgatgggttcaaacatctggaggcgagctgtccctcggtgttgactgaccttgtcaaggttgcccgtggaagaaagaattaaaatgcaggtacgtgcgtatcagagatgtcatagctgaactgttctattgtgaaattttctctaggatttggcaatgcatcatctctgtttgtgctagaagttttgattgattcttcccagtcatgagtagtgcatactttgtacaagcccattatttgtcactactcactagtactagctagtattaccttggtcattcttgtatttttctcacgtgttagtacaatactactactgcactgcagaaatatgcttctgcgtttcaagcctttcaggctatgagaacatgcctgttgccactagtaatcagtacgtttatttttcagaaacatttctttaagcaggagaaccccttttttttttttcagaatcatcactagctt

SEQ ID NO: 25995 - DNA, 1654 bp, Oryza sativa
gtcttcaggaccctgctccacttcatctacaccgacactttgccggagcaagatgacgacgacgtcgaggctgaaacaatggcgtatggtcttctcgaagccgcggatcggtacggcgtggagaggctgatgctgatctgcgcggagaaggtgcacgctggcattagcgtggacaccgccgcgatggcgttggctctggcggagcgccatggatgtaccaagctcaaggctaggtgcatcgagttcatcttggcttctcaggagaatttccacgcagtcgctgcaacggagggttacaagcttctcatggatagctgcccctctgctctgaatgaccttctagtggctgtttttctgaggtacaaattaactgttctgtaaccggaacatgtacgggatagaacaacgttcctagatagagttgagtattgcgagctcgagatttgaagaagaaaatagtgaattttcccaattacaatactccatcagttttaatttatttattgttctagcatttaactttttttaaaaaaaatatttatctttctcgcatttcaaatcatttttactttggcccgttctaactttataaagatacatatttttttctcgttttccgttggcacgcttttcaaaccgttaaacggtgtattttatgcgaaaaatttctatatatgtgacctttcctcatgttattgattagggtcgcagactcgtaatgcgtactccctttcatattgtttattagggtcgcagactcgcaatgcatactccgtttcatattgaaaaaacattttgactttttgtaagtcatactgctatttatgtctcattagttttttctataaatttagtcaaactaaaagaagttgacttttagaaaaaacacgatataaaaaggagggagatagggaatagatcagacaaagcaaacaattgtaggataatttctcaggatatgaaaatcactaggatgcttgatgtagtgagagcatgtctaatgtataatttctcaagagtgtaaaggtgggatccacttgtgtcatagcaactatagatgaaaagtccatcaacgtataaaatccaccattgatcatatagttcacaacatataagatagcttctttgttggtttagcggtaactggtctggtgttaggtttctcttaggttttatataggcactatcgggcttggtgtggtggtggtggtttttttctttcctggttaatgttttacagggtgctagccttgcaatttttgaacctaagaaatcaaccatatgccagcaatttttgacagaaaagtgaagtagagacttctagctaaatattgtggctaagtggcttactcaaagtactttaagttggcaagtcaaatattaaagtaatggagtatatgttagtcaaacttacttaactgaagtgctactacgaattaaacacgtctatatcttactctagtggataatttattttaatggttactagaaaggcatgcccaaagccatcaatctgttataaaaggagtataatttgttataaaaagagtatgttataggtagcttctttgttagtctagtgatgagttttgtgttagttttcttctaggttttgtatagacgctgctcgggtggttatttttcttttcttttc

SEQ ID NO: 25996 - DNA, 963 bp, Oryza sativa
aatactgtatttttagactgattacagtgagcgatgatttcacagagtaatgttttgagtgatcttttatttatcttgcgattttactaccagaatgtggcatttgttacttaattgtgttgttattatgtatatctaattttgatacaaatacctattaatggtttccatcaatgcccaacacttgcttgcaagaggcacaattcccttttacaaaatcactgtaatgcaccacggtttctttaaactttggttctcctatgttgtgtaagtcaaatgcaaaatccacctctgtaacattttggttatagaaagagccacatgtttaaagtgcagtagtcctcaaaaatccccatgccatataattgggttatgttaaaatggcaaatgaaactgaaattgtatgttcaaaaaagggcagcagctaaccgtgtttctatgcttgggataatgttctttcgcccccctttttgttttctcttgtcctctgttgtaatgcaatcaattttgtcttttcagggtcgcccaaaaggtgtaaccccgaagtacagcttgaagcctcttgttccgcgcttgtctgagcttcttggtgttgatgtatgctataaaaggataaatcatatttattattctgcaattctgcttactacaaactggtagaccatcttatatttccatgttttgatgatgtccttgtcgtaggttgtgatggccaatgactgcatcggtgaggaagtccagaaattggctgccactttaccagatggtggtgttctgcttctagaaaatgttcggttctacaaggaggaagagaaaaatgaccctgaattcgccaataagctggcatctgttgctgacctttatgtaaatgatgcctttggcacagcacacagagctcatgcttcaacagagggagttacgaagtatttgagaccttctgttgctggtttcctcatgcagaag

SEQ ID NO: 25997 - DNA, 2635 bp, Oryza sativa
ccctgccctctcggctctccctcttcttcctctctgctctccctcgtcctcgcagcggagcaacggcggcagcgggcagagcagaggcacaagcggagcggcgacgacctcgccaaggacgccacgcgtacctccgacgcgagaggagcggtgacgcatgccggccggcgggagggagggagaggagcggcaggggggagctgcacgcagctgccggcgggagagcatcggcggcgcacaccggccgacgggtgggagggagattagcggctgcgcgcgcagcgctgccggagagggcgtccgacgggagcgctgcgagggaggaggcaatgcgcgccggccgacgagagggagggacaggagcaacggtgcgagggggtcggcagccggcgagtgggcagaagaggagcggcagccccccggcctctctgcccttgtcggcattcccctcacagcgagcggcggccgtcgaccgtctccgcccccctcgtcggctgtcggctttttccctctccgtgcgcgcttgccggccgccgaggaaggatggccgggagggagagagagagaaggagacgcggtccggcggtccatcgtctcccgtcgtccatggcatggatagaggagggtgggacccactaacatgtagatcgtactatttttccttttgtcttactgacatgtgggcctcgcagtttttgtttttatttttttatatattttgcttccgttgccacatcatctacaccaaggacgaaggcagagttaaactagccatgtatgtgttacatcagccaaaaccatcatcaaaaccgctaaaggacccgttgtatctggtttttcggttgaaggacgaactcaaatacattcacaagttaagggaccttaagtgaacttatttcaagtaccttccacagtcagtctcaagtctgcgttggtagaagggcgcgttgaaacggaaagatctctcaaaatctctggatttaacagagcgctgcctgggaaaacgcaagcacgattcgcgaaacactctcgagagcggtacaacggttcgcgttcacccaagccgtgcagacatctgtatataacgctccctttgctcaggctcgttcgcctccgctagcttgcctgggatccgcatcaatggcgccctcctcaaacctcacccaggccgcgcgcgccgtccacaagttcaacgtcaatggctactcggccacgaaagccatggccaaacacgagcatgtctcttccaagcgtctcaccgtggccgggtatgcgtgggagatccactacaccacaggccacgatgcgcactggcactactgggtcgccttcaagctcgtcttcctcggcatcggcgagcaggcgcagcgcgccggcggcgacgacgacgacaacgacgctggcgccatcaaggcgtagctcagctgctgcctggtgcacccgtcgaccacgcgctcccatgcttccgaggagaagagcgacagtcgcacgcgttcgggtccgcgaacgagagctcgccgtgggttctgctcgtgaagcggagggagctggaggcgtcgggtttcatcaccggcgactccttcgccgtgcgctgcaccatcacggtgctcagcaagaacaccatcaactcggccgagccgtcccccgaccttcacctgcagctcggtgagctgctgcggagcgggagattcgccgacgtcgagttcatcgtttccggcgtgtccatcgcggcgcacaggtgcgtgctcgccgcgaggtcgccgtccctcgccgccgccgtcctgaaaggtggcacgaggaagaaggatgggtcggtgcgcgttgaggtcaaggacgacatgagagccggcgtcttcagggcgctgctccatttcatctacaccgacacgttgatggagctcgactggagagaggatggttctgatcccctgctgccgaggacgatggtgatgagcttgaatgaagccgcgggtcggtatgggctggagaggctcaagcagatttgcgagaatatgcttggatttgacgatgcttgtagtgcagattgtgctgtcatgtaacgcatgctctgcatgctgccaaccgttgagaactcttttcttatcgttgtttgctacttcgtcacgagtcacgacgagcaacgaaccttagatctgtgactcgcgagttgtgaacttgtgatgggtgtgctaatgcagtgcacaatctgtgcttttatttacatccgacatgtactcgtgtatggagtactggatttgagataatgaaaatggattacatctccagcttctatcataagacacacagtcataagtttaataataaaaaagggtaaagataaaattaaaattaaaatgagaaataaggcgatgagacaaatctccaacttctctttattatggactagcgttaaaccacataatgttctttagctagcaattctaatggaactacgccacctatagtggaataagagactattggctaccgatttcaaaagtgtagcactgtcgacgggtgatacccgtagaccggatatagagggtattggggtacgctggtacaaagatctacgtagtacgacatcgagcaatcaaaagacaagaattatactggtttaggccccttgacaggt

SEQ ID NO: 25998 - DNA, 8583 bp, Oryza sativa
tttcgggatgaatttatcaggacgtgacaaatccaccccccttacaagaatctcgtccccgagattcgaggaggctagcaagaagataggttgggcggtcttctcttcttgtctgacttcttccgtcgcgtcttgacaaacttccagcaaaacttcaccactcggaactgcttggcttgacctcctgttgcagatggaatcttctcttcacctgacttggaccagggtgcaccttttggctgactcagactaggttgcggtagttcagtgatgcttccgttccagaacttctcatgattcctatcttcggagtcaacctcggacaagttaccacttcacgtcatgcgtcaacactagcttgtcattactaggatactatgtttgtcatcataagaatatcatgcttgtcattcacttctaacttgccatcaactgtctcatattagctttcctggtctccagtgctaggtacttctgctattcgatgccagggtcaaccactctaactataagttatgcttcccaagagaaccatcttatcccacttgatatacttttgacgtcttcccaaataggtttactgctggacttcttattgtctgatcgttatccggccaaatttgaagcttcgttgttaggtgtgattttactctgacctctgtagactaccttcgaacatatcacttggttcataactgggaatagctcccacgaacaagcaactccgattcactttctttatgttcagtttactttccgctattctcttcatgttgtcatcagttagcactcaacgtattcctttacacctttaaccttgatgagttctttcccgttggatcatctcccaggacgtggcgttgcctggtaaccggtgcttgcatttttcactccgggtagcatctgataccgagtggaagatttcactctttgccttcatagaaacacttttacctaggtcatcttgctgacttaatgacaaggtgactgttgcgggggggggcaattactatcaggggtcttctttgagcgatgctgagcatgtttctgtttatcaatcacctttcggcctacttctttcatgctagagaacatctttgccaatctcttttatcaatcttctttcggcttatctctaacaggtggtattctttaatgtggattgctgacgcttctggggatgatgaggtcctttggcttgctgcctttcagtgaaaccttgatgtggttcgtcaaaagctgcactgactaccttcagggaaatacattgcctgctatctgtatctataccactagggtttaattgccgatggtcatctttagtgcttcctcgagatggggagcatccaaattgttcttctgccacatcacctttgacctttttctgataccagataaactaattaccaaccatcgactattatgttctcaaatattgatgtctcctggatctccttaactgttggcaggtatatccgatcttatcaatgtagaggcatggcgggtacccttaggggtttcctccaacactccttatcttgatctgtgaaaggcgtatccaaactcctatcctcaactactgtctcgttggctttttaacccaacacagtttaattgtttttcttttccattcacaggttggttattaactcgaggttagaatatagttcctctgacacgagaccctaggtctcctttgtcagtaaacaattatacacatgatcacatatccgcatctttcaaacgaatcctcatggaacttgtctgtattacacatttctcccttattacatgaatacgaggcactgccttaaccaaaaagggacggtgcttaacatcggtacattgtatcctcaacatgaatcatctctaaacatagcgagctcactgtttacagacatgattatatttatgaattacatgattgctgcaaactttcgattacaccatgataagtagcgaactgaaaaccacaaacatggctgctcattttgattctggagagatatagctggcattgttctagtgactgcatccttgattggttctgtgatgatgtgataggactgcataatgctatcattcacaggagaagcttccttctgattgttggttgcagcggatgacggtcttctgcttggtatcgccctccggaggttgattgcccttggctcggcctggagtaggtcggggagagacacaactccttccatctacgacaattctttgctgaggctgtcgttgcagagaatggttgctaagatttattgccgagtcaggtgcagcaggtggagcattggtgcattgtttctgctatgggttctgattaacacgaggccttacgggtacggcgtttgctccagtgaccacaatacgattggaatgtctgcttcgtgtaaattggcgaaaatgtggaggtcggggacagttttttggagtaatgcccttctccactgcagttgtgacaaacaataactttcttacactcgggttcttcatcttgtacttgatttctcagctgctgtattggagcttccaaaggtacaacgcagatactggcatctgtcttgtcaactggtggctggggctgaaattgagcattgacaccttgtggtagtgcactcattggaattggagctgttgcaacgcgggctataggactgcttcgggatgcatggatgaccattcgttgaggagcaagcttctgattgcagggagttgcgtggactgacgtgccggcagctatgtttctcggttttgggcacttgtcggcgaaatgacccattccttgacaattgaagcaacagatatcttcccggactcggcattttcttttctcattttgattcctctgtcctggcactggagttaggctgaaactgtaatcttggcgaggattggtgttgccttgatgcttctctccgttgaaaccggcgggttggttagccatcttcttcgtcagcagaaaactgaattgacaatcttttggtacatgatcagttccttcacaaaagaaacaagtgatcctgctcgttggacacctgtcgggtggatggtcttcctcacaatgaacgcatgtagaggcacacgagctggcaacatgtccgatttctccacaacgagagcatgccttacgttccattttatcctggttgaaaccttggggagatttctcatcttcatcttctgaggagacttgatctgaatcttcactatcagacactctacctccattagctaaaagatgctctgtcaactgtggtgcacctcggaaggtgtttcttctctgacgtcttgtcattcctggtggaggccattctgtgctggtaatgatcatcttacgaacttcaccttcggttcgcattggtgcttttcttttctgctgaggacagttccttgcgtagtgcccttgctcatcacacataaaacagatgatacttgcttcttttgggtcaacatgtggcatggcatgaggggccttctgggatgttggcggtgcgctgacttgtggtgtgagtgcttggactgcctccaactgcacctgaggttgcatctgactcgggttcaaaattggcatccgatgctgctgtagtatctctataagcaatttgttctggttaatcaggtgttggaccactgccgcacaactggtgtcttgtgcttcattcactcgggagcttgaggtaccaatgtcctgactcctgaccttattgcctttctcattgtcagccatctgttgcaaaggtttggagagggagagagggaaaacgaaggggagagacagattagaaactaaggataggaccttaacagatctaagtcttttgctgttatgatgtatgttaggcttattctgcaagttgattaagcaaacaacctagcatggttacatcaccacccaccgatgcaaaccacgcgctacacacacaagcaaggaaacacacgacaaacgaaacactagagggtggcttaggttctgcgacgggttctccaagatcttcactcctgcttcacagccggcttcactgcttcctccacttcactcgcagatcctgcagtcttctggaacttcggcaaacaactgacgatgtcctcttcttcactgacctgaccatctagtactagttgaaaatccgaagaaggaagaacggagtaaaccttttgcaaaaagcattgggggaaggagaaaagaggaactttcgcaaataatttttatttataaaatatgtccttaggttttatccacttggcttttcctacagtcgagatggctctgataccagcttgtcgcgaccgggaaaattgccttttcccgaacgctagtgtattaatccccgtcccaggaaaagccggggtacaccatacaaacatgatataaaagacacatctttattatatcgataatatttacattattacaaaggcacttaaggcctgaccatcaaaaataaacagcagcggactagcgggcctacggctccatcttcacaggcgctcaactggggtataagccaggactccacctaagacctctcctccaaagcttctcttactgaagagggaaaagattgagcaagaatgagtacaaccacagtactcagcaagccacaccggagaatgcatgattaatgcaagggagtacaaggagataataatataggggttcagttttgcagtaaacagcatttaaaagtcacttagttgcccaaagctattttataaagacgatcctagagctacacagtgttattaaacaaggccgtgaaccctcacgaacctgccttaacccaaggcctacgatgaattggaccgaactggcaacccgacctgggtcccagctcgtcccaagccaacccaggccaaccattccatattttagttgttgagcaaattttaagaattgaaacactgacctgggtacattgctaggcttgcccatatccgagggctcggctattcgaatagatttactctgatcagaggtgtacatctttacccacaagacacctctccctcacgtgttgccacgtgccacataccaccacggtatacggacggaagacgtgacatagtttccaacccatcctagccttagacaagagtaccgacccaatcctacctacggccgggatacccgggacaggcaggcagaactgagcccctagcattgggcaccaaccctccgccgtatgacatctcgactaccgggccgcagctcgtgtagccttcatttgccctggagaatgtccatcgacgcccgacttcatccatctccaatccgtgtacttttgtttatgactagactgagccacaaactaagccttacccattagacatgtggaagtacggtagtgctttgcaacagaggcccgagctttagtccttatagtggccggggtgctacttcccacaactggcatgcacccaaaccccaccgaaaacaggttttaggggttttgaaagaggaagagaggtgtgtgtccaattccatcataagccaaccattccatggtgtccaaatgatatgagaatttcccaagtctaaagttataaaaaccacctaatgttgcctaattaatcagcgaagcatctacctaaattcatacttgtggaaccatgaatagagtgtccactagttgaggttttgtttgtctagggtgaacaaggtaataataataacaataacaataataatatggtcataacaaaggtaaataggcatggctaagtaaaacagtgataacgcgggaatttaaataaagcgataatgcaataatttaaatcaacataattttataaactgggattcaatatgatcaagatgatgtgtcttgccttgctcgttttcccactcgacggcttcgacttccacgaagagcggatcttccgaagctgcagcgtctacacgaccaacggaaaagaaaaaggctttaacactaaataactccacataacagcagaaacaaagcacaaaaatgggttctttacatcttaaggaaaaattagagacttgaacggtccaattccgagttcaaatggccaagatatggccatttgaagtttatatgctctttaaatggatatttacgaatttcttcatttaattttcaattaaaaaaccggattattgcgtcagccgagggagcggggcgcgcggaccgggtccacgggaagtggggcccacgcgtcagccgctcggtccacggtggaccgggcgcacgcggctggcggcggtcggcgccgtgggtcccgcgcgtcaaccgcacccgcgggcgcgggcggctgacggccgggcccacttggcagccgcgagggcgcgcccgaggcggcctcgccggcgcggccgacgggagcgacgcgcccgcgccccgatggtcaccgccggcgaccatcggcgcggcggagcggcgcccgagagagaggagggaagggggaaggcgaacggcggtcctcggctcaccccgggacaacgacgacgacgagaacggcggccggagcggagggagacggcggcgcggctcgggatgacgatgacgacggtgctccgacggtcggcgagcgaaacggaggcgcggacgaggtcgacggcgatgcggcgatgccgagggaggtgtcgccgagtcgggaggaggagcggagcggcggcggcggctaaccgaagcacggcggcgacggcggagagaaggtgctacggcgcgagcacgattccgacggcgagagtgagcggcgagcggcggaaacgaaagagcggagctcggggagggtttaaatagcgccgggggaaggaaagagcggccggagagggaggaatcgcgcgcggaagattcggctccattgattgcgccggcgacgattacgggcttgattcgaacgaatccgagggagagagagaggggaaagagggggaaacgggggaggggaacgcggggattaattcccccctcttgattgcacgcggggcggacgggagcggcgggattcgcggcggcggcggcgctagggcacgggcgctggcggcgggcgcggcgagaggagggagatgacaggtgggtcccacctgtcagcgagagtggcgggcgggcccgcctgtcagcggcgcgcgcgcgcgcggggagccgatgggccgcgggagaggagagagagagagggagtgttgggccgagccggcccaagagaggaaggggggggaaagaagaacttcttttaggatttttctttttataaaccttttcaactttgtttatttcttttcaattattatttgtgctctgaaaattccactaaaatttgagggctccttttagaccaaggagaatttaacaaaaattctccgggtaacatttgaatttttcttgtacgtattttagtgtttgccaatttcttttcgaattttaattaattctattattccttttagaagatgatttttattttcgggatgaatttatcaggacgtgacaaatccaccccccttacaagaatctcgtccccgagattcgaggaggctagcaagaagataggttgggcggtcttctcttcttgtctgacttcttccgtcgcgtcttgacaaacttccagcaaaactttaccactcggaactgcttggcttgacctcctgttgcggatggaatcttctcttcacctgacttggaccaggatgcaccttttggctgactcagactaggttgcggtagttcagtgatgcttccgttccagaacttctcatgattcatatcttcggagtcaacctcagacaagttaccacttcacgtcatgcgtcaacactagcttgtcattactaggatactatgtttgtcatcataagaatatcatgcttgtcattcacttctaacttgccatcaactgtctcatattagctttcctggtctccggtgctaggtacttctgctatgcgatgcgagggtcaaccactctaactacaagttatgcttcccaagagaaccaatttatcccacttgacatactttgacgtctccccaactagtcttactgctggacttcttattgtctgatcgtgatcctgccagatctgaagcttcgttgttagaggtgatcttaatctgacctctgtagactatcttcgaacatatcacttggttcataactgggaatagctcccacaaacaagcaactcagattcactttctttatgttcagtttactttccgctattctcttcatgttgtcatcagttagcactcaacgtattcctttacacctttaaccttgatgagttctttcccgttggatcatctcccaggacgtggcgttgcctggtaaccggtgcttgcatttttcactccgtgtagcatctgataccgagtggaagatttcactctttgccttcatagaaacacttttacctaggtcatcttgcttacttaatgacaaggtgactgttgcggggcaattacaatcaggggtcttccgtgagcgatgcagagcatgcttctgtttatcaatcacctttcggcctacttctttcatgctagagagcatctttgccaatcccttttatcaatcttctttcggcttatctctaacaggtggtattctttaatg

SEQ ID NO: 25999 - DNA, 24064 bp, Oryza sativa
actcatttatgctcaatcttttccctcttcagtaagagaagctttggaggagaggtcttaggtggagtcctggcttataccccaattgagcgcctgtgaagatggagccgtaggcccgctagtccgctgctgtttatttttgatggtcaggccttaagtgcctttgtaataatgtaaatattatcgatataataaagatgtgtcttttatatcatgtttgtatggtgtaccccggcttttcctgggacggggattaatacactagcgttcgggaaaaggcaattttcccggtcgcgacacacgtgccacataccaccacggtatacggacggaagacgtgacatagtttccaacccatcctagccttagacaagagtaccgacccaatcctacctacggccgggatacccgggacaggcaggcagaactgagcccctagcattgggcaccaaccctccgccgtatgacatctcgactaccgggccgcagctcgtgtagccttcatttgccctggagaatgtccatcgacgcccgacttcatccatctccaatccgtgtacttttgtttatgactagactgagccacaaactaagccttacccattagacatgtggaagtacggtagtgctttgcaacagaggcccgagctttagtccttatagtggccggggtgctacttcccataactggcatgcacccaaaccccaccgaaaacaggttttaggggttttgaaagaggaagagaggtgtatgtccaattccatcataatccaacaattccacagtgtccaaatgatatgagaatttcccaagtctaaagttgtaaaaaccacctaatgttgcctaattaaccagcgaagcatctacctaagttcatactagtggaaccatgagtagagtgtccactagttgaggttttgtttaatctagggtgaacaaggtaataacaataacaataacaataataatatggtcgtaacaaaggtaaataggcatggctaaataaaacagtgacaacgcgggaatttaaataaagcgataatgcaataatttaaatcaacataattttataaaatgggattcaatatgatcaagatgatgtgtcttgccttgctcgctttcccaaacgacggcttcaacttccacgaagagcggatcttccgaagctgcggcgtctacacgaccaacggaaaaagaaaaagacttttactctaataaactccaaacaacaagcaggaacaaagcacaaaaatgggttctttacttcttaaggaaaaattagagacttgaacggtccaattccgagttcaaatggccaagatatggccatttgaagtttatatgctctttaaatggatatttgcgaatttcttcatttaaattttaattaaaaaaaacggattattgcgtcagccgagggagggggcgcgcggaccgggtccacgggaagtggggcccacgcgtcagccgctcggtccacggtggaccgggcgcacgcggctggcggcggtcggcgccgtgggtcccgcgcgtcagccgcacccacgggcgcgggcggctgacggccgggcccacttggcagccgcgagggcgcgcccgagggcggcctcgccggcgcggccgacgggagcggcgcgcacccgtgccccgatggtcgccgccggcgaccaacggcgcggcggagtggcacccgagagagaggagggaagggggaaacgaaggggacggtccacggctcaccccgggacaacgacgacgacgagaatggcggacggagcggaagaagacggcggcgcggctcgggatgacgatggcgacggcgctccgacggtctgcgggcgaagcggagcggcggacggggtcggcggcaacacggcgaagcggatggaggggtcgccgagtcaggaggaagtccggagcggcggcggcggcgggacggagctcggcggcgacggcggagagagcggagcacggcgcgagcacgattccgacggcgagagcgagcggtgaacggcggaaacggaagagcggagctcgggcaacgattttatagcgtcggaagggagagaaggcggccggggaggaaggaaaccggccgcggagatctcggccgccattgattgcgccggcgacgaatgcgggcacgattcgaacgaatccgagggagagagagagggggaatcgggggaaacgggagagggaatcacggggagtgattcccctctctttaatgcgcgcggggacggcgggatgcggcgcaatccgcggcggcggcggcgctagggcacgggcgcggcggcggcgcggcgggaggagggcgatgacaggtgggtcccacccgtcagcgagagcggcgggcgggcccgcctgtaagcgacgcgcgcgcgcggggaggccgatgggccgggggaaagagagagagagagggagggaatgggccgtgccggcccaagagggaaaaaggggggggaaaagaacttcttttaggattttctttttataaaacctttttactttgtttatttcttttcacttattatttgtgctctgaaaattccactaaaatttatttaagcattttaggcttttaggaaatatacaaaaatcctccaagcctcatttgacttttatctttgcacattttaattgttggaggctttcacattgaattttacttattcttttgcacaatttcgaggatgaattttagagtcgatttgggacgcgacaaacctaccccccttaaacggaatctcgaccccgagattcggaagaactggcgaagagatcgggatgggctgccttcagttcgtcttcgcgctcccaagtagcttcttcttcggcgtggttgctccactggaccttgcaaaaacggattacccggttcctggtcctgcgctccatggtgtccaggattttcactggcttctccacatacgtcaagtcttcgcgaacttcgatttgctctgagtcggcctgctcggatggcactcgaagacatttcttgagttgcgacacatggaacacatcatgcacgttgcccaaggaggcgggcaactccagctggtaggcgacttctccgcgtcgagcaacgatacggaagggacccacataccgaggtgcaagcttccctttcgtttgaaacctgtgcacacctcgcaatggcgtgacccgaagatacacaaagtcatccactgcgaattccagatcacggcgacggttatctgcataacttttctgccgagactgtgccacctttagattatcccgaatgattctgactttagcttcagcttctctcaggatatcagtcccgaacacttggctttctccaacttggtcccacaatagcggtgtccggcatttgcgcccgtacaacgcttcatagggtgccatttgtatgctggcttgatagctgttattgtaggagaactcggcataggggagactcttatcccaagtcttcccgaaatctaggacacatgcgcggagcatatcttctaggatctgatttagacgctcggtctgtccatcggtctgcgggtgataggcggtgctgaaattcaatcgagtacccagctcttcttggagcttcttccaaaagtgagaggtgaattggcttcccctatcagatacgattttcttgggaacgccatggagactcacgatcctagcgaagtagagctccgctagtttattccctccataggtggtcttcacaggaatgaatcgagctaccttggttaatcgatccactattacccatatagaatcatatccaccttgggtttttggaaggccggtgatgaaatccatcccaatttcatcccatttccattccggcacttggagaggttggagaagtccggccggtcgttggtgttctgccttgacacgctggcacacatcacatagagccacaaactctgcaatttcccgcttcatgctgacccaccagtatttctccttcaagtctaagtacatcttggtactgcctgggtgaatggaataaggactctcgtgagcttcctgaagtatcagctgtttaagttctcggttatctggaacgcatacccgctttccgttccatagggttccgtgttcatcctctgtgaaacctgcggctttaccctgtttcatattcttgaggagtccatgcatgtccggatcattcttctgagcctcgcggatttgatcgagcaaggtaggcttggcttccaacgcagccaagaatccgcgaccaactaggcttaggttcagggcttccatctgttggttaagttcgggtggaatgcctcggacgttgagagtgttgcagtggctctttcggcttagagcgtcggcaaccacgttggccttaccaggatgatagtgtattcccacatcataatccttgatgagttctaaccatctcctttgccgaagattcagatccgactgggtgaagatgtatttcaaactcttatgatcagtatatatttcacagcggttcccaatgagatagtgccgccagatttttagagcatgaaccaccgctgctaactccaagtcatgtgtagggtagttgccttcatgaggtcgtagctgacgtgaagcataggctaccacatgaccgtcctgcatgagcacgcaccccaatccttggcgcgaagcatcacaatacaccatgaagtccttgcgagtatccggcaagattaacactggcgaggaaaccagcttttctttgagagtttggaacgccttctcgcattgcgggctccacacaaatttctcttctttcttcaacaactgtgtcatgggtcgagcgattttggagaagttctcgatgaatctccggtagtatcctgccaaacctaagaaactgcgaatctgagtgactgtcttgggttgcttccaatcggtgacggcggtcactgtttcggggtccacagcaactcctttagcagatatcacgtgccctaagaatttgacttcggacaaccagaactcacacttgctgagcttggcatacaattgatgttcccgcaactttcccagtaccagacggagatggtgctgatggtcttcctctgattgtgagtatatcagaatgtcatcaatgaaaaccacaacaaacttgtccaagtattccatgaacactttattcattaagttcatgaagaaggcaggagcattggttaagccgaacgacatcaccgtgaattcatacagtccatatcgcgtggtgaatgcggtcttcggaatatcttcttcccgaatacgtaattggtgatatccggaacgaagatcaatcttggagaatacagtggcacctttaagctgatcgaacagatcatcgatccggggaagagggtacttgtttttgatggtgacttcattgagagctctgtagtcaacgcacatcctcttcgttttgtctttcttctccacaaaaatcacaggagcaccccaaggggaagtactcggacgtatataccccttttctttcaactcttccaactgtttcttaacttcggccagttcatttgctgccatacggtagggtcgcttgtacagaggagtggttcctggagcaagatatatccggaactcaatctctcgcttgggcggcataccaggtagttcttccggaaacacgtctccgaactctctgactatggggatttctgacagacctatctgatgaagttctgaacttctgacagaggttggaggtgcaaagaaaacaaccggctgttccggtcctcggtacagagtgacagtgcgcctcgcgcaatccactactccttggaattgagccaaccaattcatcccaagaatcacatccaagttctttgtgtctaacagaatcagatccgagggaaaaggaatcccctgaatttctatagggacggcagggctataatactttgctgtcataacccctccaggggtggtgatgagcagagggtttctaagcctttctacccccaactgatttttccccacgaatggcacagatataaacgagtgggaagctccagagtcgaacaaaatggtagcagggatggaatgaacgaggaacgtaccaacgatgacgtctggagttgtcagcacgtcctcggccgtcacatgattcacacggccccgaatgacatccttcccgccgttgttggagcggggaggcacttggccttgctgacgccttggcttcgggcatttatccgcaaagtgcccgggctcgaagcagttgaagcacagccgctgcggaccttgagcgtccctgcgaccttgaacaggctgcacagttggcgtaggaggacggggtgcacgagtcccttgctgattctgctgctgctgcggctgtggaatgcgcaccacgaattgaggtcgaggcgcggagcgaggttgctgctgctgctgctgctgctgctgcgaggaggatccccctgggtagggattggtgtagcggaccctctggttagcaccctgctgattgcggaaattcgccaagcggcgcttgtgcgattccagctccttgtgcttggcttccaagcggatgctcttgtccaccagtcgttgaaaatcaggatagtccccagagactagacgaacggacagctcagggtccattcctgccaagaacttctcttgcttctcctcatcttcccgcacatcctccggggcataacgggctagattgttgaactcatgcaaatactccatcacggagcggctgccttgcttcaactctcggaattcccttttcttaagagccacgactccggcgggcacatgggttttccggaaagcggcggtgaagcgagtccaagtaataggttgcccttctggctgcgtagcctggaagtggtcccaccagagagatgcgggcccctgcagctgatgggcggcgaagacgactttctcctcatcgctgcactgcaccgtgtctagctttttccccacggcatgcaaccaatccaacgcatctacgggattgttggagctagagaaggtgggtgggcggatgcggaggaattcggcgagtttggagtgttggggagggggtggtggagcattctgttgtggcggattttggaggtggtggaggaaagcattcatcatgttggcttgctgggcgaggatttgggtgagaatggcgttggtgtctggtggtggtggtggaggtgggttgccttgggggttggggttgctgccctcgggttggttgccttcaccggtgttaacatttctcctggtcgtcaccatctgaaaaccccacacagaaccagcaaacagagaaggagagctgacgattaaaactaaccacccacgactactataaatcttgaatttatcactgctattaaattggttcattaatgttcaagttgcttaggcaaacaaataaagacaggccccgacatagttacaccacacaccggcgtaaccatgccccacacgactcaaaaagacaaacgaggaaaaacacacgcgcaagcctactaactgctcgtctaccgctgcgacgggccaggacggaaggtgagcaacagcgcaccctccgagctaccaacgccggaggcttccccctcctgaggaaccacgggcgcaggctcggcacgaggggtctcgacgaagcaggtccacgccagggactgacgaacaagctcgggcctggaggtgctcttgcgggcggtgatcttctggctgcggcagacgcggcgacgcttgggacggctgtcctctccctgggcgatcttgagctgatgcagctgcgcctccaacgcgtcgaggtccttcttgagctgcaaattctcttggcgcagctccaggatcttcatgttgttctccaccatgccacggcgcaccatctgatggaagtcaatacgagctgcgtcgtatgcctccaccatgcgtgccagatgcacgacggtagcgtcatgctccgagctggcgtctcggaaggtggcgtagtcgcgggctcctccgcgacgagggtggtagcggtagggcgagtgctgcaactcgtccgggtagcgctggtgaagggtgccgatggcgaggagagcggcgttctggcaagcggcggggaaggaatccccacccgcggtgactgccagcgaagtccgctcgggagagccggagaggatcactgcagtgacctcccaaccagcgtgaggctctgcatcctcaccctcctgctccgggagcggcctggcctggtaatccactccatgtggataccccaagaccacgcacatgccccgcagctccaagacgaagccagtcatgtccaaaccacgacgggtaacgctgccggccatctacaaacaaaaagaaaagcaacatttgaaagatcagattttgatgataagtgaagcagcaagacaaagagagaatagcgggttttcacaaataataaaggatttttatttttgaaaatattgctaaggcttgggatctacggctcgtcctagggtcaagggaggctctgataccaacttgtcacgaccggaaataacccaacgggcattccttacgtgcgtgcattaatccttgtcccaggaggcaaggtacaccaaaagttgatacaattcagagtttaacaagcggaagcgtatataaaattattacacgggcagcgaaggcccagcacacaaagacaacgaataacagcggaagactagggcgaagaccacaggcgcttgacggcaggcacgagatatacaccgaagccttcatcttcaagaagctcctcatctgggtttgggaaaaattgagcaagactgagaacaaccaccgtacccaacaagtcacacccacaaatgcagaataaatgcaagggagtacaagggaattataatataaggggttagagttgcagtaaacagcatttgaagacgtttagttgctcaagctattttgtaaacacgatcctagagctatacactgttattaatcaaggccgtgaaccctcacgaacctgccttaacccaaggcctacgatgattcagaccgaactggcaacccgacctgggtcccagctcgtcccaagccaacccaggccaaccattccacattttagttgttgagcaaattttaagaattataacactgacttgggtacattgctaggcttgcccatatccgagggctcggctattcgaatagatttactctgatcagaggtgtacatctttacccacaagacacatcttcctcacgtgttgccacgtgccacataccaccacggtatacggacggaagacgtgacatagtttccaacccatcctagccttagacaagagtaccgacccaatcctacctacggccgggatacccgggacaggcaggcagaactgagcccctagcattgggcaccaaccctccgccgtatgacatctcgactaccgggccgcagctcgtgtagccttcatttgccctggagaatgtccatcgacgcccgacttcatccatctccaatccgtgtacttttgtttatgactagactgagccacaaactaagccttacccattagacatgtggaagtacggtagtgctttgcaacagaggcccgagcttaatccttatagtggccggggtgctacttcccacaactggcatgcacccaaaccccaccgaaaacaggttttaggggttttgaaaggggaagagaggtgtatgtccaattccaccataaaccaacaattccatagtgtccaaatgatatgagaattcccaaagtctaaagttgtaaaacctcctaatgttacctattaatcagcgaagcatctacctaaattcatactagtggaaccataaatagagtgtccactagttggggttttgtttattctagggtgaacaaggtagtaataacaatgacaataataatatggtcataacaaaggtaaataggcatggctaagtaaaacagtgataacgcgggaatttaaataaagcgataatgcaataatttaaatcaacataattttataaaatgggattcaatatgatcaagatgatgtgtcttgccttgctcgttttccccaatcgacggcttcgacttccacgaagagcggatcttccgaagctgcagcgtctacacgaccaacggaaaagaaaaggcttttactctaataaactccacataacagcagaaacaaagcacaaaaatgggttctttacatcttaaggaaaaattagagacttgaacggtccaattccgagttcaaatggccaagatatggccatttgaagtttatatgctctttaaatggatatttacgaatttcttcatttaaattttaattaaaaaacctatttattgcgtcagccgagggaggggacgcgcggaccgggtccacgggggtggggccccacgcgtcagccgctcggtccacggtggaccgggcgcacgcggctggcggcggtcggcgccgtgggtcccacgcgtcagccgcacccgcgggcgcgggcggctgacagccgggccccacatggcagccgcgagggcgcgcccgaaggcggcctcgccggcacggccgacgggagggaacgcgcccgcgccccgatggtcaccgccggcgaccatcggcgcggcggagcagcgcccgagagagcggagaggagggggaaacggaagggacggtccacggctcaccccgggacaacgacgacgacgagaacggcggccggagcggaagaaggcggcggcgcggctcgggatgacgatgacggcggcgctccgacggtcggcgagcgaaacgaaggcgcggacgaggtcgacggcgatgcggcgatgccgagggaggtggcgccgagccgggaggaagaccggagcgacggcggcggcgaaccggagcggaggaaggcgacggcgcggttcgggatgccgagggcgacggtgctccggcagtcggcgggcgaagcggagcggcggacggggtcggcaaccactcggcgaagccgaaggaggtggcgccgagtcgggcggaggaccggagcgacgtcggcggcgaaccgaaggtcggcggcgacggcggagagagaggagcacggcgcgggcacgaaaccgacggcgagagcgagcggcgagcggcggaaacggaagagcgaagcacggggatcgaatatatagcaacgggagggggagagcgcggccggggagagaggaaaccgcgcgcggagatctcgggcgccattgaagacgccggcgaacttcgcgggatgaatccggacgaatccgagggagagagagagggaaaagagggggaaacgggagagggaaacgcggggagtaattcccccctcattaaggcgcgcggggaaggcgggatgcggcggattcagcggcggcggcggcgctagggcacgggcgggcggcgggcgcggcgggaggaaggcgatgacaggtgggtcccacccgtcagcgagagtggcgggcgggcccgcctgtcagcggcgcgcgcgcgcgggggagccgatgggccgcgggggaagagagagagagggagggactgggccgagccggcccaagaaggaaggggggaaaagaggacttcttttagggtttttctttttataaaccttttcaactttgtttatttcttttcaattattatttgtgctctgaaaattccactaaaatttgagggctctttttagaccaaggagaatttaacaaaaattctccgggccatatttgaatttttcttgtacgtattttagtgtttgccaatttcttttcgaattttaattaattctattattccttttagaagatgatttttatttcgggatgaatttatcaggacgtgacaaatccaccccccttacaagaatctcgtccccgagattcgaggaggctagcaagaagataggttgggcggtcttctcttcttgtctgacttcttccgctccgctttctataacaaacttgcctaacaaagcttctccactctggactgcttggctcgatctcctattgcagatggaatcttctctgcacctgacttatccctggttgaacctttagctgacttcgactgggttgcggcacttgaagatggggattcagttccagaactttgcatagttcatatctttggagtcaacctcatacaagttacccacttcatgtcatgcgtcgagatcagctcgtcattactaagataccatgcttgtcatttgcttctaactcgccaccaactgcctcatattagctttcctggtctccgggtgatagctacttctgctatttgatgcaagggtcgataactttgcctttgaattatgcttcccaagggaaccaacttatcccacttgatatactttgacgtcttcccaaatagttttactgctggacttcttattgtctgatcgttatccggccaaatttgaagcttcgttgttagatgtgattttactctgacctctgtagactatcttcgatcatatcacttggttcataactgggaatagctcccacgaacaagcaactcagattcactttctttatgttcagtttactttccgctattctcttcatgttgtcatcatttagcattcaacgtattcctgtgcaccttcagccttgatgtgttctttcccattggatcatctcccaagacatggcgtcgcctggtaacctgggcttgcacttttcactccgtgtagcatctgataccgagttgaagatttcactccttgccttcatagaaacacttttacctaggtcatcttgcttacttaatgacaaggtgactgttgtgggggaggcaattactatcaggggtcttccttgagcgatgcagagcatgtttctgtttatcaatcacctttcggcctacttctttcatgctagagaacatctttgccaatctcttttatcaatcatctttcggcttatctctaacaggtggtattctttaatgtggattgcggacgcttctggggacgatgaggtcctttggcttgctgcctttcggtgaaaccttgatgtggttcgtcaaaaagctgcactgactaccttcagggaaatacattgcttgctatctgtatctatgccactagggtttagtgcttccttgggatggggagcatccatattgttcttctgccatatcacctttgacccttttctgatacctgatcgactaattaccaaccatcgactattatgttctcaaatattgatgtctcctggatcttcttaactgtttgcaggtatatccgaacttatcaatgtagaggcatggcgggtacccttatgggtttcatccaacaatccttatcttgatctgtaaaaggcgtatccaaactcctattccccaactactgtctcattggctttttaacccaacacagtttaattggttttcttttccatcaacaggttggttattaactcgaggttagaacatagttcctttgaaatgagaccctaggtctcctttatcagtaagcaattatacacataatcacatatccgcatcttccaaaagaatcctcatggaacttgtctgtattacacatttctccctcattacatgaatacgaggcactgccttaaacaaaaagggacggtgcttaacatcggtacattgtatcctcaacatgaatcatccataagcatagcaagctcactgtttatagacatgaatatatttatgtattgcattattgctgcaaactttcgattaccccatgataagtagcgaactgaaaaccacaaacatggctgctcattttgattctggagagatatagctggcattgttctagtgactgcatccttgattggttctgtgatgatgtgataggactgcataatgctatcattcacaggagaagcttccttctgattgctggttgaagcggatgacggtcttctgcttggtatcgccctccggatattgattgcccttggctcggcctggagtaggtcggggagagacacaacttcttccatctacgacaattctttgctgaggctgtcgatgcagagagtggttgctatgatttattgccgagtcaggtgcagctggaggagcattggtgcattgtttctgctatgggttctgattatcacgaggccttacgggtacggcgtttgctccagtgaccacaatacgattggaatgtctgcttcgtgtaaattggcggtaatgtggaggtcgattttgccttggttggggacagttttcggagtaatgcccttcttcactgcagttgtaacaaacaataactttcttacactcgggttcttcatcttgtacttgatttctcagctgctgtattggaatttccaaaggtacaacgcagatactggcctctgtcttgtcagctggtggctggggctgaaattgagcattgacaccttgtggtagtgcattcattggaattggagctgttgcaacgcgggctataggactgcttcgggatgcatggatgacaattcgttgaggagcaagcttctgattgcagggagttgcgtggactgacgtgccggcagctatgtttctcggttttgggcacttgtcggcgaaatgacccattccttgacaattgaagcaacagatgtcttcccggactcggcattttcttttctcatttcgattcctctgtcctggcactggagttaggctgaaactgtaatcttggcgaggattggtgttgccttgatgcttctctccgttggaactggcgggttggttagccatcttcttcgtcagcagaaaactgaattgacaatcttttggtacatgatcagttccttcacaaaagaaacaagtgatcctgctcgttggacacctgtcgggtggatggtcttcctcgcaatgaacgcatatagtggcacacgagctggcgacatgaccgatttctccacaacgagagcatgccttacgttccatttcatcttcatcatctgaggagacttgatctgaatcttcactatcagatactctacctccattagctaaaagatgctctgtcaactgtggtgcacctcggaaggtatttcttctctgacgtcttgtcattcctggtggaggccattctgtgctggtaatgatcatcttacggacttcatcttcggttcgcattggtgtttttcttttctgctgaggacgctcccttgcatagtgcacttgctcatcacacgtaaagcaaatgttacttgcttcttttgggtcaacaggtggcacgtcatcatgggtccttcgggatgctggcggcatgctgacttgtggggtgagtgcttggactgcctccaactgcacttgaggttgtatttgattcaggttcagcattggcgtctgatgctgctgtagtatctctataagcaatcggttctggttaatcaggtgttggaccagtgtcacacgactggtgtctggtgcttcattcactcgggagcttgaggtaccaatatcctgacttctgaccttattgcctttctcattgtcagccatctgttgcaaaggtttggagagggagagagggaaaacaaaggggagagacagattagaaactaaggataggaccttaacagatctaagtcttttgctgttatgatgtatgttaggcttattctgcaagttgattaagcaaacaacctagcatggttacatcacaacccaccgatgcaaaccacgcgctacacacacaagcaaggaaacacacgacaaacgaaacactagagggtggcttaggttctgcgacgggttctccaagatcttcactcctgcttcacagctggcttcactgcttccttcgcttcgctagcggatcctgcagtcttccggagcttcggcaaacaactgacgacatcttcttcttcgcaaagctgaccatctagtacttagttgaaatccgaagaaagaaaagagtaaaccttttgcaaatagcattaggggaaggagaaaaagaggaactttcgcaaataattttatttataaaatatgtccttaggttttatccatttggcttatcctacagtcgagatggctctgataccagcttgtcgcgaccgggaaaattgccttttcccgaacgctagtgtattaatccccgtcccaggaaaagccggggtacaccacacaaacatgatataaaagacacatctttattatatcgataatatttacattattacaaaggcacttaaggcctgacaatcaaaaataaacagcagcggactagcgggcctacggctccatcttcacaggcgctcaactggggtataagccaggactccacctaagacatcttctccaaagcttctcttactgaaggggggaaaagattgagcaagaatgagtacaaccacagtactcagcaagtcacaccggcagatgcatggttaatgcaagggggtacaaggagataacaataggggttaggtttttgcagtaaacagcatttaaaagtcacttagttgcccaaagccgttttgtaaagacgatcctagagctacacagtattattaaacaaggccgtgaaccctcacgaacctgccttaacccaaggcctacgatgattcagaccgaactggcaacccgaccctgggtcccagctcgtcccaagccaacccaggccaaccattccatattttagtcgttgagcaaattttaagaattaaaacactgacttgggtacattgctaggcttgcccatatccgagggctcggctattcgaatagatttactctgatcagaggtgtacatctttacccacaagacacatctttactccgcattccatggccttggaacccgtcgtaaagatgtgacataacccttcacccatcctagccgtgaacaaaagtaccgacccaatcctacctacggccgggatacccgggacaggcaggtagaactgagcccctagcattgggcaccaaccctccgccgtatgacatctcgactaccgggccgcagctcgtgtagccttcatttgccctggagaatgtccatcgacgcccgacttcatccatctccaatccgtgtccttttgttcaggactagactgagcaccgagttaagccttacccattagacatgtggttagtacggtagtgctttgcaacagaggcccgagcttaatccttatagtggccggggtgctacttcccataactggcatgcacccaaaccccaccgaaaacaggttttaggggttttgaaagaggaagagaggtgtatgtccaattccaacataagccaaccattccatggtgtccaaatgatatgagaatttcccaagtctaaagttatgaaatccaactaatgttgtcctattaaattgcgaagcatctacctaaatttaaactagggataccacgagtagagtgtccactagttgaggttttgtttactctagggtgaacaaggtaataatcataacaataacaataataaggtcataacaaaggtaaataggcatggctaaataaaacagtgataacgcgggaatttaaataaagcggtaatgcaataatttaaatcaacataattttacaaactgggattcaatatgttcaaggatgatgtgacttgccttgctcgctttcccaaacgacggcttcgacttccacgaagagcggatcttccgaaactgcagcgtctacacgaccaacggaaaagaaaaaggcttttactctaataaactccaaataacaagcaggaacaaagcacaaaaatgggttctttacttcttaaggaaaaattagagacttgaacggtccaattccgagttcaaatggccaagatatggccatttgaagtttatatgctctttaaatggatacttgcgaattcttcatttaaattttaattaaaaaaaaacggattattgcgtcagccgagggaggggacgcgcggaccgggtccacggggagtggggcccacgcgtcagccccacggtccacggtggaccgggcgcacgcggctggcggcggtcgacgccgtgggtcccgcgcgtcagccgcacccgcgggcgcgggcggctgacggccgggcccacttggcagccgcgagggcgcgcccgagggcggcctcgccggcgcggccgacgggagcgacgcgcccgcgccccgatggtcaccgccggcgaccatcggcgcggcggagcggcgcccgagagagaggagggaagggggaaggcgaacggcggtcctcggctcaccccgggacaacgacgacgacgagaacggcggccggagcggagggagacggcggcgcggctcgggatgacgatgacgacggtgctccgacggtcggcgagcgaaacggaggcgcggacgaggtcgacggcgatgcggcgatgccgagggaggtgtcgccgagtcgggaggaggaccggagcgacgtcggcggcgaaccggagcggagggagacgacggcgcggttcgggatgacgacgacgacggtgctccggcggtcggcgggcgaaacggagacgcggacgaggtcgacggcgatgcggcgatgccgagggaggtggcgccgagccgggaggaagaccggagcgacggcggcggcgaaccggagctcgtcggcgacggcggagagaagatgcgacggcgcgagcgcgattccgacggcgagagcaagcggcgaacggcggaaacggaagagaagggcacgggggacgattttatagcgccgagagggagagagggcggccggggaggaaggaaaccgcgcgcggaggtctcgggcgccattgaagacgccggcgaacttcgcgggatgaatccggacgaatccgagggagagagagagggaaaagagggggaatcgggagagggaaacgcggggaataattcccccctcattaaggcgcgcggggaaggcgggatgcggcggattcggcggcggcggcggcgctagggcacgggcggcgacggacgcggcgggaggaggaagatgacaggtgggccccacccgtcagcgagagtggcgggcgggcccgcctgtcagcggcgcgcgcgcgcggggaggccgatgggccgcgggggaggagagagagggagggagaagtgggccgagccggcccaagagggaaggagggggagaaaaagaacttcttttaggatttttctttttataaaccttttcaactttgtttatttcttttcaattattatttgtgctctgaaaattccactaaaatttgagggctccttttagaccaaggagaatttaacaaaaattctccgggtcacatttgaatttttcttgtacgtattttagtgtttgccaatttcttttcgaattttaattaattctattattccttttagaagatgatttttattttcgggatgaatttatcaggacgtgacagcggcctgggccgagcaggccgggagggaagaggggggggaaaggcagcccgggagagagagggaggagggagtgggccgagggaaaggggagcccaagagaaggagggagagaaggagagggagagaaaaagagggaggaaagggagacttttgggctgggcttggcccaaaggaggaagagagattatttttaggttttctttttttaaataaactttgataattgtttttgttgcttaataattatttccggtgctctgaaaattcaagtaaaatttgagggctccttttagaccaaggagaatttaacaaaaattctccgggccacatttgaatttttcttgcacgtattttagtgtttgccaatttctttttcgaattttaattaattctattattccttttagcgaatgaattttaattttgggatgaatttatcaggacgtgacagacacagattctttcacccaaccatacagttccgtgctcatcttccaagaaaccaatagcttttcctcttctcatattcttcttgatctcttgaatatcaggatcattaatttgggcttctctaacttgatcaattagagtgggcttcgcttctaaagctgcaacgaaacctctaccgacaattcccaaatttaatctttcaaattccttgcataattccaatggcaactgtcgtccttctgtagcattgcaataaccttttctgctaagagcgtctgctacaacattagcctttcccggatgataatgaattcccatgtcataatccttaattaattccaaccatctccgttgtctcatattcagatccggctgagtaaagatatactttaaactcttgtgatcggtgtacacttctgtacgagtaccgaaaagataatgacgccaaatctttaatgcatgaacgactgcagctaactcaatatcatgagtagggtagttcttctcatgcggacgtaactgacgagatgcataggcaaccaccttcccatcttgcatcagaacacaacctaacccaagtttggatgcatcgcaatatacttggaaacccttctttggatcaggcaaaatcaaaataggagctgatattaagcgacttttcaactcttgaaaactccgctcacattcttccgaccatttgtacttcacatctttctgaagcagtcgtgtcatgggcttagcaatcttagaaaaattctctataaacctccgataatatcctgcaaggcctaggaaactgcgaatctctgaaactgtctttggttgcttccaattggttacggattccacgttactaggatcaacggcaactcctccggctgagatgacgtgaccaaggaatttcacttcggacaaccaaaattcacacttgctaaacttagcatacagttgatgttctcgtagcttctccaatgcaaggcgaagatgttcctcatgctcttctttggttcgagagtagataagaatatcatcaataaagaccaccacgaacttgtctaagtattccataaacaccttattcatcaagttcatgaagaaagcaggggcattggtaagtccaaaagacataacagtacattctaacaacccatacctagtggtaaaagctgtctaaggtatatcttcctctttgattctcaactgatgataccctgatcgaagatctatcttggagaaaacagtggcacctttaagctgatcaaacaaatcatcaatcctgggtagtggatacttattcttgatagtcacatcgtttagtgcacgatagtccacacacattctctgagtatggtctttcttttccacaaaaattaccggagctccccatggtgatgaactcggtctgatgtatcctttctgtagcaaatcatctacttgcctcttaacttctgccaactcattggctgccattcgataaggtctcttatggatcggagttgttccaggtaccaaatctattctgaactctatatcccttttaggcggcatacccggtaaatcatctgggaacacatcaggatactcccggactataggaatctcttccaaagttatttgattcagtcttgaccttaaagactcagaagacaatgcatgaacggttacaactcgaccatcatagctgttgagagttacttttctgttggcacagtctatcacacctttatgtctggctaaccagtccatccctaggatgacatcaaggtctttggattctaacaagataagattggccagaaatggtactccttgaatttctattctgacagaggggctacgttgcaaagagagtgcttgattacttggggtactaaccatcaaaggacgtctaagatcttctacttccatcccatgatttcccgcaaaactcatagataagaatgaatgtgtagcaccagaatcgaaaagtactgttgcaggaactgagttaacaaggaacgtacccaaaatcacatctggagcaccttgagcttctgcagcagcaatatgattgacacgggcctttgatgctggtacagcagagttactctgggcagggacaaccttcacgcgttggggcttcggacacttgtcagcataatgtcctggatctccacagttgaaacacaccacgggcttgctgccttgctccctcttggcaggttgttgctgtgctggagctgcaacaggacgtggagcttgattacggatgttgttgccagcattgttgttgaagaactgacgttgcggacgaacaacagacgaagaacctccctgtggcatggactggggtcctaaagtaagacgcggcttctgattatttccctgttgtgtcttgaattgagcaatccgacgtttcttctgctccatgcgattgtacttgtcttcctgacgaatagccttatccactaatttctggaaatcagggtaatctccaaccataagtgggtaagaaagctcatcattaagtcctcccaaaaacttctcctggcgctcttcatcattgcgcacatcttccggagcataacgagcaagacgattgaactcgtgcagatactccgtaacagagcgagatccctgggtaagcgacctgaactccttcttcttgagagacactacccccgatggtatatgcgtcttccggaaagcagcggtgaattcaagccaagtgataggttcagcagtagtcctgttaagacggaagtgatcccaccattcagaggcagggccatgcaactgatgtgatgcaaatgagaccttctcctgatcagtacactgaagtaaatccaacttcttctctatggcatgtagccaatcactagcttcaacaggattagtggtactagagaaaacaggcggcctcacacgaagaaattctgctaacttgttctgtggaggtgcatgattattcccttggttttgctgattctgaaattgttgcatcatcatgttcataagctgtgtctgctgagcaagaacttgggccagagtgggattctctccattgatgttattattggggttgttgggaccattcccattgctacgagtgttcaccatctggtatggataggataagaagagaaaacgggggaaactacttaggacagagaattactttaacttttattgatcttaactgagtttcattattacaaactgaagactcccacaccactaaactctccaacttcctaacactcaaaagcaaacaaacacatgcaattacatcccaccactgatgtaaatcacatgcgagacccacacacacaaacaaacttaaaacaagcaaactaacacaacgatctaagacaacgacttaacaagtcactctagttcttccgagcataggaggtcgattgaaggctcatcttcatcatcttgagttgctacccactcaatcttggaattgatgcgcttggattcttcttcttcatcactacttatgatgatgaccggaggatccgcttgagctggggcaacttctttctccaccacacgaacctttggcgccagttgatagcgagggacaaataaagctctcttccttgcggtaagacgaatcctggccttctgcggcggtgcttctcccttcaatgcggctaattccttctccaaacgatccaccttgtcttctagcttgcaaatcttaccacgattccgatcttcacgatcttgagctgctaacacagtctccgcacgactttcatccatagcccacaacatctcaaccaaatgtcttgtggtaacatcattctcaattccttcagtctcaaggtaactgccacggtcacttccctggggttggcgaggatgatagcgatactcagtgtcgaccaactgatcactgtagcgatcacggagctctcctatggcgatccttgccacctcctgacatgcatggatgtagtttcttcctccagcttcaaacattactgaggggatatcttcactattgctgttcaaggtgactttgactcggcacttttcttcatgacgatcatgacgaatctgggcataaaaaggagcattcccaaatccaatgacaaaggacatcgtacgcaactcctggacaaaaccctcaacgccaaacaggtactcaggcttgtaacacggcatctaaagacaagtgaaaggagggagttaagacatctatccaattaatagcacaagtttttggattaatttgaataaaggtagaaaatcagaataaaaaggtaagtaaataaagtaaac

SEQ ID NO: 26000 - DNA, 738 bp, Oryza sativa
cctcttcatcaatttggtctccaggttctgaggtagtctttgtccagagcaattggcctagtaatatcagactgttgtctctgccctgcactttccgaaaagagcaacttgcagcagttagtaacttcatacatttgcgttacctagacctcagatggtcacgccttgaagaattacctgaagccgtatgcaagctttacctactacaagttttgaacataaagcactgtccgtgccttcttcatttacctccaaggatagccaacttattaaactttgagcatctgattgctgatgaaggaaaacatttactcacaggagttccatgtgttggcaatatgacttccttgcttctgttggataagttctgtgttaggaaaaccaggggctttgacattggacaactgaaaaggttgaggaacctaagaggtttgttgaaagttcagaatctcgagaatgttgatggcaatgaagaagcagcaaaggctagattgagtgacaaaaggcacctaactgagctgtggctgtcatggagtgccggttcttgtgtacaagagccttcagaacaataccacgtcctggaaggtcttgcaccacattcaaatgtaagttgtctccatattacaggctataggggcagtactaccccatcatggcttgctagtaatctcagccttagctcactagaatatctttatctaaattatggttctgaattggaaattcttcctccactgg

SEQ ID NO: 26001 - DNA, 1374 bp, Oryza sativa
aacatctttttagatttttccagtgtactgctactgcatccctctagcgtatctaactgattggagcatttactgaaacttttcaaatgaatacaatatccattgcttcgctgtcagcctatcactctaataagtaatgcatatttgttttcctgcttggcagtccttaaagatctaaaatatgctgatactcatgagtgggtgaaggttgagggtgattcagcaaccataggggtcacagaccatgctcaggtaatcagtttgatacatttgcaagctgcaccagcattttatcagccttcaatatgctatattactgggtctcttgctgagttgataacttcaacgtgttattgacatgcattacagcatttttcctcaaaatagaattttctgtgatagtgtgatggcttaatatgtcctgtttcaattccaggaccatttgggtgatgttgtgtatgttgagcttccagaagttggttccacagtatcacaaggaacgaactttggtgcggttgaaagtgtgaaagcaaccagtgatatcaatgcaccagtatctggagagattattcaagtaaatgatgaactaagtgaaaaaccaggatttgtgagtcgcaattgctacccttgctagactaatttttgagtaatcactgctatgttcagttgacaatttgcttctgcaattttacacagataaatggaagtccatatgagaagggatggatcatcaaggttaagataagtgatccaagtgagttaaactcgctgatggatgatgagaagtacaagaagttttgtgaggaagaagatggcaaacactgatcaatcccctaactgctggatttcaagaaactatgcagcaactcaccatcatgacaatgagccatctcgcctctcctaccacattatattattctggatagaggagtcccaaggaatgtaataagctgaaacatttttcttgcaaatcagacatgaaaattttgtagtgtcctgatcattccgtttgtgctccatttgaaattcagctcttgatttgcttatcatctgaatacaggtggaggattgggtttgtttaaactttgattaagtgacagtgacttgattgtattgagattgcagctcagggattgtgggtttgtttatcttctgaattcaattctggagatagctgcatgaaacgtgatccacccgttttccagctatattattccagtttgaataacaaaatcagatttataaaacattaaaacaagcatcattagacaagtcgataactctgttctttcaattcaatcgatcgttttgccttgagaaagtcaaaactacattacagcacgaagaatctagcttattaccctcgatccgggc

SEQ ID NO: 26002 - DNA, 2907 bp, Oryza sativa
aaagggagctgggccgagaggggaggaggcccaagaggagggagagaaggagagggagagaaagagagggaggagggaaggacttcgggctgggcttggcccaaaggaggagggagggttgtttttagattttctttttaatagactttgataattgttgttgttgtttaataattatttccagtgctctgaaaattcaagtaaaatttgagggctccttttagaccaaggagaatttaacaaaaaatctccgggccacatttgaatttttcttgcacgtattttagtgtttgccaatttctttccgaattttaattaattctattattccttttagaaaatgaattttatttcgggatgaatttatcaggacgtgacagcaaccgattattttaccaagtgggtagaggctattcctttaaagaaagttgattctggggatgctatacagttcgttcaagagcatataatctatcgatttggtatccctcaaactattacgactgatcaaggttcaatttttgtatccaatgaatttgttcagtttgtcgatagtatgggaattaaaatgttgaattcttcaccgtattatgcacaagttaatgggcaggccgaggcatctaataagagtttgatcaagttgattaagaggaagatttctgattatcctcggcaatggcatactcgactggctgaagcattgtggtcttatcggatgtcttgtcatggatcgatacaggttcctccttatgaacttgtttatggtcatgaggctgttttaccatgggaagttcggatcggctcgaggagaacagagttgcaaaatactttaacagccaatgagtattataaccttatggccgatgaaagggaagatctggttcaatcacggctacgagcccttgcaaaggttactagggataaggagcgagttgcccggcattataataagaaagtagtacctaaggacttttcggaaggtgaacttgtatggaagttgattctgccgattgggactcgggatagcaaattcggcaagtggtcgccgaattgggaaggaccgttccaaattcataaggtggtgtttaagggagcatacatgttgcaaggactagatggagaagtttatggccgagctctaaatggcaaatacttgaagaagtattatcccagtgtttgggttaatgcatgatcggctagtgttgccgatgcatgatagccgatgtgtttgcatcgccttgggatggtcgatattgttatatcgcccttagttgcttttcactattgtaatcggttgtggtttgccgatgtacgaatggccgatattgttatatcgcccttagtcatttctataattttgtcaatgttttcaacattgtaaaattacgggggcacatacatagaaaattgcaaatttttgcaaatttttgtgtcttagccgattacaacagtttcttacagactattacatggaaatcactgagacaagtatcgctggatagccgatatagccctttgcctaatctgatttatttcttcgatggcttgggcgtcttgagcatcggttccaggaatgactttcaaggatttagtcatctcagcaacgttcttgattgccgattttagccttgccttctgctcttcgacagcttgcaggagatcggctaacttcctgtgctctagatccagttcagcattgcattcttgaagttgtgccaagagttcaatcttgcgagcttcaagccgatcaatattggatttgatcaggccttcagataactgatcaagcttggctttctcttcatgaacaagctgtcgattggtttggattgtagcctcgatgtccttgtgttcccggagatcggctaacctctgcctggctttctccagtttgaattgatgctgctcgaggtagacagctggagtaagagcatcgactaattcgtccggaagagaggcttggatatctgcaaatcttgcccggatcgagccacagttggtcaccaggttatctagtgatgctcctagccgatgggagatgtcttcgagtgttttcttcacatcatcagacaggagagctgttgctttactggtggtgtcttcttctgtttcatcgaggtaatctttgatgtcaaaggagaatagatcggctaagacctgcaagagacaatatcatggatgattaaggatcaagatatgattggccgatctcaagtttatgttaataaaacttactggaatagtaggtgcagctaattgttcctcctcttcaacatgatgactacctgcagccgatggagtgcggccgcctgattctacctgcataagaggggaagaaggaggaggaggctgccaaagggataaatgttagatataatcagcccaagtcagttaatgagatgatagaagtatcttactggtggagctggtttaggggttggagtaaccgatttcttcctcacggcaattttctttctctatatttattaaaattgtgaggaatcggctataaagtaaatgactgcaaaagtggacagagaaagttgcttacccttgccaattgagctggagcagaagggaatggaggagcctgcttaggtgaagccgatggtgttttttcagtatcgcttatttcggctgcggcttggtcgatgtcttcctcgatttcttcttcatccagagcttgttcgatggatggatctagggcgggtagatcgtcagctggcttagctttctttgtcttagccttcttcttcggagccggggctgaagtatctgcagccgatgatctggttctccgcttcttgccggcatcggctggttctctgatgagtccttggagaagtgctgaggtctttggggcattgtagccgatggcagaaggagatggcccacctccattgggaa

SEQ ID NO: 26003 - DNA, 549 bp, Oryza sativa
tggagctatacaatattattaatcaaggccgtgaacccacacgagcctgccttaacccaaggcctctgatgattcagaccgaactggcaacccgaccctgggtcccagctcgtcccaatccaacccaggccatccattccacattttagttgttaagcaggttttaagaattaaaacactaacttgggtacattgctcggcttgcccataaccgagggcgcggctattcgaatagattatactctgatcagaggtgtacatctttacccacaagacacatcttcctcacgtgtaaccacgtgccacataccaccacggtatacagacggaagacgtgacatagtttccaacccatcctagccatagacaagagtaccgacccaatcccacgtacggccggaacccccgggacaggtaggcaggactgagcccctagcagcaggacaccggccctgtgccatgacatctcgactaccgggccgcagctcgtgtagccttcatttgtcctagacatgtccatcgacccccgacttcgtccatctccatccg

SEQ ID NO: 26004 - DNA, 10335 bp, Oryza sativa
aaaagaaagaagaggattatttttaatttttttctttttaataacatttgtcaattgttgttgttgtttaataattatttccggtgctctgaaaattcaagtaaaatttgagggctccttttagacaaaggagaatttacaaaaattctccgggccacatttgaatttttttcttgtacgtattttaatgtttgccaatttcttttcgaatttttaattaattctattattccttttagcgaatgaattttaattttgggatgaatttatcaggacgtgacaaatccaccccccttacaagaatctcgtccccgagattcgaggaggctagcaagaagttaggttgggcggtcttctcttcttgtctgacttcttccgctccgtcttctataacaaacttgcctaacaaaacttcttcactctggactgcttggctcgatctcctgttgcagatggaatcttctcttcacctgacttgtccctggttgaacctttagctgacttcgactgggttgcggcacttgaagatagggcttcagttccagaactttgcatagttcatatctttggagtcaacctcatacaagttacccacttcatgtcatgcgtcgagatcagctcgtcattactaagataccatgcttgtcatcatttagcattcaaagtattcccttacacattcagccctgacgtattctttttagatttctcttatcaatcacctttcgacctacttcttggttcgataataaacacctttgctggtatcttctatcaatcacctcgtaaactttgtcaaccaagtactcttcactccgagagttgtggatgcttctggtgacgatgaggtcctttggcttgctgcctttcagtgaaacccttgaagtgtttcgccaaaagctatactaactgtcgttgcctttgatccgaaaaggactcatctgtaactcttagtccaaacaaatgtctctttggttaatcacttgatttttcttttccatcctcaggttggttattagctcgaggttagaatatagttcctctggcacgagaccctaggtctcctttgtcagtaaacaattatacacatgatcacatatcagcatcttccaaaataatcctctttagaacttgtttttatcacacatgtctcccttattacacgaatacacggcactaccttaaacaaaaagggaagatgcttaacatcggtacattgtttatactatgggttagaattaacatgaggcctcacaggtacggcgtttgctccagtgaccacaaggcgagtgactcgtcttcttcttgcataatggccggagtgatggcgcaggttacgcttcggctgtggacaatctctagagaaatgacctggttctttgcagttgtaacaaatcaacgtcttctttactgagctgtccatctggggacgatcattgtgacttggagttggaattggtggttggaaatccttgctaacattggcatcagtggtaccatagttgctatcaccattggagtctttctcagagtcaaaattgctaaggttgtcattctggtttccaacattgatactatcgttgacatcttggtgaatgctactgacattgcacgctttattcgagtggtcactaatggggcaagaaccatggttgttggtggtatcatcatcattagtattgctagtgttgttgtctgcattgcgtccatcttcttggggcggaaactcttgatgcgcaacagaagatccggtgatctgaagtggctcagtgcgctgtctttggttaccacctggaaaatactggatgttgacaattctttctttgcagttcggtcttcgattatgctcactttcgagtttcatggttttgtccacaaggttctcaaaatcttcataatcctctagaagtagttgcactgcaagctcatcttttaacccctggagaaacttctcttgtttgtcttcatccgtttccacatcttctggtgcatagtgagccaaacgatagaattcatgcaggtactctgtgacggtcaaatctccttgcttcaggtagcgaaactcttgttttcttagtgtgaccattcctgcgggaacatgtgatctcttgaatacagatgaaaactcgttccaggtgatggtatgtccttctggccgtgatgcttcgtagctataccaccactctgaagccggtccaaccaactgatgagctgcgaagccaacccgctcctggtcggtgcactgaatcaaccctagcttcttctcgattgtgcgcaaccaatcactggcttccataggatcgacggcaatggcaaaggttggaggccccgttttgagaaattccgataacttgcactgttgctggactgtaggtacttgaacgttggttgcccctgctgggttgttccgattctgtaatagttgaaaggctgttgccaacatgttggtttggttaaccacaatttggattagctctggtgaggtttcgttgatgcttttctcattcccattggcttgggttcttgagtcatcggatccatcattcccatagcctttgttaccagtattatccatctgtcacaaggtagaggttgagagggaaagcatacaaggaaagaatagaccagagctagggacaggaccttaaaggaactaactctttttgttgatgtgttgtttgttttgcttattctgcaagttgattaagcaaacaacctagcatggttacatcaccacccaccgatgcaaaccacgcgctacacacacaagcaaggaaacacacgacaaacgaaacactagagggtggcttaggttctgcgacgggttctccaagatcttcactcctgcttcacagctggcttcactgcttccttcgcttcgctagcggatcctgcagtcttccggagcttcggcaaacaactgacgacatcttcttcttcgcaaagctgaccatctagtacttagttgaaatccgaagaaagaaaagagtaaaccttttgcaaatagcattaggggaaggagaaaaagaggaactttcgcaaataattttatttataaaatatgtccttaggttttatctatttggcttatcctacagtcgagatggctctgataccagcttgtcgcgaccgggaaaattgccttttcccgaacgctagtgtattaatccccgtcccaggaaaagccggggtacaccacacaaacatgatataaaagacacatctttattatatcgataatatttacattattacaaaggcgcatcaggcctgacaatcaaaaataaacagcagcggactagcggacctacggctccatcttcacaggcgctcaactggggtataagccaggactccacctaagacatcttctccaaagcttctcttactgaagagggaaaagattgagcaagaatgagtacgaccacagtactcagcaagccacaccggagaatgcatgattaatgcaagggagtacaaggagataataatataggggttcagttttgcagtaaacagcatttaaaagtcacttagttgcccaaagctattttataaagacgatcctagagctacacagtattattaaacaaggccgtgaaccctcacgaacctgccttaacccaaggcctacgatgatttggaccgaactggcaacccgacctgggttccagctcgtcccaagccaacccaggccaaccattccatattttagttgttgagcaaattttaagaattaaaacactgacttgggtacattgctaggcttgcccatatccgagggctcggctattcgaatagatttactctgatcagaggtgtacatctttacccacaagacacatctttactccgcattccatggccttggaacccgtcgtaaagatgtgacatagtttccaacccatcctagccttagacaagagtaccgacccaatcctacctacggccgggatacccgggacaggcaggcagaactgagcccctagcattgggcaccaaccctccgccgtatgacatctcgactaccgggccgcagctcgtgtagccttcatttgccctggagaatgtccatcgacccccgacttcatccatctccaatccgtgtacttttgtttatgactagactgagccacaaactaagccttacccattagacatgtggaagtacggtagtgctttgcaacagaggcccgagctttagtccttatagtggccggggtgctacttcccacaactggcatgcacccaaaccccaccgaaaacaggttttaggggttttgaaagaggaagagaggtgtgtgtccaattccaccataatccgacaattccatagtgtccagatgatatgagaattcccaaagtctaaagttataaaaccacctaatgttgtcctatttaatcagcgaagcatctacctaaattcatactagtggaaccatgaatagagcacccactagttggggtttttattttcctagggtgaacaaggtaataataacaataacaataataaggtcataacaaaggtaattaggcatggctagataaaacagtgataacgcgggaatttaaataaagcggtaatgcaataatttaaatcaacataattttacaaactgggattcaatatgttcaaggatgatgtgacttgccttgctcagagagaacggacttccgaaccttcggcgacgaccacgaaccacgcttcgggaacttccgggacgacagaagctacgcgaagcacacaagcaaagctacaagcctataaagaagcaataacaatacataaaaagaaagcacagggttctttaggttataacaaacattaagagacttgaacgggtcgattcggagttcgtatgaccaagatatgatcatccgaggtttaatgctgttatatggagatttgcggattattataattaagctttgcaattataaaacatgtgtaagcgctagcctggaaaagacaggaaggctgcgccgttgacatgcggaccccacatgtcaacagaagggaccgcggtagaccgagtacacagagacggtccacgggtcgacggaagcggaccccgtgtgtcaaccgaggcgagtggccgacaaacggactccactagacaccacacgggttgcacacgtggaaaccacgcggctaccgagcgggcacactaacacggacactacacggtcaccacccgcacacgtgaacgactaccgacaccggtacacgggtaccggggtcgacgatcgcacaacgggtacggggcgacaccgaaaggacgagggcggggaagcgagaagacggatccttaccaccacgcgacgaggcgtgggaacgacaacgacgaacgggcgcggcggagacagacgggcacaacggagacgaacggcgaggggacggcttcggcggcgatccttgggcgaaggcgagacgcggccggcacgaggcttgacgacgcggagccgaggacgaacacgaggacggggctgtagcgactcgcttgacgaacgcggacgacggacgagaacggcttgacggagggacgaacgccacaacgatcgggaacgacgagaggacgggggcgacgacgaccggggccggcgaggaggcgacgaggacagccggcggcggctgcacggggacgaggacgacgagggacacgccgctacgatgacgatgacggaggcggcgccgcgagacgacgagccgggcgagagggaacggtgaagacgacgacggacaccggcggtgttcggtcggaggggaggcgaggccgaggacgacgtcgcggctgcgatgccgaagatgatgggggtgtggccgaccggtgcacggcgtggagggacgggcggccgaacaactccggcgaggcggatggaggggctcgcggcgatggcgttccggcgaaaccgaggagtggacgaggtggagggctacgccaccacgcaagggagagatggcagcgccggctgatgcacgggcgcggcggaagggggctgccggaggagatgtcgacgaggaggaaggtgagaccggcgcgggcaacggcgttccggcgatattcgggcgacgccgtggcttggccgggaaagaggacggcactccggtgccgggaaaggtgatggcgacgtcggccggcgctccggggacgcggcagaggcggccggaggcgaaatcgtggcggcaacaccacggttgccggcggggaggcactcccggaggtcacctcgcgaaacggagggcaagccggggtggaggaggtggcggcgacgctggaggaggcgacggcgcggccggccggcgcacggtcgaggcggcaccggcggctggagacggccggcggcaagggagagagaggaggacggcggggagaggtgctgcggccgtgggggagctcgggaaggggctaaaacgagagaacgcacggagggggttgcattttataggatgggggagggagccgggcacgggagagggcggaacggcgacgggaatggcggccggcggcaatggagggcggccgaggaagacgcgggcgttcccggcgattgggggcgccattcaagggggaaattagggggaattgaagaggagtcaatggggattaaaaccccccaattaatttcggaatccatggtttgatttgcgcggatttggaggaggaacggagtagggttcgcacgggagggagagaaggccgtgcgggaggaggaagaaggcgacggcgccctggcgcgtgggccccaccggtcaggcggcggcgtcagcgcgcgcacgcgcgcggcacgtgcgggaggggagcggctcgggggctggggcggcttgggccgagcggccggcccaagaggagaggaggggaggcggcatgggccgagcaggccgggagggaagagggggggggaaaaaggcagcccgagagagagagggaggagggagtgggccgagagggggagaggcccaagaggaggagggagagaaggagagggagagaaagagagggaggactttgggccaaatttggcccaaaagaaagaagaggattatttttagatttttttctttttaataaactttgtcaattgttgttgttgtttaataattatttccggtgctctgaaaattcaagtaaaatttgagggctccttttagaccaaggagaatttaacaaaaattctccgggccacatttgaatttttttcttgtacgtattttaatgtttgccaatttcttttcgaatttttaattaattctattattccttttagcgaatgaattttaattttgggatgaatttatcagggcgtgacataaattaagtggataaatcgtaataagcaaatatatggacttataattaataaaaattccaatagtcatatatacttagcatatatatgaatgatattattatattggtaaaaactctaattaagatatgtatgtacatactgcatgatttaaaattaataaaaattgtaatcatcatatatacttagcgtaggaattatattaaattaaatgctaaaaactctaattaacatatgtaaatgccacatgcatgatttaaaccttttaaaaattcgaatagtcatatataagtagcatatgaaagatagtaaattaaattgtgaaaaactctaatatatgaatgatagttttaaaaatatattaaatttaatacttttaaaaattctctagtcaattataattagcatatgaatgatagtaaattaaatgttaaaaactctaactaacatatgaaattgccacttgcgtgatttaaaacttttaaaaatcctctagtcaattataattagcatatgaatgctagtaaattaaatgttaaaaactctaattaacatacatatgaaattgccacctatgtgatttaaaacttttaaaaatggtaagtatcacatataactagcatatacatgatttaaacttgttgaaacctctaataatcgtgcataattaacatatgccatacatcaattgatttatatggataatcaatacatccaaaatagtttacatcgtgtacacaataattacggcattacatcggcggtgacggttcactgcacgtactttctcctcactattgttccctccttgtgatcgctgcgtgagtaaggggtgtcttcatttgataggaggatgctagggtcaatcgtcaccgtgaaagggggttgcccatccaactgatcgtaatcctcgtcagtcttgtcctcaactccgacgatttttcttttgcctgggagaaccacttgacgcttaggctcatcaggccctctgcccttctttcctttgctagacatgtccttcacgaaaaagacttgcgttacatcattggcaaggacaaaaggttcgtccgagtatccaaccttgttaaggtcaacagttgtcatcccactgtcatcaatcattacgcctccaccagtcaacctaacccattggcaccggaacagaggaaccttgagaggaccatagtcaagttcccatatgtcctcgatggcaccgtaatacgtggcagttgttccatcgtgtcccatggcatcgacacgaacagcgatgttttggttcgtgctcttcatgtcttgggctctcgtgtagaatgtgtacccattgatctcatatccctggaatgtcgcgatcgacccagacggtcccctcgccaggaaggcaaattgttggttgatcgactcgttacccatgagatgttgtcgtagccacgcgaggaaagtatcaatgtgatgtcgtgtaatccatgcatcggacttaccgatgttcctggcgcgaactaaagccaagtgctcctcgatgtaaggagctaccaatgaagagtgttgcagaacagtgaaatgggctttacgaaataaattgttgtctaccgtcattattgctttccttccgagagttccctttccccgtagtctcccttcatggcgtgattcaggtaccccgattgggcgaaggtcttcgataaattctacgcaaaattcgatgacctcctctgttccataacccttggcgatgcttgcctctggacgagcacggttacgaacatactttttcagaacgcccatgtacctctcgaaagaaaacatgttgtgtaggtacataggcccgagaatacggatctctttcacaaggtgacaaagcagatgcgtcattatattgaaaaatgaaggtggaaatatcaactcaaaactgacgagacattgcaccacttcattctgaagggcttctaatctatccggatcgatgactttctgcgaaattacgttcaagaatgcacatagctttgttattgttgcccgaacattgtctggaaggataccccttattataactggtagcagttgtgtcatcaacacgtgacagtcatgagactttaggtttgggaacttcttctccttcgtgcttattattcgcttgatattcgtggagtatccagacggtacctttatgctctccaagcattcaaacatactttccttctctgccttgctaagagtgtagctggctggactcaagtaatggcttcctttctcctttggttccgggtgaaggtcgccgcgttgttccatatgcttcagatcattacgtgcttccagtgtatctttcgactttccgtatacacctaggaagccaagaaggtttatgcaaaggttcttagtgaggtgcatcacgtcgattgcgtggcgtacgtccaagaattcccaatatggtaactcccaaaatatagagttctttttccacatcgccgcgtgaccatcttcgctctctataggctggcttccaggcccctttccgaacactactttaagatctttaaccatagcaaacactgttttcccgctgcgatgtttaggcttcgtacggtggtcggccttatgttcgaagtgcttgcctttcttccgtaccgggtggtttgctgcaaggaatcgacgatgacccatgtatacaaccttcctacagtgcttaagatacgtactttctgtgtcatccatacagtgagtgcaagccttgtaccccttgttggactgtccggataggttgctaagtgcaggccaatcgttgatggttacgaacagcagcgctcgtatgttaaactcctcctgtttgtcctcgtcccacacggggacaccttccttcttctacaactgtttaagatcttcgaccagtggtcttaggtacacgtcgatgtcgttaccacgttgcttggggccttgaataataatcggcatcattatgtacttcctcttcatgcatagccagggggggaggttgtagatacacatcataacgggccaagtgctatggcc
